United States Patent Application Publication US 2004/0123343 A1 - sequence listing, part 47

SEQ ID NO: 162774 - protein, 214 aa, Oryza sativa
  unsure (1)..(214): unsure at all Xaa locations
  Clone ID: PAT_MRT4530_61833C.1.pep
DVESGPPHLVVKAAVLDGGTTVRSPLEMKCAKASAGGAARSRVWPVELGFXKAGVTGGAVRGQRKDCGVRRXREPLCRDVVRRKGPSRRQNAPHGASAGRESAEVPCTCMQHAPVHVTYTRRMGIKCMCMQPNHTGPETASAAVDAGMATRNKGDRGACPRGGSGAXGEPLPSRRRRAGSRGGDGASRVHGSRRRRAGARGRRRWWTRRRLARP

SEQ ID NO: 162775 - protein, 227 aa, Oryza sativa
  Clone ID: PAT_MRT4530_61834C.1.pep
MATPSPAGRTDPGGSDCHSIAFICWDLQRMMEPGYDPSSTHVPSERVAIGKSRRASERATVPSSLVGRGAWLMSPSTGGDNGGGTLTSLARSRTAGGATSSRTQDDGGTGVARPPKADGGDAEGTTRVDTNKGGDAKGMDPPALKVDDGSDEEIAARRADDGEGGAPATLMGMGRRGASDRDRDGREGADDGEGGAPAMGMGMGRGEGEKKWQLQPYLIGEKSIRII

SEQ ID NO: 162776 - protein, 63 aa, Oryza sativa
  Clone ID: PAT_MRT4530_61835C.1.pep
MAQLPPRIPTAVHHWPEGGHHGAAAWADDFAEFAASRRGAHRRSLSDSVAFVEVAPADGAPGE

SEQ ID NO: 162777 - protein, 64 aa, Oryza sativa
  Clone ID: PAT_MRT4530_61836C.1.pep
AVADALSRREVGEGGQLSAISVCIQAKPERVKYPGLLQPLPVPEGAWQTITMDFLEGLPKSEST

SEQ ID NO: 162778 - protein, 59 aa, Oryza sativa
  Clone ID: PAT_MRT4530_61837C.1.pep
QAMAGAKGEVQTSAMAERSVRVAARLTIYPRSGGGLRRADDDGRPVKADKNCGQIGKKK

SEQ ID NO: 162779 - protein, 532 aa, Oryza sativa
  Clone ID: PAT_MRT4530_61838C.1.pep
MASSASTLEIEARDVVKIVLQFCKENSLQQTFQTLQNECQVSLNTVDSIDTFIADINAGRWDAVLPQVAQLKLPRKKLEDLYEQIVLEMAELRELDTARAILRQTQVMGVMKQEQPERYLRLEHLLVRTYFDPNEAYQESTKEKRRAQISQAIASEVSVVPPSRLMALIGQALKWQQHQGLLPPGTQFDLFRGTAAMKQDEEETYPTTLSHQTKFGKKTHPECARFSPDGQYLVSCSVDGIIEVWDYISGKLKKDLQYQADESFMMHDDAVLSVDFSRDSEMLASGSQDGKIKVWRIRTGQCLRRLERAHAKGVTSVTFSRDGTQILSSSFDTTARVHGLKSGKMLKEFRGHNSYVNCAIFSTDGSRVITASSDCTVKVWDTKTTDCLQTFKPPPPLRALNHASYLMVVLHFQGGDATVNSVHLSPKNSDHIIVCNKTSSIYIMTLQGQVVKSFSSGKREGGDFLAASVSPKGEWIYCVGEDMNMYCFSYQSGKLEHLMKVHDKDVIGITHHPHRNLIATYAEDCTMKTWKP

SEQ ID NO: 162780 - protein, 58 aa, Oryza sativa
  unsure (1)..(58): unsure at all Xaa locations
  Clone ID: PAT_MRT4530_61839C.1.pep
PLHPIMTHALESMHNHAWQTWSHYLHVHHIRHVXSGHQAQHRYTHNRASPATPAPCST

SEQ ID NO: 162781 - protein, 73 aa, Oryza sativa
  Clone ID: PAT_MRT4530_6183C.1.pep
FFFFLYIRDISIWPVQMSLALCWSYKVQHARTSNLATYPSIHVCILLYIHGKNCDLHISTRTRTYISIDRRYI

SEQ ID NO: 162782 - protein, 83 aa, Oryza sativa
  Clone ID: PAT_MRT4530_61840C.1.pep
KAQHTQSSMRNSGRLGRGPQALVGRHEIDTIAFILQGLIVWVWEKLSKTEYTHHRSGNLTKGASSSQANPGQPFRGSSKICGM

SEQ ID NO: 162783 - protein, 199 aa, Oryza sativa
  Clone ID: PAT_MRT4530_61841C.1.pep
MKQEKDARIIVLALAAPVTKFKPPQTRKRNKASSSNHAKSKRASTDGPSGIIKLKESTTFAHGKDQIMEEATDFVHQIGTVNNIQQNQEEPAGLNQQQPAYLGLAHGGPQIPLEAAGITMLQESTTANGIAQIMEEETDTDDNVQQNKEEPAGLNQQQPDLGLADVPQIPEEAAPGPADPNEDVNDVFEFALNNNVLDL

SEQ ID NO: 162784 - protein, 83 aa, Oryza sativa
  Clone ID: PAT_MRT4530_61842C.1.pep
RPRPWRRQVGSGGGSDCGGDDDDRNRGGDDDDDDDAATGGSMRGRRSTPAGLAEAACHRLCTSTQQHACRHGGQRVGDKQRLL

SEQ ID NO: 162785 - protein, 437 aa, Oryza sativa
  Clone ID: PAT_MRT4530_61843C.1.pep
MASRYMLAPCSRCPRWPAAAAMPSQAVCEPENGADSLPLGECEQSRKGPKGSSVFYMNFYDGDDDDDDDLITEWWDQEELSDDDDYYIAAALLTDIEHKRTKRKRRGSVPGREIIYRDRRRFRMSKELFLRIVASVEAYDDYFRQRPNAKVYGAICMLAYDILADSLDEVVRISESTMIEAFKHFVKAVVDVFADQYLRAPTAEDTARLMAINTPRGFPGMLGCIDCMHWRWKNCPTGWKGQYSGHVDGPTMILESVASKDLWIWHSFFGLPGSLNYINVLQRSPLFQRLTSGTASELEFMVNGKKYTMGYYLADGVYPSWATFVKTISNPQGNKRIHYAKVQEGVRKDVERAFGVLQACFAMVRGPARFWDTETLWYIMTACVIMHNMIIDNERDEDVDYDYDQEDSEVLRKEEYQRRNKPMLEKFLKIHKEIEDH

SEQ ID NO: 162786 - protein, 103 aa, Oryza sativa
  unsure (1)..(103): unsure at all Xaa locations
  Clone ID: PAT_MRT4530_61844C.1.pep
RLLWSARSGGSGGGXXXXEAQAAGXGELGRALLDLQAAVGLGFDAVAARAAAVFLXLSXFXLAAGASFSLXXPLSPSAGPLAVVXXAPXPSWCAVXVDLGPLF

SEQ ID NO: 162787 - protein, 546 aa, Oryza sativa
  Clone ID: PAT_MRT4530_61845C.1.pep
MTIVLQVGVKDIYGDDIRPLGRASGKGSSHACSARVFYMDFYDDDDDDDDLITDWWDQEELSDDDDYYIAAALLTDIEHKRTKRKHHGSVPGREIIHRDRFAGNLRIVADYFADPPIYSAKLFRRRFRMSRELFLRIVASVEAHDDYFRQRPNAVGLLGATALQKVYGAIRMLAYDIPADSLDEVVRISESTMIEAFKHFVKAVVDVFADQYLRAPTAEDTARLMAINTPRGFPGMLGCIDCSLNDINVLQRSPLFQRLTSGTAPELEFMVNGNKYTMGYYLADGIYLSWATFVKTISNSQGNKRIHYAKVQEGVRKDVERAFGVLQARFAMVRGPARFWDTETLWYIMTACVIMHNMIIDNERDENVDFDYDQEDSEVLRKEEYQRRNKPVLEKFLKIHKEIEDRRPNDPSRANDYSIENIPLILHHIFLQQVSHQLMKLPSKQEEALTAQVHIGGTLTWQPVQAEESVQTWQLVQAEESFAMDQTVQTWQQVQAEEVVEAEEPVQAKEPEEPMQAKEPEEMEEAEETALAAGMEVWTPHLARET

SEQ ID NO: 162788 - protein, 390 aa, Oryza sativa
  Clone ID: PAT_MRT4530_61846C.1.pep
MDFYDGDDDDDDDLITEWWDQEELFDDDDYYIAAALLTDIEHKRTKRKRRGSVPGREIIYRDRFAGNLRIVADYFADPPVYNAKLFRRRFRMSRELFLRIVASVEAHDDYFRWRPNAVGLLGATALQKVYGAIRMLAYDIPTDSLDEVVRISESTMIEAFKHFVKAVVDVLADQYLRAPTAEDTARLMAINTPRGFPGMLGCIGCSLNDINVLQRSPLFQRLTSRTAPELEFIVNGKKYTMGYYLADGIYPSWATFVKTISNPQGNKRIHYAKVQEGVRKDVERAFGVLQARFAMVRGPARFWDTETLWYIMTACVIMHNMIIDNERDEDVDYDYDREDSEVLRKEEYQWRNKPVLEKFLKIHKEIEDRQVHEQLRDDVVEQLWALHGAR

SEQ ID NO: 162789 - protein, 332 aa, Oryza sativa
  Clone ID: PAT_MRT4530_61847C.1.pep
MDFYDDDDLITDWWDQEELSDDDDYYIAAALLTDIEHKRTKRKHRGSVPGREIINRDRFAGNLRIVADYFADPPVYSAKLFRRRFRMSRELFLRIVASVEAHDDYFRQRPNAVGLLGATALQKVYGAIRMLAYDIPADSLDEVVRISESTMIEAFKHFVKAVVDVFADQYLRAPTAEDTTRLMAINTPRGFPGMLGCIDCWKGQYSGHVDGPTMILEAVASKDLWIWHSFFGLPGSLNDIIVLQRSPLFQRLTLGTAPELEFMVNGNKYTMGYYLAVGIYPSWATFVKTISNPQGNKRIHYAKVQEGVRKDVERAFGVLQARFAMVRGPARF

SEQ ID NO: 162790 - protein, 151 aa, Oryza sativa
  unsure (1)..(151): unsure at all Xaa locations
  Clone ID: PAT_MRT4530_61848C.1.pep
GEYAQAELHMSTFYPIIEQSLXMEPIVEIPLSXVDFLLVSYTKKEFFGNISLISMPQLVNEHTNSMGGLLGVNFKHHVHNVIXLNTLGYILFDDLFELNNLKQKLFARSYLPCLGNXIFHIFDKYNDKRVYMVHIFYLCLDLDLLVAMRYF

SEQ ID NO: 162791 - protein, 429 aa, Oryza sativa
  Clone ID: PAT_MRT4530_61849C.1.pep
MVLLLHGHRPYRCPPACHYPLAGRRTGGCPPPRCPIGPTDGGPPPSHCRRATAPSQPTRRPMLAALCPLRLVWHLEGMGLGVYTRELMEEASDDDDYYIAAALLTDIEHKRTKRKHRGSVMGQEIIYRDRFAGNLRIVADYFADPPIYSAKLFRRRFRRMSRELFLRIVASVEAHDDYFRQRPNAVGLLGATALQKVYGAVRMLAYDIPADSLDEVVRISKNTMIEAFKHFVKAVVDVFADQYLRAPTADDTARLMAMNTPRGFPGMLGCTDCWKGQYSGHVDGPTMILEAVASKDLWIWHSFFGLPSSLNDINVVQRSPLFQRLTSGTAPELEFMVNGKKYTMGYYLANGIYLSWATFVKTISNPQGNKRIHYTKVQEGVRKDVERAFGVLQARFAMVRGPAKFWDTETLCERDEDVDFDYDQGIVRC

SEQ ID NO: 162792 - protein, 99 aa, Oryza sativa
  unsure (1)..(99): unsure at all Xaa locations
  Clone ID: PAT_MRT4530_6184C.1.pep
MLQLRTTXLWDISIFFMHTMLSALLLKLEQPHISDNISLLYLAHTCLIINISLLNVAGLTKSHYQTILPMYKIALSQGCFLLWPPHITRIVIPKQIPNP

SEQ ID NO: 162793 - protein, 484 aa, Oryza sativa
  Clone ID: PAT_MRT4530_61850C.1.pep
MPLLLAPPPSAARPLLAPTVPHLARTLLAGAPETPPLLLAILQASPPLLTPLLSHLLLSHSPPLPALSLFRRLLALPGFPVPEASLPALLRLLARSRRHAVLSFRLLDSLPPTHPHLLSTPALAVLLSTALSASAPGASFDAAVTCFDSAARVWARAGREFGVAELNALLRAFCARGRVAEARALFHRYCDAYPPDARTFNTLLLGFKEAGNAQALDLFYHDAVLRGFVPDAVSYCVRMDAYCKKGRFLDALDLLDEMRKRENCRPTLQVFTTLIYGAGIVRNAIRARQLFDEMGQWGVTPDRGAHNALMGAYVRARDLQSGMTVMSEMERKGIGLDDVSYNTMLCGFQRIGDLEGIWKVYSKMVGSGFMPRTRTTMLLMKVFCENARPDLGLELWDYLLGKGCVPHRHALDVLVTGLCCRGVVLEAYRCFREMIEMGMTPTERAFRVLEGFLKRKREFEKLEEIRQMMKAAQLDEHQCDEEAA

SEQ ID NO: 162794 - protein, 180 aa, Oryza sativa
  Clone ID: PAT_MRT4530_61851C.1.pep
MMTSSPAAARHTMLAGERRRDSANEGHQRVERNAANSPKAQMTTDGNRWQRRRGRGGGDLRDDGDGDDPVVFGGNGGWDGDGDDLAIPTAAACTRLGRGWRLEVEDGPDRWAPPHGLDVDSTHTAVTPDFPSLLYLHDIPQSLAPLANIVITTAADELMRAIVPSLADENGVSMIRPARE

SEQ ID NO: 162795 - protein, 100 aa, Oryza sativa
  unsure (1)..(100): unsure at all Xaa locations
  Clone ID: PAT_MRT4530_61852C.1.pep
NILVILSLIIYIXYGTYTGKKNKKNNSLINSPICVHCTHQTKSWALNTTMIHFWYLSSDSNLFDPSPCTAPDLMQQVAIKTEALHWKLKTNSWCCSDPMG

SEQ ID NO: 162796 - protein, 630 aa, Oryza sativa
  Clone ID: PAT_MRT4530_61853C.1.pep
MAVAGAFRRSTSTALQALTALSVLAALLQVEGQMYGPEEAAQTAQCPPFSWGHLKNVSPPFRRHGDPPDCGYKSHELVCSDTKATIRINNATYYVTRIIHWSLFVVVDTDLLNSHNSSCPLPRRQHQPPHERISMAPTSDGVQVIELAPFTNRWAAFVNCSKEITRNVRYKPVACLSTSHSFVYVLTGSESETVYVESLEPSCGYLGMTPLDDRGASINASLSYADVLKYMRKGFAIGISSSSGTYHFDFRACLAESVRFLLAPLVVLTFLSHKYWKARITIDAVEKFLRMQEMLSPMRYGYTDIIAITSHFRDRLGQGSYGTVYKGVLLPGNIHVAVKMLNGNSNCNGEEFISEVSTIGRIHHVNVVRLVGFCSEEMRRALVYEYMPRGSLDKYIFSSDKSFSRDKLNEIALGIARGINYLHQGCDLQILHFDIKPHNILLDKNFVPKVADFGLARLYPRDKSFVPVSAARGTVGYIAPEMISRSFGVISSKSDVYSFGMLLLEMAGGRRNADPNAENSSQAYYPSRVYRQLTRQETGEITAAADMHELEKKLCIVGLWCIQMRSCDRPMMSEVIEMLEGGVDCLQIPPRPFFCDDDYIPAMESLYLSSELELAAISEEKDEESITELN

SEQ ID NO: 162797 - protein, 631 aa, Oryza sativa
  Clone ID: PAT_MRT4530_61854C.1.pep
MAGAFRRSAALQAMAAFSVLALVVPDQVQGRGKCPSFSCGRLSYVHFPFRRQGDPAECGVPSYELTCADSNATIQIDKATYLVTDINYSDQYFWVVDASLDSANNCPLPRWSQTPYNENYRLGEDSHRRVQVQLSPDVDWFATFVKCSQEMNSSNVMYRPVACRSGNSSFVYVLTGLGSYLAENLEPSCGYLAMTPLALGGLENWRTATAAATLEDVNYEDVVRSMSEGFAVRFPFRSGGFIDCLRGLISRDEHVYGVACRFVLVMLLMWTSVAYMYWKIKMRVDEVEKFLQLQQMLTPTRYSYTDIIAITSHYRDKLGQGGYGSVYKGVLLPGDVRVAIKMLKGDANCKGEEFISEVSTIGRIHHVNVVRLVGFCSEEIRRALVYEYMPQGSLDKYIFSSEKSFSWDKLNEIALGIARGINYLHHGCDMQILHFDIKPHNILLDNNFVPKVADFGLAKLYPRDKSFVPVSAARGTVGYIAPEMISRGFGAISSKSDVYSFGMLLLEMAGGRRNADPNAENSSQAYYPSRVYRQLTRQETGEITAAADMHELEKKLCIVGLWCIQMRSCDRPMMSEVIEMLEGGVDCLQIPPRPFFCDDDYIPAMESLYLSSEVELAAISEEEDESITELN

SEQ ID NO: 162798 - protein, 51 aa, Oryza sativa
  unsure (1)..(51): unsure at all Xaa locations
  Clone ID: PAT_MRT4530_61855C.1.pep
LXXYXGVRLXXKXXXKCKXLLXXXXXXXLXXXXXPLAFSSPSPPAARRTSG

SEQ ID NO: 162799 - protein, 56 aa, Oryza sativa
  Clone ID: PAT_MRT4530_61856C.1.pep
LCEVVRNKDVVGRIAKWVIKLSQFNVHFVLRTAIKFQVLADFVTDWTIPWQYPAAS

SEQ ID NO: 162800 - protein, 64 aa, Oryza sativa
  Clone ID: PAT_MRT4530_61857C.1.pep
QSLCESLVHHTIVIISGAQQIVLSNGLYKTVMQRVLVYLNECRMAIASFFNAGTHPVIVPAPEI

SEQ ID NO: 162801 - protein, 133 aa, Oryza sativa
  Clone ID: PAT_MRT4530_61858C.1.pep
PTRPKAPAGKKPKAEKRLPASKASSKEGGAGDKKGRKKAKKSVETYKIYIFKVLKQVHPDIGISSKAMSIMNSFINDIFEKLAQEAARLARYNKKPTITSREIQTSVRLVLPGELAKHAVSEGTKAVTKFTSN

SEQ ID NO: 162802 - protein, 318 aa, Oryza sativa
  Clone ID: PAT_MRT4530_61859C.1.pep
MASCLSVLLLLCLALAGSVSGQQLSATFYSRSCPRALAIIRAGVRAAVAQEPRMGASLLRLHFHDCFVQGCDASVLLNDTANFTGEQGANPNVGSIRGFNVVDNIKAQVEAACKQTVSCADILAVAARDSVVALGGPSWRVLLGRRDSTTASLALANSDLPPPSFDVANLTASFAAKGLSQADMVALSGAHTVGQAQCQNFRDRLYNETNIDAAFAAALKASCPRPTGSGDGNLAPLDTTTPTAFDNAYYTNLLSNKGLLHSDQVLFNGGAVDGQVRSYASGPSRFRRDFAAAMVKMGNIAPLTGTQGQIRLVCSKVN

SEQ ID NO: 162803 - protein, 159 aa, Oryza sativa
  unsure (1)..(159): unsure at all Xaa locations
  Clone ID: PAT_MRT4530_6185C.1.pep
SMIRRGSVFDPFSLNLCDPGHGFPFGSGDXSDETRRLLPRRNSKAAGFGGGRIHXKETPEVHGYEAHEPGVKKEEDEVDAHXGNILQISAEGITQQEEKPDKWDRXVERSSRKVLRRVRLPENTKTDYIWVPMXNGVVTVSVPXEEPRKPDVKCIQISG

SEQ ID NO: 162804 - protein, 121 aa, Oryza sativa
  Clone ID: PAT_MRT4530_61860C.1.pep
MLAPIARAIETGYLLRRTHRKTRKYNCLNRALSLIGNDGYPDLGPRRAQVMSYRLYRPSASSTLINPILCFQPIRHPADAQSDSQFSSIPHQIRFDLLPPSPNLMPNSVVNNIANVLGCRE

SEQ ID NO: 162805 - protein, 96 aa, Oryza sativa
  unsure (1)..(96): unsure at all Xaa locations
  Clone ID: PAT_MRT4530_61861C.1.pep
GRAPRLIIRGGLLFPSEEKKWGQRRGGSKNRRAAPRGGEGNPARKKIGQXKAWKANKRLRCPXELXLEGGGGMILXDGGGVIPQVISFLXQLIVLG

SEQ ID NO: 162806 - protein, 116 aa, Oryza sativa
  Clone ID: PAT_MRT4530_61862C.1.pep
FLLGSLWWLVPGLFALTPGPLNPLDGRSDAVFPESLRCWMIISSWFRLSWRLWFVNPSSPADHISLWDGGPEPFMFRAPCPLKSRRKYPSSVFSLGPPVRLLFPPDISASVAWGTN

SEQ ID NO: 162807 - protein, 48 aa, Oryza sativa
  Clone ID: PAT_MRT4530_61863C.1.pep
LSCQLDRLDQLMHSEMDDGWPSWGPPAAGHGGCVVASIRSDGDDTLRR

SEQ ID NO: 162808 - protein, 136 aa, Oryza sativa
  Clone ID: PAT_MRT4530_61864C.1.pep
MTGVYKENEIEHIKHWLSHQEEVHDELLLHACDIESQIEKETKMPMIHENILVPSIVSNIVQEDMNPHLNMEKYEKPNGSYNVDAIGINSPNVVLNIDDNIQGEECCALLNSKVKSRYHFKTYSFSKLISPIRQLQ

SEQ ID NO: 162809 - protein, 124 aa, Oryza sativa
  Clone ID: PAT_MRT4530_61865C.1.pep
YITEVAFGGRPVIIRDYPKVIKAFYMRENDDGNTVAAMDLLVPRVGELIGGSPREERLDYLEARLDELNLNQDSYWWYLDLRRYGSVPHAGFGLGFERLVQFATGMDNIRDTIPFPRVPGSAEF

SEQ ID NO: 162810 - protein, 194 aa, Oryza sativa
  Clone ID: PAT_MRT4530_61866C.1.pep
MTEVYKENGIEQIKHWLSQREELLLLACDIESQIEKETKIAMIHDNIPVPSIISNIVQEGKNNFEEKKNEAPKFGQESVSDMNPPLNMEKYEKPNGLHNVDAIGINSPNVVLNIDDNIQEGECCALLTSKVKSRYHFKTYSFSTCSLVCIAEIIKCASRLGRDSKSTLRDLKWTYFPAKSVASTSTNDIFKFIF

SEQ ID NO: 162811 - protein, 168 aa, Oryza sativa
  Clone ID: PAT_MRT4530_61867C.1.pep
MGREGEGEAGGLRRRQCRFGEPTCAVKSASWRSASGQSGGRRDDAGGRGKRRKGKRRRRKEFSPLPIREKEGGRGATTRQREAPRRNGRYKQPPPPPFVSGLGGDLVVVKLVSATVPRWKKYDFARCKVQIMAMARFCHPRILFDDHRDGVSLPAALLTNSVGDDVAS

SEQ ID NO: 162812 - protein, 212 aa, Oryza sativa
  unsure (1)..(212): unsure at all Xaa locations
  Clone ID: PAT_MRT4530_61868C.1.pep
MAIPTILGSLKLTPSPPSATPVRSSASSSLHFHLANAGAAALVAASLLVADPALAFKGGGPYGQQVTRGQDLTGKDFSGQTLIRQDFKTSILRQANFKGAKLLGASFFDADLTGADLSDADLRGADFSLANVSKKVIDHFLIKLLPVCQAWISQVNLTNANLEGALATGNTTFKXDFTDVPLRDDQREYLCKIADGVNTTTGNATKETLFCK

SEQ ID NO: 162813 - protein, 169 aa, Oryza sativa
  unsure (1)..(169): unsure at all Xaa locations
  Clone ID: PAT_MRT4530_61869C.1.pep
YVGAEPRWHGIGWSRRLSASLKRNRCKRRAPNLHLVVVVVASPDPPQSLSLLPATASPSFLSSLDPSPPLFPAAGSGEPVPGSGKPAAAKLATPSASSSVLSWGEQDDGVEAASGSTALWPXHRQIRRARRRQARHAVGELVRTVVXGEEDGGIEHGTYHRGLPRRWRH

SEQ ID NO: 162814 - protein, 175 aa, Oryza sativa
  unsure (1)..(175): unsure at all Xaa locations
  Clone ID: PAT_MRT4530_6186C.1.pep
RTPPRRTPGSARTAPGPLCVCKIKXVFDYCFVMNNWHMRLLVLMLRYYWRSGFGDDXLQVMDRIDKSDGCDIRTIRISCGILWLNXLHVVGEDFIWHTMXILCAYEIRSRIWKESKFGTFGXVKFVSFSERFPXMIRTSCTRLVRDFRLPTSVINREGGCDRLQRGXQTGGHTVV

SEQ ID NO: 162815 - protein, 470 aa, Oryza sativa
  unsure (1)..(470): unsure at all Xaa locations
  Clone ID: PAT_MRT4530_61870C.1.pep
MSSSAAALAWRRSLRDALLXRLRVARRARRQLRRRAVXPARPPHPKRRLVRRRCLRLPXKGRLLTGAMIGLAIAGGAYVSTADEAKFCGWLFKSTQLVNPLFALLDAEFAHRLAVTAASHGFVPREKRPDPSVLGLEIWGRKFTNPIGLAAGFDKNAEAVEGLLGMGFGFVEVGSVTPLPQEGNPKPRIFRLREHGAVINRCGFNSEGIVVVAKRLGAQHGKRKMEETSSSTSPTTSDVKQGGKAGPGILGVNLGKNKISEDATADYVQGVHTLSQYADYLVINVSSPNTPGLRKLQGRKQLKDLVKKVQAARDEMQWAEDGPPPLLVKIAPDLSKQDLEDIAAVALALRLDGLIISNTTISRPSPADTHPLAQEAGGLSGKPLFDLSTNVLREMYILTRGKIPLIGCGGVSSGEDAYKKIRSGATLVQLYTAFAYGGPALIPRIKAELAECLERDGFKSVQEAVGADFK

SEQ ID NO: 162816 - protein, 206 aa, Oryza sativa
  unsure (1)..(206): unsure at all Xaa locations
  Clone ID: PAT_MRT4530_61871C.1.pep
RGTGASVAPGLRSREASRWRSRSPARHLVRSPRAPTPNLHLVVVVVASPDPPQSLSLLPATASPSFLSSLDPSPPLFPAAGSGEPVPGSGKPAAAKLATPSASSSVLSWGEQDDGVEAASGSTALWPXRQIRRARRRQARHAVGELVRTVVXGEEDGGIEPASGSAAENPDPPPRWRARRRMREGGERGGEKWLGRERGERERVKK

SEQ ID NO: 162817 - protein, 51 aa, Oryza sativa
  Clone ID: PAT_MRT4530_61872C.1.pep
CHNVDENRSSVRQLLLTNPGALHHLTREILVKDTLLLTTMDGKRLPPVLME

SEQ ID NO: 162818 - protein, 64 aa, Oryza sativa
  Clone ID: PAT_MRT4530_61873C.1.pep
PTRAASLRSTSTGQSEGEYEAYKVGLLPCCFRSCLIRIYHPQLNKLFNSLIDRRKITLGAPESV

SEQ ID NO: 162819 - protein, 27 aa, Oryza sativa
  Clone ID: PAT_MRT4530_61874C.1.pep
TRTRSRTRGKRQDAHEHDDNATLGLPY

SEQ ID NO: 162820 - protein, 126 aa, Oryza sativa
  Clone ID: PAT_MRT4530_61875C.1.pep
WPEPRERATAVARVGEPAVGARERRDGVAAVAGAREPREGAAAVAGAGGGRGGDGGRSRGRERRRWSEPMGEGAATGAGAGSRGWEGVAVVRRWSRRRERRRWPELGRKGRWGGSGWRRQCRVCIA

SEQ ID NO: 162821 - protein, 90 aa, Oryza sativa
  Clone ID: PAT_MRT4530_61876C.1.pep
GPISRFPPPAREPGGSFPLFAPLAAKDRVFLFPSPDFPVLWISETEAPSVQARGFFLPPFIMLAPEIPWFIVKRKNRWIFQKVLPRSKSV

SEQ ID NO: 162822 - protein, 193 aa, Oryza sativa
  Clone ID: PAT_MRT4530_61877C.1.pep
MASDELPVAAAATEEEDLVEILDEGSGRLDIARYVDHVRDLAAGAIATFEGTTRDSFEGRRVVELRYEAYGAMARRRLAAILREARAAHSLRRLAVAHRLGTVPAGEASVFVAASAVHRADAMEACRYVIDEVKASVPIWKKEVYDDGEVWKENREFLDRTTTDGTTASSPAPATRPAKGGGCCGRKVRVNES

SEQ ID NO: 162823 - protein, 168 aa, Oryza sativa
  Clone ID: PAT_MRT4530_61878C.1.pep
MAKEKWGVDGYGSMKGLIRLRSQAADAGGLPGEDSGSGESDVEEHVEVERRLDHDLSRFEMVQLPVAAGDCEDDEDDDDGDEARTARLEEENLTLRERLFLMERDMDDLRRRLLAVETLCRDRHRDGCVVDAAGVVAEETVLSESVAGADLAGVGDDDGDTAADAMKA

SEQ ID NO: 162824 - protein, 102 aa, Oryza sativa
  Clone ID: PAT_MRT4530_61879C.1.pep
MTYQSTGAAVRNELGSSTGKLLLGVRGSPSAQRRLSVPRLLSLAMGPREGSMLMGGGRRWRPPFWREGRRRARRLEAAATATRSSGLLPPPATASTGDDLHG

SEQ ID NO: 162825 - protein, 114 aa, Oryza sativa
  unsure (1)..(114): unsure at all Xaa locations
  Clone ID: PAT_MRT4530_6187C.1.pep
YREILMVPMIYGSTSHVERTXILHQFNNSSHVTTTLLAKVADNMTDIREANVIIQILYHAGSREXEAQRLGRIXLRLEGRHEDRMAGGKEECHVLFYYIVWTDTQEMFYSSKRQ

SEQ ID NO: 162826 - protein, 56 aa, Oryza sativa
  Clone ID: PAT_MRT4530_61880C.1.pep
MDGGQDGGSRWPVRGVEEREEGEWICGRRMARKEKRGFAARRHWNPKSCGHRLQQL

SEQ ID NO: 162827 - protein, 88 aa, Oryza sativa
  Clone ID: PAT_MRT4530_61881C.1.pep
MGPREGSNDVPEYRWRRPPFRWEGRRRRSDAAATATRSSGLLPPPATASTGDDLHGNELTATAGCRCDKCPSSPLFLLYFPLVACPIH

SEQ ID NO: 162828 - protein, 125 aa, Oryza sativa
  Clone ID: PAT_MRT4530_61882C.1.pep
KPHSPLPGPSPESKPLFDLPKHVSAQIIPSVMQHSSKGLSWSCSSRLDQEGFVEVVWQRVVELRQEMEYAHEGLFMDLGWVGSEDGIDLVASEVGKMVHEDLLQETISEFLGVTKSAMICGWNEP

SEQ ID NO: 162829 - protein, 56 aa, Oryza sativa
  Clone ID: PAT_MRT4530_61883C.1.pep
MCVPLQLLLVGGNGLPCFENRAVIVEMNWAECRFVLWRTEVRGGEQRERSVDGANS

SEQ ID NO: 162830 - protein, 168 aa, Oryza sativa
  unsure (1)..(168): unsure at all Xaa locations
  Clone ID: PAT_MRT4530_61884C.1.pep
HSLTPISTPLLPSSPPVPSPLLPILPSPPAPFRRAAAPRRHAAVAQRAGHVAGGRAAAAVAACARGGSLRRWWRGDGARGARAAVGSPPPDPGGEAAGRWHQSXAGRAATGGMREASGGERSGESEGEGRDGPQWRGDEIPLIRVAGYASQEGDARCRNDSWRLQRRH

SEQ ID NO: 162831 - protein, 456 aa, Oryza sativa
  Clone ID: PAT_MRT4530_61885C.1.pep
MDKSQGVLLSSNVGAGSRPWPELLGSAHWDGLLDPLDLTLRRLILLCGDLCQVTYDSFNSDSHSKYCGSCRFSRSTLLDRTQFPAAGDLSVAAYLYATSDATAFPGSMVYSMSREAWSKESNWIGYVAVSNDAAAAASGQRVIYVAWRGTIRSLEWVDVLKPDLVDHDDILPEGHPGRGRSRVMKGWYLIYSSTDERSPFSKYSARDQMLAAVRELVARYRNESLGVVCTGHSLGASLATLCAFDIVVNGVSKVGDGAHIPVTAVVFGSPQIGNPEFKKQFEEQPNLRALHVRNMPDLIPLYPSGLLGYANVGKTLQVDSKKSPYVKRDTSPGDYHNLQGILHTVAGWNGKDGEFKLQVKRSVALVNKSSGFLKDSNLVPESWWVERNKGMVLGQNGEWQLEGPAEENLPVPPVVTGKIIDDDVAAVATSSSAKEDKKTGKGSKLLSGLIDQLLCV

SEQ ID NO: 162832 - protein, 51 aa, Oryza sativa
  unsure (1)..(51): unsure at all Xaa locations
  Clone ID: PAT_MRT4530_61886C.1.pep
RSFFFVGRTTCRKPFLALIVFRVSSVLSRNGNHTPSMLFCSIKLLKVSXXN

SEQ ID NO: 162833 - protein, 279 aa, Oryza sativa
  Clone ID: PAT_MRT4530_61887C.1.pep
MMAAPLAAVHAIITCSASNKNSPPSARQQQQTTTTTATRGSPAALPSLLRTTAAAAATAALALAPPDALAAGGEFGILEGRSVALLHPLVMGGLFAYTLWAGYLGWQWRRVRTIQDEINELKKQLKPAAAAATPAAVAAGDSSSSSSSPPPSAPKSPVEIKIDELTEERKKLIKGSFRDRHFNAGSILLGLGVTESVGGALNTWFRTGKLFPGPHLFAGAAITVLWAAAAALVPAMQKGNETARSLHIALNAINVLLFIWQIPTGLEIVGKVFEFTTWP

SEQ ID NO: 162834 - protein, 282 aa, Oryza sativa
  Clone ID: PAT_MRT4530_61888C.1.pep
MASLRPTAAIVADAASYISTLLAPPSQAAPRHTGRRRSMRGGLAAPSASSSSSSLARTVRIRPACARGRWRPSRPPPHHRRRFRPPSKLHGEVEGAAAFTVNRAAHRPLRGWPRKAGAPTPSPSTASLAFGLGRTPQCRAGKKSTLLLGDSEKHAGVGTYAAGVHLAAARRVPRPRIRIAESLMGHWLPCRSDGKASSNSHHGVTAPSAAVVSGTGARRLLGEGTAGSGHRSTSPVRTPRRSDWAAATARRGGAASGGVCGEEKGRCRGEELGRRRAGRARV

SEQ ID NO: 162835 - protein, 345 aa, Oryza sativa
  Clone ID: PAT_MRT4530_61889C.1.pep
MASLRAVPLLVLGMALEGAEPPELHSSATMASLRPTAAIVADAASYISTLLAPPSQAAPRHTGRRRSMRGGLAAPSASSSSSSLARTVRIRPACARGRWRPSRPPPHHRRRFRPPSKLHGEVEGAAAFTVNRAAHRPLRGWPRWIRPPPNSSVPRATPTAVRVRCRAAQCCHPRPPLKAGAPTPSPSTASLAFGLGRTPQCRAGKKSTLLLGDSEKHAGVGTYAAGVHLAAARRVPRPRIRIAESLMGHWLPCRSDGKASSNSHHGVTAPSAAVVSGTGARRLLGEGTAGSGHRSTSPVRTPRRSDWAAATARRGGAASGGVCGEEKGRCRGEELGRRRAGRARV

SEQ ID NO: 162836 - protein, 205 aa, Oryza sativa
  Clone ID: PAT_MRT4530_6188C.1.pep
KYSVSLSSRYITVAAAPTPIRSFGSTSPMLSSSPVGCVFFCTVDGVEGVCSHGGRVRERHTRSRRRTPPASMHPSNPSCRPVVAVGPARAPPTASAPCCYLRPPFHARRPPPSILLAPVASAPTGLHVRRPPCLYTDRPPYLCARRPPCLHACFLGRMKSVEQSREKRRNRKGWNILEWAKGRLWVEKKEKHSLSNFRESSNLMH

SEQ ID NO: 162837 - protein, 94 aa, Oryza sativa
  Clone ID: PAT_MRT4530_61890C.1.pep
MLHPSMNPLFPRSLLLPSTYHRFPTLLTTKWLEPGIRASSRASGFVPTTTGHYPLVTAAPKGGGSPPSPPPRAAPKNLSPSPPTVTACHRRGRC

SEQ ID NO: 162838 - protein, 401 aa, Oryza sativa
  Clone ID: PAT_MRT4530_61891C.1.pep
SRLAPGVNRTPGGTRGEPGAGAMMISRQLVLTYLYLLIYVCLSSGVILFNKWVLSPKYFKFPFPITLTMIHMAFSGVVTFFLVRVFKVVAPVKMTFQIYATCVIPISAFFASSLWFGNTAYLYISVAFIQMLKALMPVATFIMAVLCGTDKLRWDLFLNMVLVSVGVVVSSYGEIHFNIIGTLYQVTGIFAEALRLVLTQVLLQKKGLTLNPITSLYYIAPCSFIFLFVPWFLLEKPEMDVSQIQFNYWIFFFNAVAAFALNISIFLVIGRTGAVTIRVAGVLKDWILIALSTIIFPESIITSLNIIGYAVALSGVVMYNYLKMKDVRANQLPADIAPDRATKDKKISNIYKPDNFMDSNDETTVGSLASEGAGVDEEAPLIPSSRLSYVTRTQTGSFNSR

SEQ ID NO: 162839 - protein, 162 aa, Oryza sativa
  unsure (1)..(162): unsure at all Xaa locations
  Clone ID: PAT_MRT4530_61892C.1.pep
FDVTTKXGFLHPALQKCEYWRLSDPKGKPPGVVGWWPSRAVTFIENHDTGSTQXGHWRFPEGKEMQGYAYILTHPGTPAVFFDHIFSDYHSEIAALLSLRNRQKLHCRSEVNIDKSERDVYAAIIDEKVAMKIGPGHYEPPNGSQNWSVAVEGRDYKVWETS

SEQ ID NO: 162840 - protein, 306 aa, Oryza sativa
  unsure (1)..(306): unsure at all Xaa locations
  Clone ID: PAT_MRT4530_61893C.1.pep
MATGLAAAAARRRLLHLPRHRWAHLSSSAAPAGGLDGGDGSGGGGRVKIFDRDLKRRHRDRAAWAMGETDALADAVADNLLDRLEDCRKAFPSALCLGGSAGAVRRSLRGRGGIEKLIMMDMSADMVRKWREMDNATDDVLETQFVVGDEEYLPIKERELRIACTIAQMEREGGISPRMSPLAQVRDAGNLLTRAGFTLPGVDVDRYTVKYNSGLXALELVEHLRAMGETNALFQRNPILKKDTALATAAIYQSMFGLEDGTVPATFQVIYMTGWKEHPSQQKAKRRGSATVSFSDLQKQFGSNQN

SEQ ID NO: 162841 - protein, 473 aa, Oryza sativa
  Clone ID: PAT_MRT4530_61894C.1.pep
MKILYSLRRFYHVETLFNGTFVLAGRDQETTGFAWWAGNARLINLSGKLLGGHVAHAGLIAFWAGAMNLFEVAHFVPEKPMYEQGLILLPHLATLGWGVGPGGEVLDTFPYFVSGVLHLISSAVLGFGGIYHALLGPETLEESFPFFGYVWKDRNKMTTILGIHLILLGIGAFLLVLKALYFGGIYDTWAPGGGDVRKITNLTLSPGVIFGYLLKSPFGGEGWIVSVDDLEDIIGGHVWLGFICVFGGIWHILTKPFAWARRAFVWSGEAYLSYSLGALSVFGFIACCFVWFNNTAYPSEFYGPTGPEASQAQAFTFLVRDQRLGANVGSAQGPTGLGKYLMRSPTGEVIFGGETMRFWDLRAPWLEPLRGPNGLDLSRLKKDIQPWQERRSAEYMTHAPLGSLNSVGGVATEINAVNYVSPRSWLATSHFVLGFFFFVGHLWHAGRARAAAAGFEKGIDRDLEPVLYMTPLN

SEQ ID NO: 162842 - protein, 50 aa, Oryza sativa
  Clone ID: PAT_MRT4530_61895C.1.pep
VMHTLCRSAILAILCDVSICKCLMFNLLTSDPSGTKTCIIHIRWPFLRPA

SEQ ID NO: 162843 - protein, 82 aa, Oryza sativa
  Clone ID: PAT_MRT4530_61896C.1.pep
MALLEEREASRMLKYGATDDIYKGSRMEVQDCTCGCCMKPWVGHHQAPAGCIVIREAQEATHGGGQPLAAAPVDHVPQSRPH

SEQ ID NO: 162844 - protein, 69 aa, Oryza sativa
  Clone ID: PAT_MRT4530_61897C.1.pep
GDCLTLWRLAAGGPALDAALWWKWKCRDGDRDESYYARSLAVVLQRRDWENPGVTQLNRLAAHPPFASW

SEQ ID NO: 162845 - protein, 76 aa, Oryza sativa
  Clone ID: PAT_MRT4530_61898C.1.pep
PIPALSSFSEGGQRGVQFVKPPSVWGPAVSFSGGKRVFFFPGVYQKERISLVLVSAPVRENNQFSQKRNACRTFPP

SEQ ID NO: 162846 - protein, 114 aa, Oryza sativa
  Clone ID: PAT_MRT4530_61899C.1.pep
MEPPVELEAQSSGLSYIPQHDHLPAMQDIELLRASMRSGVGMVSGDGSGSESEAAARSGDHRWIHRLPLTHHARLHPVALLLGREGSVRVLAFLAETKAARTHELSSPDLSGSA

SEQ ID NO: 162847 - protein, 484 aa, Oryza sativa
  Clone ID: PAT_MRT4530_6189C.1.pep
MIKQILGRLPRKPGKAGDSRDAAGPNGNEPSNSYSVARSVEQGNKRSGNGDYVVPAGLTPNPMMNGTVVYHSNEPLPAFKDVPASEKQNLFVKKVNLCCAVYDFADPTKNLKEKETKRQTLMELVDYVTSANGKFSEVVMSEITKMVSINLFRSSSPTPRENKAIEGVDLEEEEPLMDPAWSHLQIVYEVFLRFVASQETDAKLAKRYIDHSFILRLLDLFDSEDPRERDYLKTILHRIYEKHNGVAELLEILGSIINGFALPLKEEHKLFLVRALIPLHKPKCVSMYHQQLSYCITQFVEKDCKLADTVIRGLLKYWPVTNSSKEVMFLGELEEVLEATQPAEFQRCMVPLFRQIACSMNSSHFQVAERALFLWNNDHIENLIKQNYKVILPIIFPALERNARGHWNQAVRSLTLNVRKIFSDHDSAFFGECTQKFNDDELKQEESNSKREALWKRLEEAAVPRSDNNNPVGTPNGKFSQAAG

SEQ ID NO: 162848 - protein, 203 aa, Oryza sativa
  Clone ID: PAT_MRT4530_618C.1.pep
MELNKAVAVAAAAMVAVVAMVAAPASGQAVAASCTASLITSFTPCFNFITSSSGGGGGNGTAAGGGAPTAECCQSVAAMINTSASCACLVLTGNVPLGIPINRTLAVTLPKACNSMSVPLQCKDTSAQIPAAGVPVAVSPAMPPLPPSPPESTAGAGSPTATATPPATSQTQTRPQVVPSSARRVATNAGFPAFLRRLAAMRF

SEQ ID NO: 162849 - protein, 465 aa, Oryza sativa
  Clone ID: PAT_MRT4530_61900C.1.pep
MAAPLAVATIVNAARVGPDELLRMARALRPVHVFLAAFVPAAAATLYLMLRPRPVYLVDYACFRTKPNCRVPFATFLEHAKLVTYVEGASIDERSVRFMTRLLERSGLGEETCLPPAHHFIPPYRNLEASRAEVEVVIFNAIDDLLAKTGISPAAIDILVVNCSLFAPIPSFTDMIINNYKMRSDIRNVHLSGMGCSAGLISVGLARNFLQVAPHGAHALVVSTETITPNYYVGKERAMLLPNCLFRMGGAAVLLSTSRAKARFRLSRVVRTLTGAQDSAYRCVFQEEDGEGHRGINLSKDLMTIAGDSLKANITAIGPLVLPASEQLLFALSFIARRVLNRRVKPYLPDFRMAFEHFCIHAGGRAVIDELQRSLGLSDEHVEASRMALHRFGNTSSSSVWYELAYIEAKGRMRPGDRVWMIGFGSGFKCNSAAWECISPARNADGPWADSICRYPVDIPEVLKH

SEQ ID NO: 162850 - protein, 181 aa, Oryza sativa
  unsure (1)..(181): unsure at all Xaa locations
  Clone ID: PAT_MRT4530_61901C.1.pep
AAACRFPNIGTARSAFNQSIWKAWPPPKCKFFSWLVTQNRLWTTDRLKKRGWQNQKICPLCYIINESSVHLLTHCRVTKRVWIEIQRWTXTDLQMSKWSDYDSVEQWWSLVVDSLNNSRIPLRILVILVSXEIWCKRNTKIFQNTASTPISIIAKIKEEARAWVKAGASKLQEFGIFRGFL

SEQ ID NO: 162851 - protein, 236 aa, Oryza sativa
  Clone ID: PAT_MRT4530_61902C.1.pep
GRAEYITCLGDMYSVAWMEDSETHNLQKETIEDQYELVKKRTSNANKLNEGSHVMEYGDKTFKDEKLFLYQGFNPANGNITNELIWPVPKATVNQRDADLLFMWKRYEQLNGVSEDKLRALREIEDTIAHRKHLDSSIDFIGKLVFGFENGPLALEAARSSGQPLVDNWDCLKKMVRIFESQCGSLTQYGMKYMRAFANICNNGVSEAKMMEASINACGRYNSARWSPMTEGGHSA

SEQ ID NO: 162852 - protein, 517 aa, Oryza sativa
  unsure (1)..(517): unsure at all Xaa locations
  Clone ID: PAT_MRT4530_61903C.1.pep
MAARCWVWGFVVALLAVAAAADGEEEEGKWEPLIRMPTEEGDDAEAAAPAPAPAAADYGGTRWAVLVAGSSGYGNYRHQADVCHAYQILQKGGVKEENIVVFMYDDIAHNILNPRPGTXSTILKVEMFMLVFQRTTLVTRSXTENFFAVLLGNKTAVTGGSGKVIDSKPEDHIFIYYSDHGGPGVLGMPNLPYLYAGDFIKVLQKKHASNSYSKMVIYVEACESGSIFEGLMPENLNIYVTTASNAVENSWGTYCPGEEPSPPPEYITCLGDMYSVAWMEDSETHNLKKETIEDQYELVKKRTSNANKLNEGSHVMEYGDKTFKDEKLFLYQGFNPANGNITNELIWPVPKATVNQRDADLLFMWKRDYGVEFARVVFFMLIWLTSPFEQLYGVSEDKVRVLREIEETIAHRKHLDSSIDFIGKLVFGFENGPLALEAARSSGQPLVDNWDCLKKMVRIFESQCGSLTQYGMKYMRAFANICNNGVSEAKMMEASIXACGRYNSARWSPMTEGGHSA

SEQ ID NO: 162853 - protein, 62 aa, Oryza sativa
  unsure (1)..(62): unsure at all Xaa locations
  Clone ID: PAT_MRT4530_61904C.1.pep
LHHYTLSVSDDRRELHIVSHHMTQNEKQKCSSKILSYEVIKTENQCXXKPMFIYAYAFQQCT

SEQ ID NO: 162854 - protein, 106 aa, Oryza sativa
  Clone ID: PAT_MRT4530_61905C.1.pep
FNSVPARIGAFNATRHGFLHSNETDQNEPKHHYWVQEEWIGCVHFVSGVNRYFVSVPARIGAFNVTRHGFLHSNETDQNEPKHHYWVQKSGLGAFISFLARISSSF

SEQ ID NO: 162855 - protein, 75 aa, Oryza sativa
  Clone ID: PAT_MRT4530_61906C.1.pep
QIDPCDHACKSVGAQIYMLHPHPTPMHNNTWYIRSFIHTPLDHTHHRSYKVGYIHTLHTLYVIRIVHTVHNLKNS

SEQ ID NO: 162856 - protein, 85 aa, Oryza sativa
  Clone ID: PAT_MRT4530_61907C.1.pep
KITSVHIFSCSAPEKDKYSRPQKISKNYFPVWVIFIPHPSSSVLFFLSLISIRKALFKKLYILHVIFYLKVTKQQLQPTVHFDFC

SEQ ID NO: 162857 - protein, 1391 aa, Oryza sativa
  Clone ID: PAT_MRT4530_61908C.1.pep
MKCHSVAALWSPSPPSHHITAAAATPAALFTGAADGTILHWPLLPPPSPSPRPSSLLCAHAAAITSLCPLPSSPPCLLASCAAGVLSLFSSSASASASLRCLRRRSLPPWAGSPSLVAPLPPSSSSAGSSSASVAILCHAPDDGGRHVSAVVVVDARTLVVLRTAFHGALSVAPPRAIAVAVDAGVEDASVSVVLADAQGRAQVVPVAEGAAVEGDSPRRLSASSASSVTSAEAVDGRVEAVSLSDDGKVVALVMKNSCLLKCISEGVVLGEVTLPSDLLCKEGEAGMKGWLVGGFFLRGGEWGAHGSENGNVVRSLVLWSINGGAIVYRVEVGTGSFGCKAVCEIPDIVSERGDGSLVQFCQSGNQLIRVESRPYKIAGSLLWKPFVSIWSMDHLELNIANNIEKPPLSKILGEGGLQGEEFRSDHSHSFCQSNNGVDINSLICSSNSNGLGRHGGTVSSSMVLSEDSYTPYAVVYGFHNGDIEVIRFLNLLPAAKFGSGGIYPHISERFFLGHTGAILCLAAHHMHAQPDSRTFNRVLISGSFDSTIRVWDLDAGTILSVMHHHVAPVKQIMLPPAWTHQPWDDCFLSVGEDGIVALVSLQTMRVERMFPGHPSYPSMVAWDGVKGYIACLCRNLHSCNDSGSVLYIWDLKTGARERIITGTSSQSTFEHFCRGISKNAVTGSILGGTTSASSLLVPIFKDTSLLQSHANKKGLSISSVSTNHHNANTNSVTVSVPAASDVMGKMSATDEAHELHGNSSGKVASGQCINNRRKHPIKCSCPYPGIASLRFDLTAIMSTQGMANNNSDRQLRDHFYRDNVNDSIQAETCDNTSGMHVIDSPSRESLEGRLLRFSLCFLHLWGVDHELDKLLVDEMQVCKPEGCHIATGVVGDRGSFTLMFPGKEATLEIWSESAKCLMDNQVNAILMDLQLLKNKVFDSQLPTSDQMDNIITAIQSASVSSYGQLKADNEDVGREDCDTSEISSWLESFENQEWLSWIGGTSQDAVASNIIVAAALVVWYPSIVKPKLAHLVVNQLIKLVMSMNDRYSSTAAELLAEGMESTWKVCLGTDMTHFLSDVLFQIECLSSAPSNNAVYKTAVAVTMREALVGTLLPSLAMADIVGFFGVIQSQIWATSSDSPVHVISLKTLIRVVRGSPKALAPYLDKAISYVLHTMDPSNLIMRKACIINSMMALREIARVFPMVALNESMTRLAVGDAIGEIHNATIRVYDIESVTKIRILDASGPPGLPSLLDGSSNTTATILITALSFSLEGEGLVAFSENGLMIRWWSLGNAWWERLSRSLTPIQCTKLIYVPPWEGFSPNSARLSIISSILGHDKHQNSETKTRELDEADNLKLLLHNLDLSYRLQWVSGKTIKLTRHGQELGTFQL

SEQ ID NO: 162858 - protein, 60 aa, Oryza sativa
  unsure (1)..(60): unsure at all Xaa locations
  Clone ID: PAT_MRT4530_61909C.1.pep
ITVKIDVLHAMLLLTEGXSTSGSLLDEPSAISKGFHHEVHSIHHTSHDSLHKPTRPPTRP

SEQ ID NO: 162859 - protein, 63 aa, Oryza sativa
  Clone ID: PAT_MRT4530_6190C.1.pep
LKKDMKKVKLMYLKKKEKNKRKKINYFQGLFFVEKKKISTGASFWARIYLKFVSYKCLIFNSN

SEQ ID NO: 162860 - protein, 125 aa, Oryza sativa
  unsure (1)..(125): unsure at all Xaa locations
  Clone ID: PAT_MRT4530_61910C.1.pep
PGDDKIDWSRGSKGKGSARRNVTSRLXPDRARLHLAAFIGHRLPSQTNTSLFCTLCPHSCAIRKNFLIGHPSRNCSKXARLTSEFFRDRLPEKKLQLVDMSILFILLSLRLGCHIVVPALVISLP

SEQ ID NO: 162861 - protein, 235 aa, Oryza sativa
  unsure (1)..(235): unsure at all Xaa locations
  Clone ID: PAT_MRT4530_61911C.1.pep
KGRKPGTAQXXPHPGKIARERXPPPPTSPRTPPKPPPPPPPPPPQPPPPXPSPXPPPPPPTPPPRPPPXPPGAPPPGPPPPRPPPPRPRPQAPGRRPPGPPPPRRPPTAPPKPPPRPRARGRPRAPPPPGQPPSGPRPPPRAPGPAKAAPDPPDRPPAAARPPXQAAPPPPPAPPPXPPAPPRVAPPLPRPXAKPPPFPPTGPPPSRSESDGLAXGLPPPPFVPFVRPPHARARG

SEQ ID NO: 162862 - protein, 158 aa, Oryza sativa
  Clone ID: PAT_MRT4530_61912C.1.pep
MAVIELPLAIVAAWAQIDCTVEQIEAELTPLADIGLAGKGVDIDNLNCPPGNFGSLAEYFAPSAQGQSESAVLMAFAESVVQSAALVAFAELAAQPVAELVVQPIGLGVFVESAAAGLGQQQIEVVEIWQQPDLALADSQLAHYAAAALSSTAEEKAC

SEQ ID NO: 162863 - protein, 377 aa, Oryza sativa
  Clone ID: PAT_MRT4530_61913C.1.pep
MEALWKQASRLKEQVSRQGVFKPFGAAYGNSENAFTDESEVNLHQRLEKLYLSTRAAKHFQRDIVRGVEGYIVTGSKQVDIGNKLSDDSQKYGTGNTCTSDNTLSKAAMYYGKARSLMEKERGNMLRAFGTQVAEPLRAMVMGAPLEDARHLAQRYDRMRQEAEAQAVEVSRRQNRVRESAPNGDVITKLEAAEYKLEELKSSMVGLGKEAVAAMAAVEAQQQRLTLQRLIAMLLISLALKVEAERAYHQRVLEILDHLEQEMVSERQKIEAPPTPSAENYMAQPPPSYDEVNGMFASSSVDDSVTSVDFFLGEALDSFKAESESELNLSAGDIVIVRKISTNGWAEGECKGKAGWFPHGYIERRERVLASKVPHIF

SEQ ID NO: 162864 - protein, 701 aa, Oryza sativa
  Clone ID: PAT_MRT4530_61914C.1.pep
MSGGGGGSGPLPYSMRDVDGRGAYNNAKFRHRSRLKVLLPPDPLPPLPFLSPRGDVEGVESGWLEGFMAPRSVGLAAAELVLGHVRGRLRLRMASQALFTNSSKYQCGKFTVGKFLSLLMVSGVIYLLVHKSSDGFVSGELHEKVGNTHTKKDFPKIRTFWRKPPRLPPRLPPNEIYRNNSLLLQSPQSEWTLRQKKVKEAFEHAWSGYRNYAMGYDELMPLTRRGIDGLGGLGATVVDSLDTAIIMGADDVVSEASKWIEDNLMKKLSEKGQVNLFETTIRVLGGLLSAYHLSGGDKARGDSGIPMTSKRANPERLLEVSKDLADRLLLAFTSSPTAIPLSDVVLRDRTAHAAPDGLSSTSEATTLQLEYSYLSTISGDPKYDLEAMKVLEHMRTLPTVEGLVPIYINPSSGQFSGENIRLGSRGDSYYEYLLKVWVQQERYRDTSLKYLFEMYTEAMKGVKHLLVRKTIPNGLVFVGELPYGRNSGFSPKMDHLVCFLPGTLALGATKGITKKKALENHLLTAEDIDNLQLAEDLAKTCVEMYFVTSTGLAPEIAYFHIEGNSEGGPDGGNKSSQYVNDIIIKPLDRHNLLRPETVESLFVLYRITEDPKYREWGWQIFQAFEKYTRVDSGGYTSLDDVTSLPPPRRDKMETFFLGETLKYLYLLFGESNILPLDKYVFNTEAHPLPIIQSAQQISHSV

SEQ ID NO: 162865 - protein, 75 aa, Oryza sativa
  Clone ID: PAT_MRT4530_61915C.1.pep
PSSTSAWLSASSPVICPSHQQRRTGQTKSRSIATTIHHRHSDSPMAAPPPPPRQNRPSPLLVAGSCLSRVGTNLC

SEQ ID NO: 162866 - protein, 92 aa, Oryza sativa
  Clone ID: PAT_MRT4530_61916C.1.pep
MDRAFLLIQADARPCSCTYYLHVLYVLIRRDGSMALRFQRRIYLALSVRTVPAHNRNCGSAPCCKTGPPTAVRSYPPIPPLRTLSCGINAAP

SEQ ID NO: 162867 - protein, 513 aa, Oryza sativa
  unsure (1)..(513): unsure at all Xaa locations
  Clone ID: PAT_MRT4530_61917C.1.pep
MDRAPPRGAPRDAVGQRWLAVFVFQAALSAAASALYLAASPRRRHARLGVPRGLLLALHPFLSLAATGLLALAFLVSASPHPRAPPVPRRALAASLLAAAGALCVGAAASLVPEDSGWAAVAGMEFRGAVLGAVFAAHYFGRRRWLLQFPVVQRPPFYGLKMGLLPSGKRALKVSLQAFFLSXILIFVLPQQFRIRGSIGSQIIAQIGIFIMSTAVAFCWEISHHFVQVVHTRRCSFAPPQSTAAAETNPTEYILETLELSDPRSLMQYLAYQDLCAVSECNLELDHVKEENLYFGSQSVLIQKLSLKPLEEFTSKIAEALEGFSSEKPELLSQQFKLAAAFNDSQICIQEDLLVKICTWCARTLSSLTARSRQEDRYGVAQLTGCNAAVMSTLLSALVAVEACLGKKTNPQPAHSLGPASIKWANFSTGRKGNVTAIASTQRGGLHTKAFSMADVIRTSIYQMVSAFEHDMRANAKASSLEKNWISEGRKPVFGSQAVLVQKLSLFIEYRAV

SEQ ID NO: 162868 - protein, 92 aa, Oryza sativa
  unsure (1)..(92): unsure at all Xaa locations
  Clone ID: PAT_MRT4530_61918C.1.pep
XLSPSRTXSPLGRRHSSPXPXRCRQXRPSPPSXAARLTLTATPPPPIYTLXAPXSAPTRPSXPSRTDLRCSSPRXPRSPPXEHSRSXRRSPL

SEQ ID NO: 162869 - protein, 108 aa, Oryza sativa
  Clone ID: PAT_MRT4530_61919C.1.pep
MEKQKPAGHDARLLLALRCSRASLLLSSLRHPRAAPPRRATTPRRSSSTAAGGSVLRDAGLLRAELAAARREATMHAANSGAEVLLVLSLVPVLLLLLGFLAAAAVAA

SEQ ID NO: 162870 - protein, 74 aa, Oryza sativa
  Clone ID: PAT_MRT4530_6191C.1.pep
MQRTQVAAALLHGRIHEQALANGKRISVAAAAAAARCEVVVIAAIANQGKLKWGQLKATHTKQENPVRQRVKRQ

SEQ ID NO: 162871 - protein, 79 aa, Oryza sativa
  unsure (1)..(79): unsure at all Xaa locations
  Clone ID: PAT_MRT4530_61920C.1.pep
RXSPLXTXSLSXTQSSKIXMGWRGFIFXIHLIASTLQFVIAIAHSFIRSVHPWGRHSXRXSPXPRAXCTCSRSMATPPP

SEQ ID NO: 162872 - protein, 91 aa, Oryza sativa
  Clone ID: PAT_MRT4530_61921C.1.pep
KQLRNVNLMLFPGTSLLTKRLDGITAAKSEEDKDAYNVSGLPNGKCLPSRKGNGHLELHDLDLLEAELNTEDATNASFRALKHECGPCNMV

SEQ ID NO: 162873 - protein, 52 aa, Oryza sativa
  Clone ID: PAT_MRT4530_61922C.1.pep
MHAFESMSVFDATTGSEEWSCGGISMRVTYTEKMIKSVVSTTEYGMKLVMTV

SEQ ID NO: 162874 - protein, 249 aa, Oryza sativa
  unsure (1)..(249): unsure at all Xaa locations
  Clone ID: PAT_MRT4530_61923C.1.pep
NLERQLQTPNTNTIICTQGSPSSPWPHLIQVHCSSVPLHPAQQTPSHSSLPGSLVSPPQWHTFIILPLVPFLMHPAXLSHPCLLHSTPVHCTTHLCRTACQHGAHSQGWHTHSWHHYAPPLAVTTWYGRNTLHHIGIYAHLQLCQPIHIAPPRHLQGRSHISLAHIPVIPSAHGAIPGPPSYIEPIFDTRPSIAPHEXIVTXVXKPQTSPSIGIGQXLSIGQSSPIPIPENWPNPPENVHCFSTRYPXI

SEQ ID NO: 162875 - protein, 59 aa, Oryza sativa
  Clone ID: PAT_MRT4530_61924C.1.pep
QSMCTGFSISGVWGALSVCLAREHARVWVCPPGRNFRETRGSPVPGVSPRSCVPPNRDG

SEQ ID NO: 162876 - protein, 62 aa, Oryza sativa
  unsure (1)..(62): unsure at all Xaa locations
  Clone ID: PAT_MRT4530_61925C.1.pep
MCRPSQTPHLTMSSARFGPRDSGVXAKRRGQAPLPTHGISKITLKVVVFHLRPEXAPTYPTP

SEQ ID NO: 162877 - protein, 503 aa, Oryza sativa
  Clone ID: PAT_MRT4530_61926C.1.pep
MTMDTILHLVYSSLPENPVSPTATLSAAFTSSSSAGGGGEDRISALPDDLLRHIVSRLPTKDAARTTALSSRWRGIWRSTPLVLIDGDLFPQGPHISAAAGASLRSIRDAVANAVTRVLASHPGPLRFVGVINFFLGRHVDALADWLRLLAAKGVEDLVLVNRPWPLDVRIPDTILRCASLRRLYLGVFRFPDTTGHPRGPDVFPHLQELGICHTIMDDGDLDHVLACCPALEKLALVAGYGTPSRVRVESRHSLRCVLLWWSMIDELAIVDAPCLERLILWGTYPCEEEPIKIEIGYAPQLTVLGYLDMGIHALHIGGMIIKAGVTDVSPMAKVPSVKILGINVNFEARKEMEILPSFLRCFPNVEALHIKYNVDESNGELNSKFWQEVGHIECVESSIKKVVFDQFRGGANELEFIKFILERAQMLDKMVFVVDPENSAFVDQAMSTMKSLASTDYTSASKKCSLMMVGYRKGPPAFSYMRASDLSLSDPFFVSKDIQVTV

SEQ ID NO: 162878 - protein, 70 aa, Oryza sativa
  Clone ID: PAT_MRT4530_61927C.1.pep
MSLFVEMTARSIFSFMKRLFKMDTITGMASVELWIGGCGRSRRGRGPAVCDGGPPAIGLGALDQGAVKAP

SEQ ID NO: 162879 - protein, 53 aa, Oryza sativa
  Clone ID: PAT_MRT4530_61928C.1.pep
MLLKMGHQNSTGFPSCLQRQCWPYALTASNNKSYSGPFNPLDWMTQQGKSLSK

SEQ ID NO: 162880 - protein, 42 aa, Oryza sativa
  Clone ID: PAT_MRT4530_61929C.1.pep
MAGLEQTDQQGVVVGELIKVFGLYLKILNVHALFNMCATPAF

SEQ ID NO: 162881 - protein, 510 aa, Oryza sativa
  Clone ID: PAT_MRT4530_6192C.1.pep
PIVKQILGRLPRKPGKAGDSRDAAGPNGNEPSNSYSVARSVEQGNKRSGNGDYVVPAGLTPNPMMNGTVVYHSNEPLPAFKDVPASEKQNLFVKKVNLCCAVYDFADPTKNLKEKETKRQTLMELVDYVTSANGKFSEVVMSEITKMVSINLFRSSSPTPRENKAIEGVDLEEEEPLMDPAWSHLQIVYEVFLRFVASQETDAKLAKRYIDHSFILRLLDLFDSEDPRERDYLKTILHRIYGKFMVHRPFIRKAINNIFYRFIFETEKHNGVAELLEILGSIINGFALPLKEEHKLFLVRALIPLHKPKCVSMYHQQLSYCITQFVEKDCKLADTVIRGLLKYWPVTNSSKEVMFLGELEEVLEATQPAEFQRCMVPLFRQIACSMNSSHFQVAERALFLWNNDHIENLIKQNYKVILPIIFPALERNARGHWNQAVRSLTLNVRKIFSDHDSAFFGECTQKFNDDELKQEESNSKREALWKRLEEAAVPRSDNNNPVGTPNGKFSQAAG

SEQ ID NO: 162882 - protein, 127 aa, Oryza sativa
  Clone ID: PAT_MRT4530_61930C.1.pep
DYAETELKLREHLQSFLETVKSFNMIYTKEIHPWTHMMEVPQLHGFGPAANRLLEAYNTLLKFLSNLRSLRDSYAAMAAGSLSASNEPSSVTKIISDCESALTFLNNSLSILSTSVAREQGETLNSQ

SEQ ID NO: 162883 - protein, 345 aa, Oryza sativa
  Clone ID: PAT_MRT4530_61931C.1.pep
MASKQMEEIQRKLAVLAYPRANAPAQSLLFAGVERYRLLEWLFFRLLGDRSPFTQQNWQGDSLDRDEENSRIQHLAEIANFLGITPSVDTEAIQGRGSYDERVELLCLIVDLVEASCYADNPEWSVDEQLAKDVLLVDSIAEKQAQIFSEECKLFPADVQIQSIYPLPDITELELKLSEYTKKMSNLQLMVQELASKYDYNPNEDYAETELKLREHLQSFLETVKSFNMIYTKEIHPWTHMMEVPQLHGFGPAANRLLEAYNTLLKLCAVFLLVSTVFCLFLSNLRSLRDSYAAMAAGSLSASNEPSSVTKIISDCESALTFLNNSLSILSTSVAREQGETLNSQ

SEQ ID NO: 162884 - protein, 79 aa, Oryza sativa
  Clone ID: PAT_MRT4530_61932C.1.pep
PGTARRSGLVDEDINTINTSTSPQVQLHGPITHSRARQLNNHDECPRGRVDAHHKFTVTIGDGVSVAKARCLWTVVVRP

SEQ ID NO: 162885 - protein, 34 aa, Oryza sativa
  unsure (1)..(34): unsure at all Xaa locations
  Clone ID: PAT_MRT4530_61933C.1.pep
DALDLXKSKLLLLYVQYIPWKINFNEYSSSIMIN

SEQ ID NO: 162886 - protein, 104 aa, Oryza sativa
  Clone ID: PAT_MRT4530_61934C.1.pep
FFHAPNPKETAKKKKSRGFFYWVGKSALNSKEPLGVSPLEIFIVRDTPLEENCIVKKKNMGLFFGKGLLFQDVFVLKSKESPTFFLWKIYKCITYLKKKKVNMK

SEQ ID NO: 162887 - protein, 60 aa, Oryza sativa
  Clone ID: PAT_MRT4530_61935C.1.pep
PPSSCILHSSRPPFFFFLGDSKTMGGNPSTPNPIFLFSQQQLTQHKDSKTQHNTTQKHLI

SEQ ID NO: 162888 - protein, 354 aa, Oryza sativa
  Clone ID: PAT_MRT4530_61936C.1.pep
MAVALAGARSPGAGAILSLRRLAPAAAAPVRLGGSGTPGTRRRRGIAMAAAASAPPAPADALPKGADSFFRTVISNMEKVYLSRNPTAKTILELVRSYDGDHICYDHFAFRTFGVDGYGIKSLAEFFTDFGYVPREELRFPAKKLRALWFSPPTNDGYTGTGVYGPLPRIFISELLVDELSPQSQDIIQKYIRTSGKGNKHATLASTSGELTWEKPIYSDFQVLSRESEYAAWTLVNGYALNHTTISTHRLISDIRSINKFNKFVEDNGFKLNSEGGILKVSPDGLLQQSSTVADSALFTFADGITESIPRSYIEFAERLVLPQFKDLPNDEVNEHHRRDGFEVGNADKIFEST

SEQ ID NO: 162889 - protein, 50 aa, Oryza sativa
  unsure (1)..(50): unsure at all Xaa locations
  Clone ID: PAT_MRT4530_61937C.1.pep
LGILCFSGSWLTCQAHVRQVAGHLVRPLRRRFFFXXRPPLTNLGGELKNR

SEQ ID NO: 162890 - protein, 189 aa, Oryza sativa
  unsure (1)..(189): unsure at all Xaa locations
  Clone ID: PAT_MRT4530_61938C.1.pep
KKKNPFPPPFLKKKFFFKKWGKGGILKGKNPKRKFEGKLPXWGKIXXGGKIXPKPPPGGGGGKKXIXIFFFFSXXKRGXXGXGGVFLGLXQTPPXFXPGPKXNQKXFXPXGKRGKGPQTPPXGGGGGGWLFPPXGFPGAQXXKXPPPPGPXGGLGVSPPFFGFXLSPPKVGGXRAPVXGFPGKKRWGKG

SEQ ID NO: 162891 - protein, 337 aa, Oryza sativa
  Clone ID: PAT_MRT4530_61939C.1.pep
MVVVLGLPVVHGHGGVAWHSFKQLLDAGRGSHVTGLAELKRYLARFGYMAKPGRDTTDAFDEHLEVAVRRYQTRFSLPVTGRLDNATLDQIMSPRCGVGDDDVERPVSVALSPGAQGGVVSRFTFFKGEPRWTRSDPPIVLSYAVSPTATVGYLPPAAVRAVFQRAFARWARTIPVGFVETDDYEAADIKVGFYAGNHGDGVPFDGPLGILGHAFSPKNGRLHLDASEHWAVDFDVDATASAIDLESVATHEIGHVLGLGHSASPRAVMYPSIKPREKKVRLTVDDVEGVQALYGSNPQFSLSSLSEQGTSSSSPRRLLAGSARLLCTVLVILVTQL

SEQ ID NO: 162892 - protein, 54 aa, Oryza sativa
  Clone ID: PAT_MRT4530_6193C.1.pep
LSYNTKQKKRIKLLTPQKRKKKKNNKTKKKKKLKKQKKKKKKKQIKKKKKHPCL

SEQ ID NO: 162893 - protein, 1700 aa, Oryza sativa
  Clone ID: PAT_MRT4530_61940C.1.pep
MASDADADELRLVLYLPMDMAKGHGARRPAHLLPPLAGAPPPPPPFRPPPLCAAASNAEARVSFRGWLGGPRHWDLWVAKLRPLHDRLWRHLGILDAIVASTYRFKRDAALVLHLASFWSPATSSFAFPWGEATVSLLDVALLGGLPANGGPVLAPLPSHWRADEAALNAVRLGFNRSACKKAHHSAWISHFLTGPAADPVVEHAAFLSLWLTRFVLPGHPESTMRQSLFPLAVRMARGDRVALAPAVLASIYRDLRELKAFLSSSSAAATGELLSPLSVYAPFYLLQLWAWERFPAIRPAKANPIKAGEPRAARWNDVSNKIDPAVLRKALNSGSSFVWQPYTISVQPCGWVRGCHVSGNDELTSLAHCLRACELVGMDCIEQYLPHRVAMQFGLDQDVPGDVQRANDDCRVAWETYHLEGKNVAFFIPQSEPGVTARYAEWWRQPLPHSHLDVGAASTVVESKVSKRKVKKTLVAIEAEEEKERKLKKARVLPSNNDKKRKLQELYDAKLSDCLAAARDEGAGSCDRGSLPLSDMESEKALLSHVETINDDIVLLVPRKQTAAPDVNLIKDNMNLATGDRGSLEATPPVGMEEKDEMPKAQQTCNVEHPTHQPYCQETKAAPSTEITKGESSGIVLANVNELDRGRTPDVPNWHEEAVPSEAMEKEESRYHLSDVVCNDESIKEVVTVDKPLDVSSEPEGGATAMPEEKMLNVSVDMSLDATDRPEEGTTIMLELENEANLSVDESCRVSNSPEEVSATVGGDKEEKVAIDEADEGNGTSEDVGTAALGSICSIEVAPGSKQEVDTGVINISHDAVTLPDEVLPVQQPNDGETTRRDFVTEEQRKACCIEEIGGENSQMVEKASKQKPHEAHQVNMVECGEDINPMKNDNEDEHDKIPQPLENAISDSNMTSVFSGVPEAENADTDKGLFLAKKDSEDMPKEVVGAEGSQQDQFTTSTHEVVDEHNEVAEVEPVLAEPNMHGQCDGEKPDEGKVLREKDTEENAKNALGVEQIERQDKALTESCIHEVEQVDGQSERLTRTGVEEKHAEITQEQENEFDNGVMETSKVSVNGAMPYSTASIQSEGEQKEASDKDMAEKQSNQDIESIDERDSLSDAAATVFEGADDHITLDTNEEATRKHTHDCGSICENKGTQMFQEGCKLDSGVKSDIDIMEIETQATEGIQNQETMELDKQEMEEEQNPGTTIENNKMKIPEEDASTFSCGEIQTDPHSTDVNEVEFTTGTQNDEHLDIKEELIMDRRLDCEIKYGNERPLEEANTFGGCDGGVDNIGVALDVNEENSIKEMQNQEIRSTEEASEFQAGETNLNNGAENVDEKRILEDASTLDIRDSTNAVVNGAESTEGTQILCAFNTEKELEVQEKQDQGTENENRNQNLVNTDSFECGVEPHGTLKTTHETLPTVQVVSTSGDTFSSKNEQNDVPWEDQNKSDAEVSESNQTAPKESERTIPPEHEDREEEKEENMENKIEISIGRENDEVSEQETSTEECIVAPSGMDDRDENNKGWAEESVQTYGRYASDPVNTSWQPSKFGKPGMEESRRTHSGRSIYLRDIKESQGRTRSETSNKLHINSAGYYSRHAVPEPVSVTREIKVPLYDSTRASGRDRGPELVVTGPPEETSRWRQEQYALQILEDVQNARVAEKTRMEMEIRILKAQVSSMQRQAMNLDRVGDVISRAKRH

SEQ ID NO: 162894 - protein, 93 aa, Oryza sativa
  unsure (1)..(93): unsure at all Xaa locations
  Clone ID: PAT_MRT4530_61941C.1.pep
MARTCLPWCSWQLAAASADNSGGGHGGGVGLAAWWWRATVQRFAEAEASVGGSGDCGRGCGXRWRCRRMRVASDNNWRRGRSRVRDEDGGGEV

SEQ ID NO: 162895 - protein, 63 aa, Oryza sativa
  Clone ID: PAT_MRT4530_61942C.1.pep
KGAKKGLNFPSLKWCLKKIPQNETYPFSATVTVFLSAMTSGSFFFFNSFKLAPPSVEMWVIKF

SEQ ID NO: 162896 - protein, 109 aa, Oryza sativa
  unsure (1)..(109): unsure at all Xaa locations
  Clone ID: PAT_MRT4530_61943C.1.pep
MALRSAAGRLASXXXXXLLSPPTXIHTAFLEAHATSFGYKQVAEEDKSKLVGNVFSSVASSYDLMNDLMSVGLHMLWKDRLISXLIPFPGXXPLXVAGXTGDGAFRALG

SEQ ID NO: 162897 - protein, 323 aa, Oryza sativa
  Clone ID: PAT_MRT4530_61944C.1.pep
MALRSAAGRLASSSRRRLLSPPTSIHTAFLHSHATSFGTLLLLNPTLPPNSSSSSCPNSFLLVGSSGYKQVAEEDKSKLVGNVFSSVASSYDLMNDLMSVGLHRLWKDRLISKLNPFPGMKHLDVAGGTGDVAFRALERINSVSHRAMQGTLTDIEEETQIYVCDINPNMLNVGKKRASERGYKEGHCLSWIQGDAEALSFEDGSMDGYTIAFGIRNVTHIEKALSEAYRVLKRGGRFLCLELSHVDVPLFKEIYDVYSFSVIPAVGELVAGDRQSYQYLVESIRRFPNQEKFAQMIQEAGFERVEYENLVGGVVAIHSGLKL

SEQ ID NO: 162898 - protein, 329 aa, Oryza sativa
  Clone ID: PAT_MRT4530_61945C.1.pep
MEVMVPVMAPSAPCSPRTAAEHHHLPSYCYFFSSAPTSPTRASYSGEAAAAAVGVGEGDGAFDFAFGFSGQLRESTPILAAADELFEGGRIRPLNTPHPSILQLVDDSAYASPRSPGRRRRIAAAEAAEVSSSSSSQRGRSGRAAPASSSSSASSRSRRATRSLSPFRGGGGGGADDEYPSSPPSPRTSMMRGCGSGSRKWRLKDLFLFRSASEGRATGAGSKDPLLKYTMLSSSASSAAAALHHNPQKLRGGGDGSASMRKGRGSTASASDMPYTVGRAAAEDMRRRTTTPLPFHRNSLFGYLRSNPAIHSISRKLSGSGSNRGKTAA

SEQ ID NO: 162899 - protein, 207 aa, Oryza sativa
  Clone ID: PAT_MRT4530_61946C.1.pep
MSKKRGLSLEEKREQMLQIFYDSQDFYLLKELEKLGPKKGVISQSVKDVVQSLVDDDLVLKDKIGTSVYFWSLPSCAGNQLRTTYSKLESDLSSSKKRFIELVEQRENLKRGREDSDEREAALEELKAVEQHHKKLKEELAAYADSDPAALEAMNDAIEVAHAAANRWTDNIFTLQQWCSTTFPQAKEQLEHMYREVGITEDFEYLQ

SEQ ID NO: 162900 - protein, 120 aa, Oryza sativa
  Clone ID: PAT_MRT4530_61947C.1.pep
MGCDPFRARKGGPEWGGRKGPVPPPAVGAPPAPGAPPSAAPPPRGLSPSGSGAGHLPGFSPAARCLGPGRRPPPGSPPRAVPLALLPRPGRSGPVRFPPADRSRPPPAPRRSRAICSREL

SEQ ID NO: 162901 - protein, 235 aa, Oryza sativa
  Clone ID: PAT_MRT4530_61948C.1.pep
MSKKRGLSLEEKREQMLQIFYDSQDFYLLKELEKLGPKKGVISQSVKDVVQSLVDDDLVLKDKIGTSVYFWSLPSCAGNQLRTTYSKLESDLSSSKKRFIELVEQRENLKRGREDSDEREAALEELKAVEQHHKKLKVSTTQLFRIVFQEELAAYADSDPAALEAMNDAIEVAHAAANRWTACLSSEQANGILNVTTDNIFTLQQWCSTTFPQAKEQLEHMYREVGITEDFEYLQ

SEQ ID NO: 162902 - protein, 185 aa, Oryza sativa
  Clone ID: PAT_MRT4530_61949C.1.pep
MATLVCLACSHGYVPRFSSATLQKETRPVFPLQSSVPNIFYGTDTSRQQLQFLTKTPSPSSLPSSLPGLLGKSPVRPALCNDALLSRFLSTGKDENTVTEIGEKARSTAEQFLKVAKEKTDEVSEKTKETMHETKEAVVGESDDEKEKFKQRVEEGSLQEFNWPSSNQKGIGKKRKGSDGDDLWL

SEQ ID NO: 162903 - protein, 643 aa, Oryza sativa
  Clone ID: PAT_MRT4530_6194C.1.pep
MRLPGGPTGNIPAVRPAASGGQTGGILAVRPAATTGAAGDIGGQTGRSMSDSHADHLHAQFPRLLVFHTPPRLPVEGAPSSVPPAYVPPPPPPPTKMFPEAGDAAAAKAAARRCGKKKDGLNFFQRAAAVALDAFEEGFITNVLERPHALPRTADPAVQIAGNFAPVGEQPPVRSLPVSGRIPPFINGVYARNGANPHFEPTAGHHLFDGDGMVHAVRIRNGAAESYACRFTETARLGQERALGRAVFPKAIGELHGHSGIARLALFYARGLCGLVDPSHGTGVANAGLVYFNGRLLAMSEDDLPYQVRVTADGDLETVGRYDFDGQLGCAMIAHPKLDPVSGELFALSYDVIKKPYLKYFYFDADGTKSPDVEIELEQPTMIHDFAITENFVVVPDHQVVFKLGEMFRGGSPVVLDREKTSRFGVLPKHATSSLEMVWVDVPDCFCFHLWNAWEEAESGEVVVVGSCMTPADSIFNESDEHLESVLTEIRLNTRTGESTRRAVLPPAAQVNLEVGMVNRAMLGRKTRYAYLAVAEPWPKVSGFAKVDLATGELTKFEYGEGRFGGEPCFVPMGGAGAAASPARGEDDGYILSFVRDEAAGTSELLVVNAADMRLEATVQLPSRVPYGFHGTFINAGELATQA

SEQ ID NO: 162904 - protein, 51 aa, Oryza sativa
  Clone ID: PAT_MRT4530_61950C.1.pep
KQLSVHPAAKLGYSRAGAAKPGGPAQFELACRCRSCVVVANIQMTNFEVRR

SEQ ID NO: 162905 - protein, 83 aa, Oryza sativa
  Clone ID: PAT_MRT4530_61951C.1.pep
EVICVTVRISSPPPVFISCPHYVHMCHDRSLVRHVLEVQRRLTLVARAASFFFFMIVLVILFFSFFFFIQKNIEVHHLFTTYI

SEQ ID NO: 162906 - protein, 120 aa, Oryza sativa
  unsure (1)..(120): unsure at all Xaa locations
  Clone ID: PAT_MRT4530_61952C.1.pep
FIPQXRLGARHXTSXSLHTRLAPXXTPXRSGXCLHLHTLSVANGGKEARARLASGLREEGEVGPAWQWLRRSSSSSTRCSTPVPGSDVPRRRGSARRPATGEAAATSGGALARHRQRRRR

SEQ ID NO: 162907 - protein, 319 aa, Oryza sativa
  Clone ID: PAT_MRT4530_61953C.1.pep
MVAPTTTTPPPPPPPPSESTPTSDPKPPPPPPTSSTAAPKKRKLEEVGFHHSPYYNIRAAVANLRGRFIQVSPTSNPKIFVEWHFSALPWQQQQQQHNQLNRSCSRVLAQRLCKGTDTQKKDAALEILKEIKVLMELSKEMRLDLPTAAGPVKLMDEPTSRDARNMPAGKIPPGEKNQVRPADQAASFMHSSGEKVPLNPVDIKHDAKPSVTDSTKKSGQCLQGSYIVGGSPIGWNFLMWPGSSTSKLYEPSALAMFFCSEMEKSSNEVSDFILSLIFVNLAQTLAVDGVRSALQCVLLKTPMYGPSRRLSVAGKQKSP

SEQ ID NO: 162908 - protein, 56 aa, Oryza sativa
  Clone ID: PAT_MRT4530_61954C.1.pep
STGDDPSCADWLCGFGQGIAGKSLTEPFGWLTAATPFGVVPLPGGVVLAYPSPFLT

SEQ ID NO: 162909 - protein, 41 aa, Oryza sativa
  Clone ID: PAT_MRT4530_61955C.1.pep
LWPLTWHSNGGFFLKCEFVRGEFPPLGGCGTKLLKYKGSKV

SEQ ID NO: 162910 - protein, 256 aa, Oryza sativa
  unsure (1)..(256): unsure at all Xaa locations
  Clone ID: PAT_MRT4530_61956C.1.pep
RRGGPAGLSSCSRGSRTRGSSALSPPPPLRRRRRGRGRRXADGEAVGPGDERRAVADVRHRRPRWRRRRPRAPVPRAVGVGEDLPDVAVRRXGAPGGARRRWTRRGRRRRCRGGSAAARSRRTAASPPHPSPSAPAAAPWPAPRLATTTTPPPPPLSPPSPQAAAETPPRTPPPPSPPSPHRRTPAANTARRAVVTVYGALDGSGGTACSRRPPPRRRRWRPRRRPPPPAAAPPCRRRTGSACRRISTSSRRSTTR

SEQ ID NO: 162911 - protein, 310 aa, Oryza sativa
  Clone ID: PAT_MRT4530_61957C.1.pep
MNTFTLFRDEVQKASEKVHRHHANDDEAGLFLSLGLSLGSSPDACQCHASKKDEADAGNGGGDGYLALALRCAPAAGEPMVHPKRQRATTNSSSSSSICGEYGGGAAAAAVPAGHDDDDRSCMITAASTANRPGRVVLRTRCSAPTVKDGCQWRKYGQKTAKGNPWPRGYYRCTGAPGCPVKKQVQRCNHDTSVLVTTYDGVHNHPITPYAAALPPSSSSSSSAAVAMLASSSSSSTWSELQRAMPAAQSSWSQRNYPIQADVVAKAIWDPKFQATVAAAVASYVRDREQSARVAGGKGAGELFNLAPPC

SEQ ID NO: 162912 - protein, 73 aa, Oryza sativa
  Clone ID: PAT_MRT4530_61958C.1.pep
DAYSDTHSRISLEVAHRLTMHIAYRDTRSGTAILMLLTIRRKLLTVYTIFSTYIMNHYCYERHTTEWDYDDPT

SEQ ID NO: 162913 - protein, 106 aa, Oryza sativa
  Clone ID: PAT_MRT4530_61959C.1.pep
TPNPFFFKNYLKKPPKGGNVPGAPKYPRVKPIFKWPLKTKKTLTLTQFPLKVKSPKLLNFNFFPFALKNLNSLKEKFFPHNPKFFQRNPWFTPKFPTRSLKASKFS

SEQ ID NO: 162914 - protein, 85 aa, Oryza sativa
  unsure (1)..(85): unsure at all Xaa locations
  Clone ID: PAT_MRT4530_6195C.1.pep
XNVDDGIHGRDLTKIGWDLKAERRCGAQLGLCPDCRLKSMTKSSRRRSNRLPATGQTAEASPVRPPGYLRSDRRYPTSQTAHTRT

SEQ ID NO: 162915 - protein, 402 aa, Oryza sativa
  Clone ID: PAT_MRT4530_61960C.1.pep
MDLESCSYVLPLLTCCLFLLYSITCYALAAAAGGGGSCGGSDDHAAPRSYPLVGCLLDFYRNRRRLLAWYTGLLAASPSQTIVVDRLGARRTVVTANPVNVEHVLRANFGNYPKGKAFTDVLGDLLGGGIFNADGERWFAQRKLVSHEFSARVMREAVGVALEREARARLLPALDAAAEGGGGVVVVDVQELLRQFAFNVICRVALGGGGGEVALALPLSRLAAAFDAAAAISARRGAAPVAAAWKVKRALGVGSERRLREEVKVIRDAIMEFVRDSSSRRRREQLLAAARGRDDLVSRMAAAGYPDEAICDMVVSFIMAGRDTTSSALTWFFWLMTRHRDVEREVLDEVDACMGDGGDGGGLAGVDLEGSRRARVLHAALCETMRLYPPVAWDSKHAAEDD

SEQ ID NO: 162916 - protein, 106 aa, Oryza sativa
  Clone ID: PAT_MRT4530_61961C.1.pep
MLPPNPTATYYNKDGQLTEPEPIDYTPAGGLGTNGTEPRYMVESDFDYESITLGLYQEWIELDLFNNGLAIFSEEDFLAAGLTAADRSLIQFMAQQEQSHATLLSN

SEQ ID NO: 162917 - protein, 60 aa, Oryza sativa
  Clone ID: PAT_MRT4530_61962C.1.pep
MAEADSRDGRRGWIPAPAERLTDDLLVEILSRVPYKSLCRSKCVSTRWRRVISQPDQRRR

SEQ ID NO: 162918 - protein, 127 aa, Oryza sativa
  unsure (1)..(127): unsure at all Xaa locations
  Clone ID: PAT_MRT4530_61963C.1.pep
MDSCYNNNNNSRXRDANDEADQDNRLRPEDLLDMLVDDTDAGCGVNDQTTLRRSPPCEIGDGDVAGDVAPTTHPELDFLLEASDYELGLPSDSASSXDDDAGAVEPEDAIAFVVHYXGLEDQMGGCG

SEQ ID NO: 162919 - protein, 278 aa, Oryza sativa
  Clone ID: PAT_MRT4530_61964C.1.pep
MGQGKIEMKRIEDATRRQVTFSKRRAGFLKKANELAVLCDAQVGVVVFSDKGKLFDFCSPPVILMELFHRYEITTRNTRLQETNRDDEQMVMEITRLRNEIDQLEASLRRQTGEDLSSVSTVDELSQLQLQLESSLSKVHARKDELMSQQLEDMRRMVHYSLIVVAVVVFADECCRPCMSRTISCAAWGELQLWSSLPVGEQQMSENWHSENWQSPGSGEASAMEALTMLPPAAAATTAAEAFNCFFPEEEKGVAASSTLLQLWPQPHDGDQPDLRLW

SEQ ID NO: 162920 - protein, 680 aa, Oryza sativa
  Clone ID: PAT_MRT4530_61965C.1.pep
MEAIQKHNVAIQTSVGSIEEIKPMVAELVGWKPTVEKTVAELRDEMGELRSQVQQLAKNPMLLVKPADLPPLLPTPQGPKLKEAKEEERTPASSTGDGIRKPFGNHETTLNRGKAAWGESPSLSLPDKGAFNASPHSNSVFDSGGSSRGFGVFGHGYASHVDCPGFEGESPKAWKLKCETYFGLSDEPVSDEPAAESLQTEPEEIGEQEGALLTISREAVLGTESPKSVRLQSLIQHHEVLMLVDSSSTHNFISVQLADRLAGCRRSVKPLTEFASVFDEPTGLPPSRVFDHSIPLLSGAQLVNLRPYRYNPAQKDEIERQVVDMLCQGVLVFIDDILVYSRNLEDHVKLLRAVLEMLTKHQLKENHPLAFLSKSLGPRNRRLSTYEKECLAILLAVDHWRSYLQGSEFIICTDQRSLIHLGVQKLTTPWQQKALTKLMGSRYRLVYKKGTNNRATDALSRRAADNSAELCSVSVCVPMWLEEVQAGYASDAHASHLITQLTLKKDVVPHFSFDAGILRYKGRVWIGNNFALQSRILQSLHASAPGGHSGVQVTYSRIKNLFAWTGLRRIVKEFVDECAVCKQAKAEWVRYPGLLQPLPVPEHAWQMVSLDFIEGLPHSSGFDCIMVVVDKFSKYAHFVALAHPFSAFDVAQAYLTNIYKLHGFPQSLISDRDRIFTSTL

SEQ ID NO: 162921 - protein, 81 aa, Oryza sativa
  Clone ID: PAT_MRT4530_61966C.1.pep
EFLNIKAYCPAQVLRPALDMVAPTASSWAMYMRQNIRIDSATGRTHSLLVPLPGKQISRRPGWKISISLAGVKFHTSSSWP

SEQ ID NO: 162922 - protein, 157 aa, Oryza sativa
  unsure (1)..(157): unsure at all Xaa locations
  Clone ID: PAT_MRT4530_61967C.1.pep
VEAEGAIAAAMADXRLTVTAASATSGDRRRSLPYSLTPPSCLLXRRILLKLIYLRVFTVFQIAKHNLELSKKKXNRPALTSARAAIMDLCDDTHFPWEGSHTIMVETTVDVMIRKGTNMRLESYEFLSDFSMQRCGLLTHRVRTREFIAPSDGITAG

SEQ ID NO: 162923 - protein, 292 aa, Oryza sativa
  unsure (1)..(292): unsure at all Xaa locations
  Clone ID: PAT_MRT4530_61968C.1.pep
TGGGVPAPLWSPATAIGTVERRPREGXEGGKEAAVHGSPRVDGNGKGGGRSGGRRWRGSGGRERRRSGGRRGRRDGGRGRRRCGKAGGDDAEAGDGPGEWRGPAGGRRRRRRERMTARARFRRGERAASGGNGRGRCGEGLNRVASERGRPAGKETGARDPAAINGAGEIRGGVSIRIRERARGKWRERERGSRGIFPPTXLHTGTIGGGGIRSGXGARXRAGRQERREEGDDGWAPPISEGGWRARPSAARARGEAEWAAGRXREGEGDGPNSAQRXGKEVFRVFLFIKLF

SEQ ID NO: 162924 - protein, 643 aa, Oryza sativa
  Clone ID: PAT_MRT4530_61969C.1.pep
MEHFLFFGISGRAIGLKSQDGQQKKRTVVQAPWAIYIGPKWKGGVNLEVLDISSIVEGEFYVKFHVWNKSDGFQWILVAVYAAAQEEFKEAFLVGLVNACSKMSLPILIGRDFNIIRKPNEKNNDRYNDKWPFLFNAVIDNLNLREIELSGHKFTWANGLPVPTYEKLDRILMSKNWEQKYPLVTARALNRELSDHTPLLLDSGTKAQNKQPLFKFELGWMLRDGFYDLVAEVWKKEDRGLTSIVRWQNKIRRVRQFLRGWAKNESGKYKKEKARLLERVEELDKKAEVQVLSSQELDIKNYVKNRLATLLREEEIKWYQRAKTKRIVEGDRNTKYYHMIANGKHRKTKIFQLEQEEGIIKGDEQLKQYIANYYRKLFGPSEENNFSLTRMIQQYRPICLLNVSFKVFTKVMANRVALVAQKVVRPSQSAFLPGRNIMEGIVILHETLHEMHRKRMSGAVLKLDFEKAYDKVDWKFLQQALRMKGFAPQWCSWIDLIVRGGSVAVKRSNEQGNFHGVIPHLIDNGLSILQYADDTILFMEHNLEEAKNLKLVLSAFERLSGLKINFHKRLMVSKNAFVSCGSLKVHNGTQVTFWEDRWCGNNSLANDSPRLYNLVRNKNASVATVLGKIPLNVSFRRAIWGIT

SEQ ID NO: 162925 - protein, 81 aa, Oryza sativa
  unsure (1)..(81): unsure at all Xaa locations
  Clone ID: PAT_MRT4530_6196C.1.pep
PVGEGFKKIPVGALSNFRGMDKKTGDQFPKGSRVGKSKEFLVKKVXDQGAKFFPFEAPKGGWNFRGPPFRPFGFGEPVYSP

SEQ ID NO: 162926 - protein, 106 aa, Oryza sativa
  Clone ID: PAT_MRT4530_61970C.1.pep
SDLIALYNHNLFAAYCNLFRCQLAGLIYTCSDVLVLAASVAGDALDEAEEHVLELRRVAGHGSCHKLNYSYYCYLSSNAHCTALHSKSYYCNCNQVSSSPSLRCFE

SEQ ID NO: 162927 - protein, 41 aa, Oryza sativa
  Clone ID: PAT_MRT4530_61971C.1.pep
TKAQASHNNPLIKSKGGATAPASPGSLPGSPMKTPLNCNYF

SEQ ID NO: 162928 - protein, 40 aa, Oryza sativa
  Clone ID: PAT_MRT4530_61972C.1.pep
MARGQRAVQAVAGEGDAEAQSTATACVTHYVTDAICDGPC

SEQ ID NO: 162929 - protein, 108 aa, Oryza sativa
  unsure (1)..(108): unsure at all Xaa locations
  Clone ID: PAT_MRT4530_61973C.1.pep
GGDTGGGPRWTESTDRARDGAPRGADVAPTRRPRGSHVGGRTDGPGXVDRTVGAARGRRARARLKPARRPWRAVAWHXAAATRGGNRRRLAGGGGRRRHGARAASGAG

SEQ ID NO: 162930 - protein, 526 aa, Oryza sativa
  Clone ID: PAT_MRT4530_61974C.1.pep
MEQVAYWFICACAFLALVLLVRLGAARRDVVRLPPGPWRLPVVGNLHQLMLRGPLVHRTMADLARGLDDAPLMRLQLGGVPVVVASSADAAREVTRTHDLDFASRPWPPTVRRLRPHREGVVFAPYGAMWRQLRKVCVVEMLSARRVRSFRRVREEEAARLVASIASSSSSSPTGHDGGAAPAVNVSAPIAAAVADATMRAVIGDRFERREEFLESITEAVRSFTGFSLDDLFPSSRLAAAVGGMTRRAEASIRKGHQLMDSAFRQHQQLRDAMAAQPHLDDCAMEEDLLDTLLRIQKEDNLDVPLTTGNIKAVLLDIFGAGSDTSSHMVQWVLSELMRNPEAMHKAQIELRSTLQGKQMVSEDDLASLTYLKLVIKETLRLHPVVPLLLPRECRQTCKVMGYDVPQGTTVFVNVWAINRDPTHWDEPEVFKPERFHSGKIDFKGANFEYIPFGAGRRICPGMTFGHATVELMLAMLLYHFDWELPKGVAPNELDMTEEMGITVGRKNALYLHPIVRVPLEQATMS

SEQ ID NO: 162931 - protein, 105 aa, Oryza sativa
  Clone ID: PAT_MRT4530_61975C.1.pep
LLSDNKSSIITTLISISYLGYPTYLQHNALTMHTNNKRAMVSLARINFISKTTLQPSSNSYLNLLYKPSLIITKIKNSLSQSSHIKHQRAVTSNITTEKLTMESD

SEQ ID NO: 162932 - protein, 455 aa, Oryza sativa
  Clone ID: PAT_MRT4530_61976C.1.pep
MEQVAYWFICACAFLALVLLVRLGAARRDVVRLPPGPWRLPVVGNLHQLMLRGPLVHRTMADLARGLDDAPLMRLQLGGVPVVVASSADAAREVTRTHDLDFASRPWPPTVRRLRPHREGVVFAPYGAMWGQLRKVCVVEMLSARRVRSFRRVREEEAANLAAAVAASLSSPPARRDAVNVSALVAAAVADATMRVVIGDRLERREEFLESMTEAVRSFTGFSLDDLFPSSRIAAAVGGMTRRAEASIRKGNELIESAFRQHEQVRDAMAAQPHRDDCAMEEDLLDTLLRIQKEGALDMPLTMDNIKAVIQETLRLHPVVPLLLPRECLHACKVMGYDVPKGTTVFVNIWAINRDPKHWDDPEVFKPERFDDGKIDFKGANFEYIPFGAGRRSCPGVTFGHATVELMLATLLYHFKWELLEGVAPNELDMTEEIGINVGRKNPLWLCPIVRVPLQ

SEQ ID NO: 162933 - protein, 89 aa, Oryza sativa
  Clone ID: PAT_MRT4530_61977C.1.pep
APAPRTSHHERQRRRSPSFRRRRRRRRRRPQGHRRRRSRVLREAGSRGCWANCPQIPPARPPAATSSPPRRGHRAPPRPRRRTPLRPLR

SEQ ID NO: 162934 - protein, 55 aa, Oryza sativa
  Clone ID: PAT_MRT4530_61978C.1.pep
PRLRGPHIISWQGRLSGSSPSAHRRGAPSPRWGRSTGFPSPRRGRPLQFSFPPYL

SEQ ID NO: 162935 - protein, 97 aa, Oryza sativa
  Clone ID: PAT_MRT4530_61979C.1.pep
NSASAFQCRARQPTLTARLVDAFDTDIVPLAKYTLELCVSTPPPVAAAAMKECVLDEYATKHRISIDRFLQLRIFVKLLSDSKFDLNAICHPNNLPK

SEQ ID NO: 162936 - protein, 168 aa, Oryza sativa
  Clone ID: PAT_MRT4530_6197C.1.pep
MAGSGSGSSSGGRKMKSQLSFTAGPPHLSHIAEDGAFPDRAGAEASVPRTFSAGGSSGGGGFSIVGPWEESRDIISTLGGYESQFGGMASTSALEMAGMDRYLQLQHDQVPFKVRAKRGCATHPRSIAERQTSTADMLDLAVEHIKGLQSQLQALKHEQEKCTCCSRP

SEQ ID NO: 162937 - protein, 277 aa, Oryza sativa
  Clone ID: PAT_MRT4530_61980C.1.pep
MDSPSGIDDFVFSPGQVFRFGSLKFIMDDFGNIFLLDSDSNQSGRKNHSAPFGLPNAAEIYSKVSFFEMASNRSGESSTKTPSRGLLDRTPAYNHLATSTPSRSGKGQIRALREEEERKRKEEEDCRLRELAAAGQRVCQVIGQTRIDDTNVFLTPQQNAVMVVTLIVLDAAPVNVAPILNKVKTMVAASIPRSSGSSWQGNESTTQTPIGSRLPPLRPTNYREPESSRANSHQCHEHTWRQDQSADTPTGHHNQPLITTGIAGLIPTIRALQGTSS

SEQ ID NO: 162938 - protein, 76 aa, Oryza sativa
  unsure (1)..(76): unsure at all Xaa locations
  Clone ID: PAT_MRT4530_61981C.1.pep
KIIYRGRSCPLQALLHVXLGVETKGNLKHAFQSKETSKPDETXSDSDLPVRPATHRRSDRPSTGGLTAQHTAVRPA

SEQ ID NO: 162939 - protein, 103 aa, Oryza sativa
  unsure (1)..(103): unsure at all Xaa locations
  Clone ID: PAT_MRT4530_61982C.1.pep
SGWHCSFCFXRYISDFAFKMQAYSHVDRIRFKYFLYPERIQDVICRGADLFDMLPEEYTFQEIIAKLGPIPSTFSAVHLPSYLLQNVDRYRYLLPGYCRRESG

SEQ ID NO: 162940 - protein, 120 aa, Oryza sativa
  Clone ID: PAT_MRT4530_61983C.1.pep
MLFMKGVILLLLVCAVISPHPVIGKNPICTHANMIEIVRKCEKFIRVQRPVPTFLCTPNSPCCEAVRKVRDRDMHCVYFLIGLDKQRVKLYSERMILRLSDLCAPVPSRPPPPPHRQVLV

SEQ ID NO: 162941 - protein, 345 aa, Oryza sativa
  Clone ID: PAT_MRT4530_61984C.1.pep
MERRRRSPCAAVVMAAVAMLAVMPAFPGVAADLSAGYYSSSCPKLESIVRYEVSRKINETVVTIPAVLRLFFHDCLVTVFRYLQLEEKNQGCDASALISSPNDDAEKDAPDNMSLAGDGFDTVNRVKTAVEKACPGVVSCADILALAARDVVSLASGPWWSVELGRLDGLVSKASDVDGKLPGPDMRVTKLAAVFDKHGLSMRDMVALSGAHTVGFAHCTRFTGRLYNYSAGEQTDPSMNKDYAAQLMEACPRDVGKTIAVNMDPVSPIVFDNVYYSNLVNGLGLFTSDQVLYTDGASRRTVEEFAVNQTAFFDAFVSSMVRLGRLGVKAGKDGEVRRDCTAFNH

SEQ ID NO: 162942 - protein, 799 aa, Oryza sativa
  Clone ID: PAT_MRT4530_61985C.1.pep
MGFNPPVPQKDSEWEIRVAVLLSLLLQVILIFVGPMRKRTSHPVPCFAIWACYLLADWVADLALGLLLNNLGNIGSSSSHLSAGAGGGPPIFAFWTPFLLLHLGGPDTMTAYSVDDNELWRRHLIGLLFELFSALVVFSCSIRSNPMIPATALIFVVGVIKYGERTYSLYSGSVDGVIAKIFRAPDPGPNYAKLMTVFGGKRNGGLLVEITIANGEASKAKEVLQQGSEVRLVETTKSLEAIAYEFFTMFRVLYVDINLSYKERRISQAYFLDRRDMTADKAFEVMEIELNYLYDMVYTKAPVSHSSAGCVLRFICTTCLVVAIVLFVLLDKTGILPVDRGITYALLLGGLALDVAAILMLLCSNRMIVFLEAKHMAWLSRVARAVRLQPRRWSERTSQLNFICYCLGKPKEQEGRRRQCCRRKTIPPSVMRFLIWVANKVGVRETLDDFFFIQRKPVTMVSVIGRRGRWCNCKEGDERAPTTIDALAYVFVGLQREAIKFRDSEDYYLKKLRGYRGEGTLLDDEGLFRNIKMELTKATREELNLRLTEEESSSSTTKKKEAEEITHDVLQLADKKKKEIDDLVKEKLDGVLRNSIGREFDESLLLWHIATDLCCHREREGPRMLDTIGLMSISETLSEYMLYLLVRQPEMLSATAGIGLLRYRDTCAEARRFFKSAEAWDPNHDDARRMLLSVNTSKKPADVKGDRSKSVLFDACILAKVLRELDDDTMWRVVAGVWREMLTYAAGKCQGSTHVRQLSRGGELITMAWFLMAHMGIGDVYRIGELAGDSKAKLIIHDQ

SEQ ID NO: 162943 - protein, 65 aa, Oryza sativa
  Clone ID: PAT_MRT4530_61986C.1.pep
MVTHTPHVTREARRFSTVDEDASQNYRGPLMSRIVGRVRKGLEGATDVFGFTVLTTAIVEILCST

SEQ ID NO: 162944 - protein, 369 aa, Oryza sativa
  unsure (1)..(369): unsure at all Xaa locations
  Clone ID: PAT_MRT4530_61987C.1.pep
MDWAAAGYTAAALVCAAAATVIALVHIYRHLLHYAEPIYQRFIVRLIFMVPVYAVMSFLSLILPDNSIYFNSIREIYDAWVIYNFFSLCLAWVGGPGAVVVSLNGRTLKPSWFLMTCCFPAIPLDGRFIRRCKQGCLQFVILKPILVVITFILYAKGKYADGNFSVKXSYLYITIIYTVSYSMALYAGVLVFLAAKSRFIKNAEKAADLQNFVLCVEMLIAAIGHLFAFPYNEYAGPNGRPSGDFKGSLLHALKFNDFYHDTVHQFAPTYNEYVLYNHNEGDSTQRKYPSVSTVPSGRDVELSGISVMPANSAVTSSVSSNQADQEETMSTPIKDRVDNVGLYDLTDLLDVDLSNYPAKVPAISDVRKQ

SEQ ID NO: 162945 - protein, 342 aa, Oryza sativa
  Clone ID: PAT_MRT4530_61988C.1.pep
PRPDNSIYFNSIREIYDAWVIYNFFSLCLAWVGGPGAVVVSLNGRTLKPSWFLMTCCFPAIPLDGRFIRRCIQGCLQFVILKPILVVITFILYAKGKYADGNFSVKQSYLYITIIYTVSYSMALYALAVFYAACRDLLRPYNPVPKFIMIKSVVFLTYWQGVLVFLAAKSRFIKNAEKAADLQNFVLCVEMLIAAIGHLFAFPYNEYAGPNGRPSGDFKGSLLHALKFNDFYHDTVHQFAPTYNEYVLYNHNEGDSTQRKYPSVSTVPSGRDVELSGISVMPANSAVTSSVSSNQADQEETMSTPIKDRVDNVGLYDLTDLLDVDLSNYPAKVPAISDVRKQ

SEQ ID NO: 162946 - protein, 144 aa, Oryza sativa
  Clone ID: PAT_MRT4530_61989C.1.pep
MAKDDVEDNHVEETWLALQPIEIFGLWRLTVVLFKATSIIEAPGLAAAARGLSGLGSRRDDHGQHSEIKNGLLLTESRRMLDALKTLDDRCVGVVKEGEPLHRTNGSLHPPHPWYRTIETFTQLQFRSASTSLSGIDTEVVVTN

SEQ ID NO: 162947 - protein, 49 aa, Oryza sativa
  Clone ID: PAT_MRT4530_6198C.1.pep
RPRVRGRVGDPRQMIRPGLLTTGSGYTQEIGEILQRLLLQMVPYMTKMP

SEQ ID NO: 162948 - protein, 500 aa, Oryza sativa
  unsure (1)..(500): unsure at all Xaa locations
  Clone ID: PAT_MRT4530_61990C.1.pep
SVHAINLLNIALAEIIQKITDAKFDQQIDIEIISLLFNEKLNSQQNNLNFLVGKVNFCTLLPMRAIPFKVVCLLGMNESDFPRAQTVNSFDLMQYASKKGDRARRDDDRYLFLEALLSAQQFFYISYIGQSNINNKQHLPSVMVSQLLDYFAEYLGKFSEQHFFAEMVQQHPLTVFSLNNFSETNYAYDREWLTMTQTEKMQEFCPGEFNSNAELPTEIQLEQLIKFVVNPVQYFFNQHLGXFRDNNKQIEESEKFVLNALDRYKLRDKLVCLDDDLIQQMFEQEKLKGNLPXGEFAQLAQQKIVASVNIIKDELVGYLTESEILEVDQTFLINGIELRVVGNICHRFGDEIVFWKVSGLKDKDYIRYWLYYLFLRIQSQPLKLKIIYLDENKKKVFQFNEISQDDAKKQLRIYLTDYLSSFSCLKWAMFEGLDDYFKNLNKAENIEHYCQENLEKLIGKEFFNSRYLKRILNQSVMLDYGSIHSTTLQWFELMQTSKKS

SEQ ID NO: 162949 - protein, 119 aa, Oryza sativa
  unsure (1)..(119): unsure at all Xaa locations
  Clone ID: PAT_MRT4530_61991C.1.pep
MAAGGALTVLSARGGPNLGPLEEWEGLASRQLCTEAGNGKASPAPGAGRLVLTTNPGGCLCKGLKEKLQAAFLFADTPYSFASLELQKRDITTNPDGKQMSQXRIPVLAKVLPDGSKEK

SEQ ID NO: 162950 - protein, 72 aa, Oryza sativa
  Clone ID: PAT_MRT4530_61992C.1.pep
QYELMHASVFVLHLLGLWLPSVDTVYSGVYLVLSQELYQSLVVLRHLGVELASPVLFHQSLSTVLFFRASNQ

SEQ ID NO: 162951 - protein, 124 aa, Oryza sativa
  Clone ID: PAT_MRT4530_61993C.1.pep
MAVGDFVSIYAQLNIELAEQAAQWPVWPSSSDMTGEHRAEESREKTRRDSPERRPPWLHADTIDGDEPFSEQLDSHAGCEGQRRGSRSLACVAGGFLQKCRTCVFSLWIRIEGPTVAECMSAPR

SEQ ID NO: 162952 - protein, 464 aa, Oryza sativa
  unsure (1)..(464): unsure at all Xaa locations
  Clone ID: PAT_MRT4530_61994C.1.pep
MLQWCDSFEIGSQDLVSPQIETLLQSYTDLFQEPTQLPPKRSLDHSIXPEGTEPINLRPYRYSHPQKSEIENICEELLRNSIIQPSYSPFAAPALXVKKKDNSWRMCINYRELNAATIKNKYPIPINEDLLDEGRKYXENLFEGPRMKESDVHKTAFRTHRGHFEFKVMXGMTNAPATFLNLMNEIFKEKLRKGVLVFFDDILVYSDGMETHLKXLEEVFKLLKKNKPKLSKCSFGMGQIEYLGYIISEKGVATDPSKIEAMVQWPVPKNVKELRGFLGLTGYYRRFVQGYGGICRPLTELLKKGGFEWNAEAQKAFEQLKRAMVSAPVLELPDFSKPFTIEADASDLGIGAVLSQDKKTIAYLSXALGVISLGLSAYEKELNXMAILMAVSXKWRHYLQLKPFLIKTDHQSLKYLLEQRLTQPLQFKTLTKFIGLDFXIEYKKGTSNKVTDALSRRSSPWRRI

SEQ ID NO: 162953 - protein, 560 aa, Oryza sativa
  Clone ID: PAT_MRT4530_61995C.1.pep
MGFLPGDDDGPAVGIDLGTTYSCVAVWRRGRVEVIPNDQGNLTTPSCVAFTDTWRLIGDAALNQAAMNPLNTIFDAKRLIGRRFSDVSVQGDIKLWPFKVTSGKDDRPMIVVQYRGEEKEFSAEEISAMVLFKMKETAEAYLDKTVEKAVITVPVYFNDSQRQATMDAGAVAGLDVLRIINEPTAAAVAYGLDKVVGSSDKKKRVLIFDLGGGTLDVSVLNIDPGVDIDIGIFEVKATAGDTHLGGEDFNGRMVKHLVREFLRKYKRPEIRGDQRALRRLRTACEKAKRMLSSTAQTTIEIDSLHGGVDFHATVTRAKFEELNMDLFLECMDTVKQCLRDAGTDKGTVDDVVLVGGSTRIPKVRSLLQDLFDGKALCRSINPDEAVAHGAAVKAALLNGDANEKDLRDVVLLDVTPLSLGIEVFGGGMSVLIPRNTTIPVSRQKMYTTHYDNETAVLINVNEGEGRRTKDNNPLGKFVLTGIPPAPRGVPQINVTFSIDYNGIMNVSAEDKTTGRSNSITIKSDKGRLSKEEIERMVKKAEKYKAEDEEEMKKAEGYVAP

SEQ ID NO: 162954 - protein, 65 aa, Oryza sativa
  Clone ID: PAT_MRT4530_61996C.1.pep
MGGGRGSDGKKEREIGRRDGEDRREGGRLGRRGRGRATCALLINLAPKLALGSPAVRIDANLANH

SEQ ID NO: 162955 - protein, 74 aa, Oryza sativa
  Clone ID: PAT_MRT4530_61997C.1.pep
NIIISMECVLDSMKNLISQTPFLLHSVIRVGLIEYGTTHKDVHELVLDVVLIVHCIYSPVRRMCTPLLPRTRER

SEQ ID NO: 162956 - protein, 114 aa, Oryza sativa
  unsure (1)..(114): unsure at all Xaa locations
  Clone ID: PAT_MRT4530_61998C.1.pep
RRVRSWPPPPTTTRPLVAVPADNAASARGRPRHRRRXPLVTLTFTIASEPHPSDATVGCVGSPSLQAYASITTSRLMRKAMDRERXGGAGGRCGEEREKAEREMERQSDEGTAV

SEQ ID NO: 162957 - protein, 98 aa, Oryza sativa
  Clone ID: PAT_MRT4530_61999C.1.pep
MAQRPCMLFFGSGAAGRRHALLLLDRGAGNGVHALLLQLTAEWEDSKSLTKLESRRRHAVLLRRLGREPPVARVEIEALSKSTSTPTSTTLSSSFPVR

SEQ ID NO: 162958 - protein, 165 aa, Oryza sativa
  Clone ID: PAT_MRT4530_6199C.1.pep
AIHSRNDYNKLQTPCLIFGMSDTSGERRKTEIKEPITRSEAMFMIEIQPQISLICSLGSSRHDSFKQNSLRTQGRAHNSDRPMARTSQFKLLRTTVANGFKLSAVDTSLPLLPQINSSSSFHHERVKPQNGYTAKHESKQTIIRVTKPSKWGCACNLAVIERVRL

SEQ ID NO: 162959 - protein, 417 aa, Oryza sativa
  Clone ID: PAT_MRT4530_619C.1.pep
MEKGKLDFLLELGFRFNPSPEQVVTYYLPCLVAGQQPKDTEGCIHSADVYGADEPRDLAGKYAPVARSSNGDRFFFTGCKRMKGKFSRSAGGGTWVSQSSKDLKNREGIKIGEVKNFRFKKDGKNTDWLMEEYHLCGQESGDVVEPVVCRIYVSPRAAPDSVAHQESAVLQPQEPAPLPVPAAPAPPRQVPVVTQQAPPPPPPLVPVITQDAPPLKRPAPVAAPPCAKKMRGDVSAFPVVRQSCVAAPRCAPRVVAPPPRHPPIQTYPTDPFESAPLDPFEPPPAAASVTGGHHTPQPSVPVPATPEQGFSLAASNSPELDPANIGIDMDELMRYLGNTPLDGVLPSQLFVLPTNDDEDVELAKVLEDGLQGGGGRQWQSTAVCDSSSSATGILARHGATAASSTHPDLSQGSVRAQ

SEQ ID NO: 162960 - protein, 94 aa, Oryza sativa
  unsure (1)..(94): unsure at all Xaa locations
  Clone ID: PAT_MRT4530_61C.1.pep
SLSXSHTHTHTHTVHTDMQRKKSTLXQXFFLILHPGLXKIFYFPPLINTISLFISLHLSHILHXKFGRMLDVLQLTAPSQXNQFLHVYRXIASN

SEQ ID NO: 162961 - protein, 109 aa, Oryza sativa
  unsure (1)..(109): unsure at all Xaa locations
  Clone ID: PAT_MRT4530_62000C.1.pep
IDADLLILRTCHCMXAKPKSLSRDNATLTNYGVMVXIEPSNCTFHTLMDHIDAITCYYGGDLGYLNEISTWRHRMPKHMNLLKHFXHGDEERAQVNNTRLTSADPTNLY

SEQ ID NO: 162962 - protein, 1193 aa, Oryza sativa
  Clone ID: PAT_MRT4530_62001C.1.pep
MAGTLRDPSAGSGGEAAPTPPPPPVAAPFAQYLSLEPLGWVEPKHSRHGELRRALQHQADDKPQELRRIRSSVADSSSKAREKVRSMQEAVQKVDRCRNVLNRKRQRSEPAAAAAAGAEKPSGSGALRIGAQNSNSSAVMSKRVRSSLADGRLEGRSNISTRQSPLVNNEKSSLVEKEKSCGRTSGLSEDKLQGLSTGGEGWEKKLKRKRSIGTVLNRGNDADRDVKSGGQHRPANEANPRPSDGPSHRHGASAVEYAGSRMDGSSQQNSNSSRILCKTDMDHATLPNERRERYVGIEKERGMVKGNRAQASEDMQTGSISPLPKAKACRAPRTGSHGMGSASSFQRSTGGSDEWEEIPYSNKASLLGGMTNRKRSIHSNASSPPIAWVGQRPQKMSRTRRANVVSPVSNFDEVLSEGSPLDTAIAAKPTSTESCGVVLTKKGTSSNTQMANTMNDIPSPVGLSESEGSAVKERKVKEKATNNGEVENEAANLVRNSAGSIVSSNKNTIPLKEELQDGGVRRQGRSGRGTMHVKEYSSSSISKEKLDAAETRKPNKGGRPGSEKNESKVGRPTMKKGSDQNNLSCFPQALNCEHTDDREELLAAVNAARGAIVGAYCGPFWKKMEPMLTFISSENLSFLKKQIDIVEELDLGMSCVPDGEYVLAPTNYSRQQTTEFSCQELVPSNSSILPEQSETNGVGLKGTIDCFSPSEENQHHVPQKIEADKWFHEMVPMEHRLLSAIVMEEDISEPNVVQRDILFEFSNSHVPCAASRFLGNELQASAISSNFGLSVDFMNSNNSSVVHQSLSNGFTSSSSFISSSSQSSVHNDNLSDEVNFVYPENGPFDNLIPQTSSLRQKPGKNFSSSPHEYQYGQMSVNDKIFIELQSIGIFPEAVPKLDDGEDNNINKMISELRKRLHDQVKQKKCKLSKLEKAIQDTKSIEERSLEQHAMNKLVERAYRKLKGGRTGSSHKAGASKSASKAAKQLALDFAKRTLLRCQKFEETKKSCFSEPSLWSVLSAPLPSSGTKSTEGGTKWNKCDREREHSRDASAKGSGTKSGRHSSGSGRSGERKNKTKPKQKIVQLLSTSGNVLDRAVESVPTPAMQEPPRPSVPLGAKITQQPRNHPENAASRLPEAPLTNLPGLFDIFAGTEGLGEQGNDISSWLTDDLDVPQDFDLSGALEIPLDDIAELGFM

SEQ ID NO: 162963 - protein, 81 aa, Oryza sativa
  Clone ID: PAT_MRT4530_62002C.1.pep
MAPTSPAALASHTMMSLCGHHVKGTAGRRGVGWRRQVKEVDRYIHQEATTSDGGGGEGSAEAEGRGEIGHFPEWVCLRTVG

SEQ ID NO: 162964 - protein, 60 aa, Oryza sativa
  Clone ID: PAT_MRT4530_62003C.1.pep
NASMYPPEKKNRVCTVVQLLEYKAVIIVSYNCRFKHCCHSFCLRPDLFLTVYPYSDQSLM

SEQ ID NO: 162965 - protein, 633 aa, Oryza sativa
  Clone ID: PAT_MRT4530_62004C.1.pep
MEDASKYAHSPAHLAVVRRDHASLRRLVAGLPRLPRAGEVATEEESIAGEAVADAVSAAIDRRDVPRRETPLHLAVRLRDPVAADILMSAGADWSLQNADGWSALQEAVCTREDAIATIIARHYQPLAWAKWCRRLPRVLASINRIRDFYMEISFHFESSVIPFIGRIAPSDTYRIWKRGAALRADMTLAGFDGFRIQRSDQTFLFLGDGARPEDAGGKELHPGSLIVLAHKDKEITDALEGAGVQPTEAEVAHEVALMSKTNMYRPGIDVTQAELVPHLNWRRQERTEAVGHWKAKVYDMLNVLVTVKSRRVPGAMTDEELFAMEGEEKNGRGTELDAELDEVLTAEERKQLDSALRMGNQEEEFEERCEEGDGGADHLDANGVAKDKKGWFGWGGKKGTKNDEKPSKANQGSKDESGDLGKGKEKNSSKKKKGASSGDSTKHESEYKKGLRPVLWLTPDFPLKTDELIPLLDVLANKVKAVRRLRELLTTKLPPGTFPVKIAIPIVPTIRVIVTFTKFEELQPLDEFATPPSSPTQFQDAKGKESEGSGSWYSWVRGGRGAQSSDSGDSRNWKDEVDPFQIPSDYTWVDANEKKRRMKAKKAKNRRGSTRKQSSKSTSSEGGHPMMDGFEE

SEQ ID NO: 162966 - protein, 34 aa, Oryza sativa
  unsure (1)..(34): unsure at all Xaa locations
  Clone ID: PAT_MRT4530_62005C.1.pep
HAYVXKYNNLWVVTWKCDGGGCLFYDEIFIIXCF

SEQ ID NO: 162967 - protein, 58 aa, Oryza sativa
  Clone ID: PAT_MRT4530_62006C.1.pep
KVCALKDPAKPQVRIYEGPFDAFEKDYVEKPLPEEEQVRPPSNNVYATPEEKDSTAKA

SEQ ID NO: 162968 - protein, 69 aa, Oryza sativa
  unsure (1)..(69): unsure at all Xaa locations
  Clone ID: PAT_MRT4530_62007C.1.pep
TATKIWHSNKVEFSVLLLAEDSVLAATATMAEYHYQDQVIYTPXPLCQSXMPYPMYPMPTCQTFVKLQC

SEQ ID NO: 162969 - protein, 75 aa, Oryza sativa
  Clone ID: PAT_MRT4530_62008C.1.pep
TPFQKKILNSVGFYARQTLKLNWVGSWGLVGPGQGSNFVSNFLALNLNRSVASPMPKKKKKKKKKKKNQKKKKNP

SEQ ID NO: 162970 - protein, 132 aa, Oryza sativa
  unsure (1)..(132): unsure at all Xaa locations
  Clone ID: PAT_MRT4530_62009C.1.pep
SSHRSISCFFDNCCFVHISRLVPEKLIVLLRDGRKLLGTLCSFDQFGMPLFTILFLKSVHLDFFCHXLLLTFFYLAANVVLQGACERVIVGELYCDVPLGLYVIRGENVVLIGELVMISAAKHDHDQLHFPH

SEQ ID NO: 162971 - protein, 54 aa, Oryza sativa
  Clone ID: PAT_MRT4530_6200C.1.pep
SCLAHSARCTIQPAGCFGRSMLWGGMSSLPELLRAMAIAYLPNELGCPQFQYLP

SEQ ID NO: 162972 - protein, 99 aa, Oryza sativa
  Clone ID: PAT_MRT4530_62010C.1.pep
MTTPPSATRSLLPSPRYTSLRASSLLPVVATMVCPHRHRGGSPFPLEPCLDYPDGAGVGAAFDPPTIGSSKTILCNGYFIAAAHYSSSSADNHTYKSYN

SEQ ID NO: 162973 - protein, 177 aa, Oryza sativa
  Clone ID: PAT_MRT4530_62011C.1.pep
MATSPLPRWAPTPSPSLPLWRTSPGGGDGAAVRGFLRSPFRTVLAALRGRRAAPRGDTAPPRPLHPAAAAATTEHAAASGFDSIGIDVVGAARGEKRLDDGDGGGVFLTWEDVWVTAVDSRGHAAAILNGVGGCARPGEVLAIMGPSGCGKTTLLDTLAGNPTRTLCSVSFSPWIAC

SEQ ID NO: 162974 - protein, 221 aa, Oryza sativa
  Clone ID: PAT_MRT4530_62012C.1.pep
MRGGVISADAGERRRAAARSPAGDGWGVIVCPDDNGGGGDRTAARIVAAVVFLINVHRSSDDMIDRSANQPGIDEIAEPIVRSSGERDQEMAATRQTTGGSTTFHFGLGIITKKSLNTSGPHISRKELSQRLLNLIIASCSLARPGGLRLIQGWVQAISIEWPELTKVELNPVRTQGLEEVKLDWWRNLLTTDGELKRRATLNAAPVQGGAGEGQARCSVG

SEQ ID NO: 162975 - protein, 35 aa, Oryza sativa
  Clone ID: PAT_MRT4530_62013C.1.pep
FSVTYLVIPAASHPLTYYRVLYIMYPTPACAYSYY

SEQ ID NO: 162976 - protein, 222 aa, Oryza sativa
  Clone ID: PAT_MRT4530_62014C.1.pep
MMKEIRFPRDSRIWFAYQHFADFELPADFRFEEINHERFEQSTASTKTTYSSPPHASQSGEPIHYVVGILPNGGGLAPSIIDYNAPKTTPVLHGQPREPIPTDIGKRKRTRQSVAQPSAAKPPVTKKKATKKQKTAAADDLSTIDPDVEEFLAHEEMEEAIDDAAADPPRSPSPSQHESSERTPSARDSHHIEVPEQPTPAVPVLADMFSFDIREFIDEEEE

SEQ ID NO: 162977 - protein, 1078 aa, Oryza sativa
  Clone ID: PAT_MRT4530_62015C.1.pep
MERLHTSRNHVYGFIIILLLLVQATAAATSRCPAQQAAALLRLKRSFHHHHQPLLLPSWRAATDCCLWEGVSCDAASGVVVTALDLGGHGVHSPGGLDGAALFQLTSLRRLSLAGNDFGGAGLPASGLEGLAELTHLNLSNAGFAGQIPIGVGSLRELVSLDLSSMPLSFKQPSFRAVMANLTKLRELRLDGVDMSAAAAAAAGDWCDVLAESAPKLQLLTLQSCKLSGAIRSSFSRLGSLAVIDLSYNQGFSDASGEPFALSGEIPGFFAELSSLAILNLSNNGFNGSFPQGVFHLERLRVLDVSSNTNLSGSLPEFPAAGEASLEVLDLSETNFSGQIPGSIGNLKRLKMLDISGSNGRFSGALPDSISELTSLSFLDLSSSGFQLGELPASIGRMRSLSTLRLSECAISGEIPSSVGNLTRLRELDLSQNNLTGPITSINRKGAFLNLEILQLCCNSLSGPVPAFLFSLPRLEFISLMSNNLAGPLQEFDNPSPSLTSVYLNYNQLNGSIPRSFFQLMGLQTLDLSRNGLSGEVQLSYIWRLTNLSNLCLSANRLTVIADDEHIYNSSSSASLLQLNSLGLACCNMTKIPAILRSVVVNDLDLSCNQLDGPIPDWIWANQNENIDVFKFNLSRNRFTNMELPLANASVYYLDLSFNYLQGPLPVPSSPQFLDYSNNLFSSIPENLMSRLSSSFFLNLANNSLQGGIPPIICNASDLKFLDLSYNHFSGRVPPCLLDGHLTILKLRQNKFEGTLPDDTKGGCVSQTIDLNGNQLGGKLPRSLTNCNDLEILDVGNNNFVDSFPSWTGELPKLRVLVLRSNKFFGAVGGIPVDNGDRNRTQFSSLQIIDLASNNFSGSLQPQWFDSLKAMMVTREGDVRKALENNLSGKFYRDTVVVTYKGAATTFIRVLIAFTMIDFSDNAFTGNIPESIGRLTSLRGLNLSHNAFTGTIPSQLSGLAQLESLDLSLNQLSGEIPEVLVSLTSVGWLNLSYNRLEGAIPQGGQFQTFGSSSFEGNAALCGKPLSIRCNGSNAGPPSLEHSESWEARTETIVLYISVGSGFGLGFAMAFLFQVFRGK

SEQ ID NO: 162978 - protein, 88 aa, Oryza sativa
  Clone ID: PAT_MRT4530_62016C.1.pep
MQRWEENTGCRHPSAATRPPRRTTPPPPPPAAPPSAESPSSSRSRILPCRRPGGGSAAARRAPVASGVDVAAVLAAFPDLAGFAQLPA

SEQ ID NO: 162979 - protein, 486 aa, Oryza sativa
  Clone ID: PAT_MRT4530_62017C.1.pep
MGKKHAAAGSGGGWLAAVRKVFRPSKDAADKKGGGGGDREKEPAAEAAPEVLLLEHFPAGGTSPSAEGTGNDQGGTVVGKGEGEEEDGEDGYGEVERARALAAAAEAAVAAAEAAARVVRMSALRRASREERAAVRIQAFYRGYLARRALRALRGLVRLQALVRGHQVRRQVHLTMRCMQALVRAQARVRARRLITDHIHAGVAPLRLPPLPPATAAATYSSRRREGGYSWHPLRNNSYHAQLGERDESDDDVDGDGGKVGEHARQQQQRQRGNDVRSRSPFRSWDGSSRTPEEDRAEGVRRHDAAARRERARAYAYGYQQQRQWQEKAGGFQWLDRWMAAQAQQHAPEPDKSRRRAALTAAADGTTMPERTVEMDTTSYRSPLNSHSAAVQGRPPAVPGYMAATQAARARARTAPPATPAHARSRSGAVLAGDTSSSGQSGSGSGGGGAHVQKPCAVYSPESRGTGDWTPPRLAVSSRATRLVYA

SEQ ID NO: 162980 - protein, 349 aa, Oryza sativa
  Clone ID: PAT_MRT4530_62018C.1.pep
MASSSDVDLADSGPVHMMAKNDCTGSSGIVIDWDKEEHRHCVAACLVKGVMVMMKDRSNPLAPAWWKSFGFRCRNVIKDDSWVSIDMDASDQGSSDSGRDDEIFGATYEYEPPARLPRHPSAPSYVVAFRGTIPTNLGDLIHDIKIVYNTFSNSNRCDITHDEVEGLLQGGANSCTMWLAGHSLGASQALDVGRSMAEKGFNLPTFLFNPPQVSPAPAIYLLRPNEKAKMHLYATSSLLKGYVDYFEQRQLVQERFPSIGMSAMKLSYRDMFFSALNKDKERSHLLPSALLWENSRMDNDVENHPSKCTLLRKANRLKKRVLKAHSLEQWWKPDNELSLTKTQYNCPSA

SEQ ID NO: 162981 - protein, 664 aa, Oryza sativa
  Clone ID: PAT_MRT4530_62019C.1.pep
MAAGGRCCFRRGAPAAVLVLPLLLLIAAAALPRRALAATVAADVAAINGLYVALGSPALPKWTANGGDPCGDGWQGVVCIGSNIDSIIFNAANLEGQLGSLGNFTSITTINLSNNNIGGTIPEDLPVTLQHFFMSDNQLTGSIPTSLSMLQSLTDMSLNDNHLDGKLPDAFGSLTGLVNFDISSNNFSGSLPPSLGSLSSLTTLKDGNPFNTSIAPSASPSSTPTGSTPTQTPSSPSSSGTPSPSSSPSNSSGGSTARDSSSPSSRKHKSSTLRIVGYVLLAIVLFIVTVLLVIFCLSKYQERQSRRDYTTSQVGRVHQRVEEPKVKQASVQSRNDAKKGSTEVPERRQMYKITIQLLAAALEKPPEKRKEHQYTNSFEEGNLIRESRLGKVYLAELPEGRFLEVMKIDNANDRIPVDEFLELVASVSDIRHPNILELVGYCAEYGQRLLVYNHFSRKTLHDVLHEGEELDGALSWNARLQVALGAAKALDYLHESCEPPVVHQNFEPANVLLGNGFSVRVAECGLAELTLSGSVTQLSGRMRALLNYEAPEIHEAGTFTYRSDVYSFGVVMLELLTGRKPYDSSGPRAEQHLVRWADSQFHDIESISKMVDPSIQGECSEKVLSRFADIISRCIRPEPEFRPSMSEIVQDLARIISVTSEESE

SEQ ID NO: 162982 - protein, 149 aa, Oryza sativa
  Clone ID: PAT_MRT4530_6201C.1.pep
PVSPRATAAEKPTHLRRLPSRCASAAAQAAAVAQAASCRRPRTRVACRRRRRVPPPPPPPVAATATPPAAAATACRRRCAAACCPRMLPTQTPPQPVVAVVGGWGRRWAAATCWPRRRAARPRPPTAAPRRCRSPPPPASGRACVPPVV

SEQ ID NO: 162983 - protein, 69 aa, Oryza sativa
  Clone ID: PAT_MRT4530_62020C.1.pep
HHIFFDNYEALNCILQHNVYFMVMQQIFCYHQLQRKLPSLDAGLIHISTKALHMLPCSWKRTSTRGINI

SEQ ID NO: 162984 - protein, 325 aa, Oryza sativa
  Clone ID: PAT_MRT4530_62021C.1.pep
VCRIFNAANLEGQLGSLGNFTSITTINLSNNNIGGTIPEDLPVTLQHFFMSDNQLTGSIPTSLSMLQSLTDMSLNDNHLDGKLPDAFGSLTGLVNFDISSNNFSGSLPPSLGSLSSLTTLHMQDNQLSGTLDVLQDLPLKDLNIENNLFSGPVPPKLLNVPNFKKDGNPFNTSIAPSASPSSTPTGSTPTQTPSSPSSSGTPSPSSSPSNSSGGSTARDSSSPSSRKHKSSTLRIVGYVLLAIVLFIVTVLLVIFCLSKYQERQSRRDYTTSQVGRVHQRVEEPKVKQASVQSRNDAKKGSTEVPERRQVREINLAVPAALEKPP

SEQ ID NO: 162985 - protein, 86 aa, Oryza sativa
  unsure (1)..(86): unsure at all Xaa locations
  Clone ID: PAT_MRT4530_62022C.1.pep
MRMAAGGRCCFRRGAPAAVLVLPLLLLIAAAXLPRRRYAATVAXDVAAINGLYVALGSPALPKWTSNGXDPCGDGWQGVNFQCCKF

SEQ ID NO: 162986 - protein, 112 aa, Oryza sativa
  Clone ID: PAT_MRT4530_62023C.1.pep
MARATTSEAAATIAAVGELVRSASGNDRRDRYGRLSSYADPAASPTLTHGSSRPGSPPRGSYHLSLPSLMHRFNGGGNGRGRSGMALPLWFGSHRLPLPHAWNVSHLPRIWI

SEQ ID NO: 162987 - protein, 118 aa, Oryza sativa
  Clone ID: PAT_MRT4530_62024C.1.pep
MENSKRYGIIDPILKPNATSGGGSTGREETVMREGRRQRRLLAKRGRSGGVGVWTNAAVEACQGRARWWRRCAEPKEQRCGWRAEGVLGRRHVEGGRGVQKEAVGRRCVEGGGGDAPA

SEQ ID NO: 162988 - protein, 515 aa, Oryza sativa
  Clone ID: PAT_MRT4530_62025C.1.pep
MAATMASNAAAAAAVSLDQAVAASAAFSSRKQLRLPAAARGGMRVRVRARGRREAVVVASASSSSVAAPAAKAEEIVLQPIREISGAVQLPGSKSLSNRILLLSALSEGTTVVDNLLNSEDVHYMLEALKALGLSVEADKVAKRAVVVGCGGKFPVEKDAKEEVQLFLGNAGTAMRPLTAAVTAAGGNATYVLDGVPRMRERPIGDLVVGLKQLGADVDCFLGTECPPVRVKGIGGLPGGKVKLSGSISSQYLSALLMAAPLALGDVEIEIIDKLISIPYVEMTLRLMERFGVKAEHSDSWDRFYIKGGQKYKSPGNAYVEGDASSASYFLAGAAITGGTVTVQGCGTTSLQGDVKFAEVLEMMGAKVTWTDTSVTVTGPPREPYGKKHLKAVDVNMNKMPDVAMTLAVVALFADGPTAIRDVASWRVKETERMVAIRTELTKLGASVEEGPDYCIITPPEKLNITAIDTYDDHRMAMAFSLAACADVPVTIRDPGCTRKTFPNYFDVLSTFVRN

SEQ ID NO: 162989 - protein, 1117 aa, Oryza sativa
  Clone ID: PAT_MRT4530_62026C.1.pep
MVGMEGKGDASVTPVRTSDRLRKRPKYFGRNYMYYNPAIRKKMKSKKRAAASQIAKKLLRKSAARAPPADSALEIIERVDRVILDLLGIIVSVWSNLRRSTRKRRMSVNLEDYDTDSSSMEDDDLMRPRYRSSKNKVDDEVSARPKRKKLSNSSSIPRREGLRPRRSIRGQRLHPYQESEDDQESSEEQPAQDRRENGNDIEEDGNEEEVDGGDEAEADGDDEDGEEEQEGRRRYDLRDRSEVRRPSPRKEGKHRTQSPRRVLVHGIGPKNSKYLKKGGSRMHKRPRFSLPDDSDDSLLVDEPDEGPSMPWMRGGRGGMPWFLGGLDMHCPGAWGLNVGASGWGHQGDNTVSTSSLMPGIQTAGPSSKGGADIQPLQVDGSVSFNDIGGLSDYIDALKEMVFFPLLYPDFFANYHITPPRGVLLCGPPGTGKTLIARALACAASKAGQKVSFYMRKGADVLSKWVGEAERQLKLLFEEAQKNQPSIIFFDEIDGLAPVRSSKQEQIHNSIVSTLLALMDGLDSRGQVVLIGATNRIDAIDGALRRPGRFDREFFFPLPGYEARAEILDIHTRKWKDPPPKELKTELAASCVGYCGADLKALCTEAAIRAFREKYPQVYTSDDKFVIDVDSVRVEKYHFLEAMSTITPAAHRGSIVHSRPLSPVIAPCLKRHHEKIMERIADIFPFLSSVDVSKFSALSYGSSIPLVYRPRLLMCGGVSVGLDHVGPAVLHELEKFSVHSLGLPSLLSDPSAKTPEEALVHIFGEARRTTPSILYLPQFHLWWDTAHEQLRAVLLTLLNELPSNLPVLLLGTSSVAFGDLEEECASIFSSRNVYEVDQPSDDDRMRYLHALFESLLSFQMEESRSKSKDQKSSVDLPKAPKEVDGPKLSELKAKAEAEQHAVRRMRMCLRDICNRILYNKRFDVFHCPNSVALFSDYRSVVHNPMDMATVLQQVDSGQYLTRASFMKDIDLIVSNAKTYNGSDYNGSRIVSRACELRDVVQGMLSQMDPSLVSFCDKIAEQGGPLQVTDDGDSSILQAAPVAQLVSGTRMSARLRNVQPEVNLSRSYEALKRQKKSTETEQGMVKESTTRDDKSLGDVDLSKPISPEEAPKEPVQMVF

SEQ ID NO: 162990 - protein, 221 aa, Oryza sativa
  Clone ID: PAT_MRT4530_62027C.1.pep
MGISRDSMHKRRATGGKQKAWRKKRKYELGRQPANTKLSSNKTVRRVRVRGGNLKWRALRLDTGNYSWGSEAVTRKTRILDVVYNASNNELVRTQTLVKSAIVQVDAAPFKQWYLTHYGVDIGRKKKAPAAKKDAAEGQEGEAATEEAKKSNHVVRKLEKRQQTRTLDSHIEEQFGSGRLLACISSRPGQCGRADGYILEGKELEFYMKKLQRKKGKGAAA

SEQ ID NO: 162991 - protein, 61 aa, Oryza sativa
  Clone ID: PAT_MRT4530_62028C.1.pep
MMTAVTVQKYAGDWMAVRSRHTNQLPSSHGAIVVRKLSSREKALAAGTRSQIVRSKTNQRA

SEQ ID NO: 162992 - protein, 70 aa, Oryza sativa
  Clone ID: PAT_MRT4530_62029C.1.pep
HASSHASETVYSSLVFPLGFRPWLTAAPPAYARPSRRRRRPRGRLPNGSGSAPPAPRPFPSRTRSAPPSA

SEQ ID NO: 162993 - protein, 310 aa, Oryza sativa
  Clone ID: PAT_MRT4530_6202C.1.pep
PVSPRATAAEKPTHLRRLPSRCASAAAQAAAVAQAASCRRPRTRVACRRRRRVPPVAATATPPAAAATACRRRCAAACCPRMLPTQTPPQPVVAVVGGWGRRWAAATCWPRRRAARPRPPTAAPRRCRSPPPPASGRASSSANSTPKKGESESFGTAPAPASAHKPVINVIHVKQPTDATDLTTARSIESFARSQLIIADASEAERQQLASSWDLQFCPYTSFRSRMLFIRSNLSKFCLNIATMKPIKSSNSRLDWLFCQWTDGERERERERVSVRDRCRSNSITFMEKVFAVNQTDHAGTKGSGKKKDI

SEQ ID NO: 162994 - protein, 52 aa, Oryza sativa
  Clone ID: PAT_MRT4530_62030C.1.pep
HVILFHSPSNCLHILSSYYKSKWAQLPCHFLASAKALIPIFRRAIPGRVVDR

SEQ ID NO: 162995 - protein, 45 aa, Oryza sativa
  Clone ID: PAT_MRT4530_62031C.1.pep
MADEELARATAWAGVGNAATLPYPNLAAFTLPHPDLLAASLPRPE

SEQ ID NO: 162996 - protein, 47 aa, Oryza sativa
  Clone ID: PAT_MRT4530_62032C.1.pep
MGSIALRATAPSMSSGGHVADPSPEGFIAGLFGDSSSAYRLTVSALK

SEQ ID NO: 162997 - protein, 92 aa, Oryza sativa
  Clone ID: PAT_MRT4530_62033C.1.pep
GKKQFFCLRGGQPHGIIIFPGGPLILGGQIIPPTWNKRKPKIKKKPKIGGSGRNRSTATLSGSGAGSRLFVALSGSLPCQRPVWVPLVPCCC

SEQ ID NO: 162998 - protein, 230 aa, Oryza sativa
  unsure (1)..(230): unsure at all Xaa locations
  Clone ID: PAT_MRT4530_62034C.1.pep
SMAPNLLPVPXRLRGLHTVASTLADNYWVRDIRGALIVLVISQFLMVXMWVLPTXLSPGTGDCLVWCWTGNQCYSARSPYHALLLGNXPFPCTELLWQAEGPAKCKLLLWLAFQQRCWMADLLQKRGIDGHSACPFCAKKLETPNHILLDCVFAHQVXAGLGSLLPVATLFRAGGHMLGSTCLSTFTRASTFCSYPDSFGRSGTSGFLILPFRWSRWCWGPSSKRTISGL

SEQ ID NO: 162999 - protein, 431 aa, Oryza sativa
  Clone ID: PAT_MRT4530_62035C.1.pep
MAAPEKVFVALPAEAKSGRSTLSWALGHFRATAIVVTHVHVPPQMIPVMGVKFHASKLNPEQVSLFRMAERDKVDKQLDHYVNQCLRMKMKCEKLVIENENVVDGLVELINLHGVTKLVISAAPDRNYSRKMDKPASRTATEIMQRADPSCKIWFVCKERLICTSGVEVEIAPGHTPFIPDTGHDALQLTLHQEQDDNNESELGFYDEIKEACKAADNLMMRALRESYRRQKADEEVVSSLQKAKEYEELYLEEVKKRKELEEALLRASEEIAQLKQERDLPKNDQNTTMEEQKEVISDNLILEASGQIIKPLQEYLDHDENCVREPETLLIQRKLAASFSPSSVMQSPFDEDCCIPSYFICPILQEVMREPCIASDGFTYETDAIRSWLDGGRRVSPITGQPIVHQQLIPNLSLRSVIQDHARRNQYSFS

SEQ ID NO: 163000 - protein, 68 aa, Oryza sativa
  unsure (1)..(68): unsure at all Xaa locations
  Clone ID: PAT_MRT4530_62036C.1.pep
MAGNKWICYSIGDEDLHGRRQGCAEHVVVHSRLRRLWRHGYQVSSIXPVPGYQVLVPTDTRVQVPEGN

SEQ ID NO: 163001 - protein, 152 aa, Oryza sativa
  Clone ID: PAT_MRT4530_62037C.1.pep
MVKAVVVLGSSEIVKGTIHFVQEGDGPTTVTGSVSGLKPGLHGFHIHALGDTTNGCMSTGPHYNPAGKEHGAPEDETRHAGDLGNVTAGEDGVANIHVVDSQIPLTGPNSIIGRAVVVHADPDDLGKGGHELSKTTGNAGGRVACGIIGLQG

SEQ ID NO: 163002 - protein, 93 aa, Oryza sativa
  unsure (1)..(93): unsure at all Xaa locations
  Clone ID: PAT_MRT4530_62038C.1.pep
MVKAVVVLGSSEIVKGTIHFVQEGDGPTTVTGSVSGLKPGLHGFHIHALGDTTNGCMSLDWATLNNPAGXEQGAPEDETRMLDLGNVTGGACW

SEQ ID NO: 163003 - protein, 202 aa, Oryza sativa
  Clone ID: PAT_MRT4530_62039C.1.pep
MFDFNSEDFDELALDGSNYLERAIEAQIHLGMKGLCTALISNSECTETQKREALAFLWRHLNKGFRTDYRAERDPFVLWQSLKDRFEEEQKARVLYQAQNDWLNLRFHDYKLVSEYDSALHLIISRFKICGREITQEELIEKTLSTFHPINLHLHRQYRAARYEKYYDLLWTLREAEAHKLLLMKAQQRMLTDEVIEDTKRG

SEQ ID NO: 163004 - protein, 67 aa, Oryza sativa
  Clone ID: PAT_MRT4530_6203C.1.pep
AAGIGTRILCAERYVGYTLDSLMLGILMDMSSKILHKPGNLGIYHIKPFNLSTLKVLLLVHLNLHVY

SEQ ID NO: 163005 - protein, 105 aa, Oryza sativa
  unsure (1)..(105): unsure at all Xaa locations
  Clone ID: PAT_MRT4530_62040C.1.pep
MSPPAAGIMGMWRAAAXHLVGRALGSRCPHTSPGSMKIGGVFYNGGEHAHENPSFDGWVEGAIXITKGIEYEGHDYIVNDHKDVMNSXLEKHIEDMHASSTTIFL

SEQ ID NO: 163006 - protein, 68 aa, Oryza sativa
  Clone ID: PAT_MRT4530_62041C.1.pep
NLMLCKLHIMKFQQPRVELKTGHHCSSRPPLLHFPFPWEAEEEGRDTHTLAPLYTITQPHSSLRSLGS

SEQ ID NO: 163007 - protein, 213 aa, Oryza sativa
  unsure (1)..(213): unsure at all Xaa locations
  Clone ID: PAT_MRT4530_62042C.1.pep
ILKLNFNIDFEIYNHILCKIKGVFYYFSMMDKWHQRLLVLIFGSYSXSGFGDDWIYRXKLQVLLFYXPVRSGSGCRLELXMHVVGEYSIWHTMEVLCAYGMRSRIWKESKFGTIGYVKFVSCTRGFPMGIRTSSKSLVRGFSLPTSGINRGGASNQLHIGGQTGGXSVVRPVSAXATGADLGGQTGDPILVRPTATRRSDRQDNLGERRGNLI

SEQ ID NO: 163008 - protein, 164 aa, Oryza sativa
  Clone ID: PAT_MRT4530_62043C.1.pep
TVSKTTGHSYKLQCYTHNFMLDHTELNHAPLSSNHQSDHILLLFFESQSTHAPKFILNLLLIDSIINSPLTSSTSQSLWQASPPAGKASNESVVVSAAGASGPRGDLPPLRRRRWRGRGRRWRVEAAAEQPRDGGDEVVLRPGPPARAGTGEASAVERLPRADC

SEQ ID NO: 163009 - protein, 217 aa, Oryza sativa
  Clone ID: PAT_MRT4530_62044C.1.pep
MTHEFSQSQLQGYRVVVHRIGCYGRAALRVKKKEQIFSCCLQEIYPVAGSPPADGSAGRAPWQQPSNNLSSPTIPYRPATETGRAEWRPKHGTAHELPCPCSAGLGRWGRILAHFATRIPSPCGRWCGSPTLSQLSAPLAAGGRLPSRMRSPSVSLSKSSPNAALFFMPNAAQLSYARHAGHYDSSLTTPSLPLHASAAQIRASPHRGGQGDSKENL

SEQ ID NO: 163010 - protein, 43 aa, Oryza sativa
  Clone ID: PAT_MRT4530_62045C.1.pep
ILCACTPSRLMIGYQSQIAIVQNVAQPQQHFKFTAKTLPQSFP

SEQ ID NO: 163011 - protein, 64 aa, Oryza sativa
  Clone ID: PAT_MRT4530_62046C.1.pep
MGQPRRTGFVHACRLGLHTTPRRMGPTLRAKPTYTHLPLRRTASPNHDPGHPGPTVTATVIDQQ

SEQ ID NO: 163012 - protein, 368 aa, Oryza sativa
  Clone ID: PAT_MRT4530_62047C.1.pep
MGYLPSLGGKAAHLVSDLATVILNPVSERESQRHPSHLPEATEVQENIYEDDDDDNSVKNSEIPNGPDTSSFRAFLMSFMSSSNSSSDSIEIIPEHNMNMEYPTLTPVGKGSNGRKGLFSRGKHSIGKIINKAGRIGGFRQKPSYSIDGETVQTEYDAPGLELKGSKESASHDKLPAMSEPSMLLSETMRTVLYTSLPVLVQGRNWMLVYSTWRHGISLSTLYRRSMLCAGYSLLIVGDRKGAVFGGLVEAPLQPLIKKKYQGTNNCFVFTNIAGRPVIYRPTGANNYFTFCSTDYLAMGGGGHFALYLDGDLLNGSSSTSETFNNPCLSRSREFEVKDVELWGFVNASKYDEMLTICRTEKQGIWNL

SEQ ID NO: 163013 - protein, 49 aa, Oryza sativa
  unsure (1)..(49): unsure at all Xaa locations
  Clone ID: PAT_MRT4530_62048C.1.pep
LDITKVVSRVLYFRYMLIGSGAFXGRTGTIGYYACFWFTRLSYSSGKSD

SEQ ID NO: 163014 - protein, 74 aa, Oryza sativa
  Clone ID: PAT_MRT4530_62049C.1.pep
MAMALWRKRPPHYPLRLYRPWRWRGGGGMVNRGWRGGGCRRPTMGDAAAAVTWKKGKRRLQGPRARRKAAVSMA

SEQ ID NO: 163015 - protein, 587 aa, Oryza sativa
  unsure (1)..(587): unsure at all Xaa locations
  Clone ID: PAT_MRT4530_6204C.1.pep
MGRGGSRAACAAAAPPWFFFPDEVWEHAFSFLPAAADRGAAAGACSSWLRAERRSRRRLAVANCYAAAPRDAVERFPSVRAAEVKGKPHFADFGLVPPAWGAAAAPWIAAAADGWPLLEELSFKRMVVTDECLEMIAASFRNFQVLRLVSCDGFSTAGLAAIAAGCRHLRETDLQRWGALFPKSFTSLVTLNFSCLEGEVNITVLERLVTRCHNLKTLKLNNAIPLDKLASLLHKAPQLVELGTGKFSADYHSDLFAKLEAAFGGCKSLRRLSGAWDAVPDYLPAFYCVCEGLTSLNLSYATVRGPELIKFISRCRNLQXQLWVMDLIEDHGLXAVVASSCNKLQELRVFPSDLFGAGFLTERGLVDVSASCPMLESVLYFCRRMTNEALITIAKNRPNFTCFRLCILEPHTPDYITREPLDAGFSAIVESCRGLRRLSISGLLTDLVFKSIGAHADRLEMLSIAFAGNSDLGLHYILSGCKSLKKLEIRDCPFGDKPLLANAAKLETMRSLWMSSCLLTLGACRQLARKMPRLSVEIMNDPGRSCPLDSLPDETPVEKLYVYRTIAGPRCRMKIHSLFQDMEMHGL

SEQ ID NO: 163016 - protein, 193 aa, Oryza sativa
  Clone ID: PAT_MRT4530_62050C.1.pep
MPSYKHFSPRNTIVVNLPLISHRLQFKNDQIALSPKIYPSIHGKKEKDKDEMGKMSRPDPGGSIGGGGPWWRRGSRGGSGVEVAGCGAGSEGIGVGAVAARRPHVAARRSLGAARRPQSPVPDRLHRRLSGAADGHLKTRRQDPAVTPPSRVRRHPDRRTLASPRLRPSRHPHAHRAVAPLPITPFPLAIDDL

SEQ ID NO: 163017 - protein, 845 aa, Oryza sativa
  Clone ID: PAT_MRT4530_62051C.1.pep
MALPGRLLLLFLTAAHAALQTCGGDQTPGPVANVSRVWSSNTSRDVLLCSVPGNGNEKLSFAAGFYCSSPCDAILFAVYITSGSGDIPVVVWSANRDLAAHQNATLSFTASGDLVLANADGSVVWSTGTSGQFVIGMTITNSGNLVLFNDAYMPVWQSFENPTDSLLPGQMLAEGMMLRPNSSATNWTTSRQLYFTVRSDGLYAFAGSDQPQPYYRFEFYSSYLVKNESITQYQYKPTFVTLVNGSLSIPGSDPLETKLPPAHSLQYLRFESDGHLRLYEWEEFKQRWVIAKDIFELNYCQYPTVCGEYGICLSEGCSTEGMDCSTTECSCPNTTYFKPIDNMRPTLGCAVETEISCQAMQDHQLVAIPNVTYFHLWGDSRGAPMTDEESCKKDCLSNCSCKAALFSLYLNQTQALLYPDLSLSMSYLNTCYLLPEVLSLQAYLDPGYYSKDPVNARSTLYVKVQSTHLLPPSKKKNTFGYAIGATAAALVTLTIISMVIRKRCNRQRADESDFADLPGTITRFTFKMLKAATNDFSSKLGEGGFGSVFLGKLGNEMVAVKLLDRAGQGKKDFLAEVQTIGNIHHINLVKLIGFCVERSHRLLVYEYMPRGSLDKWIYYLHSNAPLDWGTRKRIITNVARGLSYLHDECRQRIVHLDIKPHNILLDDSFNAKVADFGLSKLIEREISKVVTRMKGTPGYMAPEWLTSQITEKVDVYSFGVVVMEIISGRKNIDYSQSEENVQLITLLQEKAKKGQLEDLVDKNSDEMHLHKEEVIEVMKLAMWCLQSDSSRRPSMSVVVKTMEGERAVDDNLGYNFFDLSPAISVPVEQLNSSLHPEASILSAPR

SEQ ID NO: 163018 - protein, 95 aa, Oryza sativa
  unsure (1)..(95): unsure at all Xaa locations
  Clone ID: PAT_MRT4530_62052C.1.pep
MLLRRGAASSSSSMAFPAPSFYPSSNSASLKCTVVAALDGGAQRRFQHSLEVGDXLAAASEPLAQGFGSGGCCWRSQRFKVAAALPTVFWRSSTW

SEQ ID NO: 163019 - protein, 121 aa, Oryza sativa
  unsure (1)..(121): unsure at all Xaa locations
  Clone ID: PAT_MRT4530_62053C.1.pep
MNTNFIIYPCYIHYDDSLSGRCNGVGILIIFTMTLYHDDDIRVVFGDLCVVFRLLDIFIXGYMLRKRGRPLMVTAQYGYSSACVYSPKLISWGGYSSIFSPGWMVKTDCRKELGQRGQRLG

SEQ ID NO: 163020 - protein, 147 aa, Oryza sativa
  unsure (1)..(147): unsure at all Xaa locations
  Clone ID: PAT_MRT4530_62054C.1.pep
RTAXVXMLLLSXIPSLVDTWTMAFGFVPIDDLDRKNLSRLRLVSVPGTVLLKRNLYEXPGTNAAGGGGGGGGSKENLAFVDRSVAVTAADAGQQRPFEDRSPVSCAVDSLADELRSLKINSSCENRRRLGKTTVNSASTLYERPVGC

SEQ ID NO: 163021 - protein, 60 aa, Oryza sativa
  Clone ID: PAT_MRT4530_62055C.1.pep
EDVGKLTGPATDIVLITLLRSKMLTLLRPVHQGNPYTVSEKPVCYTEILWMRIKLNILLT

SEQ ID NO: 163022 - protein, 292 aa, Oryza sativa
  Clone ID: PAT_MRT4530_62056C.1.pep
MTSELPEQQETKKRRNGKKKRGKKTPTNVGRRPYRHRSDQPSRLPGCIAVCAMLAGLVTWHPTRGCIVFDLRRRDKSNVPSAQAIVSSTSASFKAASDLSRSPRPVCSIFSSTPRRRLHKAAARHTAKASVTCVAPTKCLCQATIDRALPPHCRASLANRVVPPPSGRARSPRAAPPRARPHHPPCPRIVGPLRKVTHSQLPRRPRRPPPIRAARWRGGDGWPGAAAVGVKAEAGPGAAATGAEVEAGAMAAVAVFHGARGQGSRHGLMLLRARRVTVAAVAIAVEPVNLML

SEQ ID NO: 163023 - protein, 142 aa, Oryza sativa
  Clone ID: PAT_MRT4530_62057C.1.pep
LRFLSGDPPAPPRPVHRHQEARLRLPWRLPPPPRPSPRRPAPPQPSHPPPLLPASRRRRATAPPVCWRGLMVAARRGLPVRLGSAAARRGRWWPGTSISWARRRSRRPLRCGARQPCAGAGEVLMKKSNTPAWEICLGLMQP

SEQ ID NO: 163024 - protein, 70 aa, Oryza sativa
  Clone ID: PAT_MRT4530_62058C.1.pep
AKAASAYSSHQHLHRGNPVKPMYMLMYVQSPCLVSPLSMASACRVTCRQSPTPGECRRRRRSRRAPVSSA

SEQ ID NO: 163025 - protein, 166 aa, Oryza sativa
  Clone ID: PAT_MRT4530_62059C.1.pep
RVCSAGRRRQARRRCASVWTSASTSPTCTASAPRTPPAASTPPPPPSPAAATPPPPARPLPPATPGAPSAAARTARTSPSTGQPPPPPPPPSPTTSYHPQEFFKNRIQEIKNRSPPRRWRKNLGGGELGRRNWLSGRVCFSIALSLALVELKWRDGGGETWGEMLK

SEQ ID NO: 163026 - protein, 110 aa, Oryza sativa
  Clone ID: PAT_MRT4530_6205C.1.pep
PGSCRQLTGARRPCPQAATDAVAIPPPGGSVPSSLDPAPGGDRRGGCPPPRWGLPARRRPYSIGATETGWRLVLRPCAPARWRAGGHRCIVHAALSRNATWSGFHGARTA

SEQ ID NO: 163027 - protein, 104 aa, Oryza sativa
  Clone ID: PAT_MRT4530_62060C.1.pep
KKTPTNMGVPNMLNTNNTADRGEDPLKLKAQRPRPKSAPWPGGTGPGPKGRKGKGTPGLEKGGLATFSGETAPVSKGPGGPSKGSTDARCFPPNFMGAKTFGAQ

SEQ ID NO: 163028 - protein, 119 aa, Oryza sativa
  Clone ID: PAT_MRT4530_62061C.1.pep
PVEGDVRAVRAAADGAPGVAGGRGRAWGGVARQVTAAGVASMLLGASVALMLCGSVTFMLGFFLMPWVIGLACVFLLVGFVTNLSVIWRAILWPASCSSSPKVASTWYIFSKPPFMSYM

SEQ ID NO: 163029 - protein, 66 aa, Oryza sativa
  Clone ID: PAT_MRT4530_62062C.1.pep
SMKLGIQHLSGHTLVPEFNYLLLSHSYMLSLSILEFAVLDCAIPILPFYDPKKNGSYTVQFAKISP

SEQ ID NO: 163030 - protein, 59 aa, Oryza sativa
  Clone ID: PAT_MRT4530_62063C.1.pep
TILPGITRKSIIDVALSKGFQVEERLVSVDELLEADEVFCTGTAVVVSPVGSITYQGKR

SEQ ID NO: 163031 - protein, 86 aa, Oryza sativa
  Clone ID: PAT_MRT4530_62064C.1.pep
FMLVSSFVRPPFLFYFCFRFVFCVCLWMDIYFPNDPPFFFFPASFNPTLCRAGWPAGRGRSVIGGPPPASKKKKKKKKNKKNPPPP

SEQ ID NO: 163032 - protein, 164 aa, Oryza sativa
  unsure (1)..(164): unsure at all Xaa locations
  Clone ID: PAT_MRT4530_62065C.1.pep
GLGGCVVVRVFYYDSEIVLRCVVSCLXRGIFRDGLALGLLLFGCIFDVWDEFCEKWFVVLGINSCRCGWLGSGLCILCVIGFVVITCWIELVCCGLVVCVKCLRCCLVLVLVSCVFVKCGLLLRLVVIGFVCCAIPFLVIPLAVGAAGILAVCCVSLLLRLPME

SEQ ID NO: 163033 - protein, 57 aa, Oryza sativa
  Clone ID: PAT_MRT4530_62066C.1.pep
RPALFKGHVLALRSHEDDGLPDNSINDPANCSLGIQMCVVRHGAGLLAAYEFYVFKV

SEQ ID NO: 163034 - protein, 940 aa, Oryza sativa
  Clone ID: PAT_MRT4530_62067C.1.pep
MEPDADDNKQQPGGGGKATVASHPKSREWQLRKYLLLLAILVATVTYIAGLDPPGGVWLETTDEHLTGDPILPDTRRLRYDLFYYFNATAFVASLVLTILLLPFRVEGPRLMAVRGVMVVDLLCLMVAYIAGSCRGRLTTIFASVLSATIFVYIVVHALVAPSTDTPEKKTVHDSPDKEKAMDMEDGHLHGCSSNPLDMKEAVEDGKLRPKERRKVLMLLSIFMVTITYTAGLSPPGGTWEHAAEEGGAAAAAGGHHRAGDPVLQEGHYWRFVAFFVLNTVAFVASLTVIMLLLSTSMGNNGRRLSALNVAIAFALLGLMGAYASGSCRETETTVYVLCLIGAVLLYISCLAVIKFLSKKTKPQAQTHGCCGWMTATARPCPACRSDCASPTDLGPDPVMPGPCQGEQPTEPSIATGSRRNPASKNREDSTDPVERARSLILLLATLITTVTYQAGLDPPGGVWRDDDNGHSGGGLILPATHAKRYKVFFYCNSAAFVASIIVIIMVQSRSLIGRRALEAAVILDLFGLIGAYSAGSCRDVRTSIYVFSLAVAIFVLVVAIYVVISKLPHDKKGKLEEKSKLEKKQKLLLLLAILAVTITYQAGLTPPGGFWIEHTDEDHRYGDSILADNYPLRYKAFFYCNATSFMASVIAIVCLMSRNLSSIAVGYCNALYACMAAGLVGLMGAYAAGTTRRLRTSIYVFALVGAVLIFAALHIKFFHKILIGCLSFFSSKKQDEVTKNHDQATGSKGSTGKKCTNNHDEETTDEYKEKYKMRKYLTLLGILAASVTYQAGLVPPGSVWPTNDGKGHAAGNPILGDTDGRRYHAFFYSNSTSFSASIVAIVLLLQGTLILPELNDPDRFGPMHMVVVLDLLGLLVAYAAGSSRDWGTSGYVVAMAVMVLAYVAIYVFLSLRDRKGSEGRATTEMLLNFPINLIILQEI

SEQ ID NO: 163035 - protein, 429 aa, Oryza sativa
  Clone ID: PAT_MRT4530_62068C.1.pep
MKKLEKELKHQELLKNEQYQMKLQKCNERRLALIKSSLDIVVAIGLLQLAPKKVPRALLYPSPPSPSPLVVGNALASWDLAPPSLQPCAAAVPVVAVAREGRHRGRRRVSVLVRPFAVAEDRRSTVAAVNPKSVAASSSSSSPSVDLPPLFWSPATASHLDHGHVSVALYTCELPLPPSAETNTKGNGEAVRRSDERRRVGTPATAPPAATHTTDMEYYEQEEYATVTSAPPKRPAGRTKFRETRHPVYRGVRRRGPAGRWVCEVREPNKKSRIWLGTFATAEAAARAHDVAALALRGRGACLNFADSARLLRVDPATLATPDDIRRAAIELAESCPHDAAAAAASSSAAAVEASAAAAPAMMMQYQDDMAATPSSYDYAYYGNMDFDQPSYYYDGMGGGGEYQSWQMDGDDDGGAGGYGGGDVTLWSY

SEQ ID NO: 163036 - protein, 159 aa, Oryza sativa
  Clone ID: PAT_MRT4530_62069C.1.pep
RWCVGVQCAAFSSQGSGAQSGTWVYKLQEILPAAGCSRAGQPASGNHAVNQQVSQRAVVTDDSSISALQARQSTMAGAFYLYAAIARRLLRVHLRLPAGDQGAEPRGHGGALPHQVMISSSINESIHIYMHLGCCNILNGKFDSFLVRLSKVFHVHLAD

SEQ ID NO: 163037 - protein, 104 aa, Oryza sativa
  unsure (1)..(104): unsure at all Xaa locations
  Clone ID: PAT_MRT4530_6206C.1.pep
KIFPSHILQSHXLAHXMWSSPLISCLVAPYILSIESTTSQSAPQVSQGXLXELXILTSXSPSSILPTAPEVNSAQACNDPMYPVTTHVQSTHCGHLVDSSDCHL

SEQ ID NO: 163038 - protein, 100 aa, Oryza sativa
  unsure (1)..(100): unsure at all Xaa locations
  Clone ID: PAT_MRT4530_62070C.1.pep
DGCGRGIARSTLQPSLGCNLGRPCRTXWPQRWRWGFGRTPWFGRTMGWQKPAHLRLATSSIASLCRLVNFGPIHRVNSEFLAYSCISLILDIVRLIYHSS

SEQ ID NO: 163039 - protein, 61 aa, Oryza sativa
  Clone ID: PAT_MRT4530_62071C.1.pep
MEETLEYKSNKPELHYWEPLPAPPAECCSALGPVSHDCACGTLDIINSLPAKCGLPRVTCQ

SEQ ID NO: 163040 - protein, 213 aa, Oryza sativa
  unsure (1)..(213): unsure at all Xaa locations
  Clone ID: PAT_MRT4530_62072C.1.pep
MCSSLLTRQPTSSIMSRSSLAMALLLAAFAAAATANSGAAPAASDFIRKSCRATQYPAVCVQSLASYGGAGAPPPRSPRELARAALSVSVDKARSASTYVGHICGPGRPRRRRRRXPVRDCLENMADSVGHLRDAAQELGGNMGHAGSPGFKWHLSNVQTWCSAALTDENTCLDGLSRGVDAATRSAIRGKIVEVAQVTSNALALVNRVAPAN

SEQ ID NO: 163041 - protein, 70 aa, Oryza sativa
  unsure (1)..(70): unsure at all Xaa locations
  Clone ID: PAT_MRT4530_62073C.1.pep
PPNAPLPRYSRVFLGGATKGLEMRPDYFPPDXEPKGVGLKSXRMAPKEIPIQPPFPGVPGMFFPQLAPAR

SEQ ID NO: 163042 - protein, 108 aa, Oryza sativa
  Clone ID: PAT_MRT4530_62074C.1.pep
GISSWIHMQSVFPQMKPIGILRSLVRHLSYCTPKRMFSLKSFRRTVVHFQDSQGTSLVTVDCSTPNCLSKTTALAAVLNMTGCLMYQRSQRCSKSNHPHDFIRNKLHS

SEQ ID NO: 163043 - protein, 35 aa, Oryza sativa
  Clone ID: PAT_MRT4530_62075C.1.pep
MVACIGSSHLYDVKESIFSVSDIREVGSGISKVVA

SEQ ID NO: 163044 - protein, 164 aa, Oryza sativa
  Clone ID: PAT_MRT4530_62076C.1.pep
MERNTQGDHLRKIKIVAQNFDNDSKSYGRRMERNTQVAKFVEHVQYRFLSSRGRYVWFNISSQKLRIVQIYMQRTELFTNPFSKSFKQLDLSSHRMSHLQKADYSDSISSAANAYPQNQSASDLPHNLGGKESNNPSNPSPLTKLTRFSNDVTADGHPYDRRED

SEQ ID NO: 163045 - protein, 114 aa, Oryza sativa
  Clone ID: PAT_MRT4530_62077C.1.pep
MVRGRVFVMITGGGVVVPVTGSAVDSRGGIGGAIAAGFIPFTVARGLASSAAQQGYEAWQWRSGRSRGAGGGGRARWDSMRRKSERCSGRGRWGRRSVMREERIRSRWTARDAV

SEQ ID NO: 163046 - protein, 236 aa, Oryza sativa
  unsure (1)..(236): unsure at all Xaa locations
  Clone ID: PAT_MRT4530_62078C.1.pep
HGLGISPWKPNSPLAAPSHRICLLQFVFFHLQPLFFFNVWPVFPSFACLPIPPGSPPWPIRDPTTGPPPPYILLDARAVGAKALHRRSSPPVGSSSSMWSWGKWVSEIXELRKNSRIWLCTFATAVPSRAAPPPSSSTNRRXAHVLPRSASAAPNDVRATRRSRRRWTTPIRRRSRQRLAKKRLDSIEIAGSGGYDIADHAEERSSGEEGNMDPMLREKFPSGSTSPFQLLLLIGF

SEQ ID NO: 163047 - protein, 915 aa, Oryza sativa
  unsure (1)..(915): unsure at all Xaa locations
  Clone ID: PAT_MRT4530_62079C.1.pep
MRKKLDDRSRTLIENGVRGLQPSMFVIVGVKPRYPFVNLNYMGQKSRVKCRRRDVKCXKEKAVSRRHKKKRAKQIXSLRQIWLLDPEKADHFSLFNXTFEVNHFPYQDSXSVFGSTLSMCLLQDVEALAXLTSHENCRAVRRXLAMILQFLCLASLASRNPLIMVAHKRXRRIVGTSCRYYIFQQALTILXASRFLCDVKNYELNILPIXNIFKLYNLIRIVXDCEGKTQNKRELKDLYYEFREVFPVGTLMGNFFTIXKGNAAINLLHFTLDXYNRSTVALLAARGRGKSAALGLAIAGAIAAGYSNIFVTAPSPENLKTLFDFVCKGMNALEYKEHLHYDVVKSADPELKKATIQINVYKQHRQTIQYLKPHDHGKLSQVELLVIDEAAAIPLPIVKSLLGPYLVFLSSTVNGYEGTGRSLSLKLLQQLESQSQPSAPNNGPNSSRLFKKIELNESIRYASGDPIESWLNDLLCLDLANSIPNISRLPHPKECDLYYVNRDTLFSYHKESEIFLQVCLEGQISRKSAMKSLSEGRSPSGDQIPWKFCEQFQDNVFPSLSGARIVRIAVHPSAVRLGYGSAAVDLLTRYYEGQMTLFAEDEEENEEPEVRITEAAEKSAVTGEHTCMVLRPLNSDDIEVNESSKCGFLDPFYQDFRQRFRRLLGTSFRHLNFKLAMSVLASKIDFSDHEPSDYYTNITSKILGDMLSPHDMKRLEAYSNNLVDYHLILDLVPILAHQYFSEKLPVTLHGAQAAVLFCMGLQDKDIGATKEELGIEREQVLSNFIKTMKKLYGYLHNIAGKEIEATLPXRLKEIDTAPLKSLDEDLDEAAREVKEQRRAIDEDDVDPKFLQKYAIDADDDEIEKALNGGKISASGVISVKSNKTKADKQEKRKEMKKSKRKGNDGEKSESKKKRS

SEQ ID NO: 163048 - protein, 92 aa, Oryza sativa
  unsure (1)..(92): unsure at all Xaa locations
  Clone ID: PAT_MRT4530_6207C.1.pep
GYRIRASWRWIWSSSSAPCRSVLPAPRPAPLRAVERERESPAAAVLASARLCRRRLGVGGEERDGGGAACXSPPASPPRQSNRASTRWXXRP

SEQ ID NO: 163049 - protein, 233 aa, Oryza sativa
  Clone ID: PAT_MRT4530_62080C.1.pep
MARRLLRLRAHAAGLSQRLAPRLLPSRPYISDMRRSAFSDRLLRSLRSEISSRRAPSPPPSAAPFAVDDRPGEQWIRLRRAFGGDDDDEKEEVRVDATMVDGATAPTRSGEVAGAGPDDAAGPQLRMHISVNVEVTKAARRDLALTFECSAWPDEMEVERVYPVRRGGPAAAQQYMGRQFSELDDEMQSTVHDYLEHRGVNDELAAFLHSYMENKEQTELVRWFKNVECFIKK

SEQ ID NO: 163050 - protein, 137 aa, Oryza sativa
  unsure (1)..(137): unsure at all Xaa locations
  Clone ID: PAT_MRT4530_62081C.1.pep
PPRGGMDYFLKKQGWEKLIFKLFGLHTTPKEGPMFPPVTPAPFLSKKAPXLGGTCPFSWXXXXXXXLSFSXFYTIFFFLXLPRPVTIIWQLMKLIQRARLKCSCVAGAAEAAALAGDDGVQQQHVEDLRKNPPPPQK

SEQ ID NO: 163051 - protein, 207 aa, Oryza sativa
  Clone ID: PAT_MRT4530_62082C.1.pep
MAVVRVMAVVRWMAMAVVRAVCVEKGAQGQGVLVVGIGDLEAKIGANICLVYIGRGGAGEERNRGAADAGSTANWRWDELKWGGAALRGASGIDGEAPAPAVDCVGIDFGDEQWAWRWPSFVLGGIPIASSEPGLPIPWAMAPLIPGTDTRRRPCRPSPDVCFHESPRAPAHGALLSHGEPEVVEDETLSSKNEEQEQSRFKRYPKT

SEQ ID NO: 163052 - protein, 123 aa, Oryza sativa
  Clone ID: PAT_MRT4530_62083C.1.pep
DSCIEETGSLVPESRTKEGDNWFVLVYPFDLVPIDEKIELHLRRQPRRATFAPHLPRRLVSPAGKKLQNPTFNLIKNLFCSELQIRCLISSWHPLCRRNCSNQTQVKLFEGSLAVPISFQSHW

SEQ ID NO: 163053 - protein, 64 aa, Oryza sativa
  Clone ID: PAT_MRT4530_62084C.1.pep
KETSKFLGGHIRAPGVGELIHGAALFFRFGAPSGGIVCSFPALPPVGEPFKGAPLPPFPKGVPL

SEQ ID NO: 163054 - protein, 849 aa, Oryza sativa
  Clone ID: PAT_MRT4530_62085C.1.pep
MGWAWRREQWAVAWLSVAVLGAALVGAAGAFEEGTAVYIVTMKQAPVFHKRLDLERFGSSRVAGGGGGGGGDTPSTSILMKPRHGPAQPMNYGSYLVRLQNSLLKRTLRGERYIKLYSYRYLINGFAVVITPQQAERLSMTKEVANVMLDFSVRTATTHTPEFLGLPQGAWVQEGGPQCAGQGVVVGLIDTGIDPTHPSFADDLITDSYPVPAHYSGICEVTNDFPSGSCNRKLVGARHFAASAITRGVFNASQDHASPSDSDGHGTHTASIAAGNHGIPVVVAGHHFGNASGMAPRAHIAVYKALYKSFGGFAADVVAAIDQAAEDNVDIISLSITPNRRPPGLATFFNPIDMALLSAVKAGIFVVQAAGNTGPSPKSMSSYSPWIFTVGASAHDREYNNYVVLGNNLTITGVGLAPGTDGDSMFTLVAAPHALKNNVASPTEMSLGECQDSSHLDEDLIRGKILVCSYSIRFVLGLSSVKQALDTAKNVSAAGVIFYLDPFVIGFQLNPTPMDMPGLIIPSSDDSKVFLNYYNESLVRDETSNKIVSFGAIAKILGGQNPNYGISAPKVMFYSARGPDPEDNSLANADILKPNLIAPGSSIWGAWSSLGLDSAEFAGESFAIISGTSMAAPHVAGLAALVKQKFPYFSPAAIGSALSTTTSLSDREGNPIMAQRTYGNPNSTQSPATPFDMGNGFVNATAALDPGLIFDSSYDDFFSFLCGINGSAPVVMNYTGNSCSSSAMTGADLNLPSITIAVLNQSRTITRTVTNVASDERYTVSYSAPYGVAVSASPAQFFIPSGQRQQVTFVVNATMNGTSASFGSVGFYGDKGHRVMIPFSVISKVVHRS

SEQ ID NO: 163055 - protein, 236 aa, Oryza sativa
  Clone ID: PAT_MRT4530_62086C.1.pep
MANNHEHKVDHLDQPFYGPPVLPPVEPLSAAAARRRCVADPYALCCRAIRVLTIVVIAVGVVALVLWLVSLPNALKAYVDSAELTRFELGGSDGAKRGQLLRYNLTVAVSIRNPNRDQAVLYRRLEAVVLYGGERFGYVDFPRTRQGRKSTMVIRPSFVGQGVLAGAAAFGREKEEGFFNINVKLHMRVRLKVMVFVDSVEYRPDVDCYIRVPDPSNATAVAMGFTATRCRVDDFM

SEQ ID NO: 163056 - protein, 193 aa, Oryza sativa
  Clone ID: PAT_MRT4530_62087C.1.pep
MADEEVEAMESKKGKEKKKKVKEKDGVVVSLSPSERKFEVKKEERAPALLAADVVKVVGLLDCSRSVLRRRLGTGDWGLGAAIPADAMRGGGGARKAGNNLLTGRDVAINSFPNPRHGLHGGEDLHPTPIDWEDGIGEIGPSGVGVGTNGDFVFGGAAPTMSQQPLVASFYGELLFMFGSMRDSLPRFGEGWR

SEQ ID NO: 163057 - protein, 340 aa, Oryza sativa
  Clone ID: PAT_MRT4530_62088C.1.pep
MEFKKPTIGISSFLLLLLVSAAAAARPTRQLVANDGTVAAPAVAPAAADVAAGVADAPVAAANADVPAAAAAMGPVAGAAAAGAPIGASTIPVAAGAGAVGMNGGGGGGDHPMVFFMHDILGGTNPSARIVAGIVDNTAVTGQLPFARPNGAVLPLNSGVNVKSGAAGAIDNNNIPFLTGLGGATNAAFTSNSNNNNNGVPVFAGGSLPQGTTLQKLLFGTMTVVDDELTEAPGLGSPAVGRAQGFYIASSEEGVSQTVVVTAMFKEGEFADSISFFGVHRTADSESHLAVVGGTGKFAGVKGFAKVAVVRPGGVAATAAEHETDGVETVLQFTVLLIMY

SEQ ID NO: 163058 - protein, 64 aa, Oryza sativa
  Clone ID: PAT_MRT4530_62089C.1.pep
ESHQAGGRRPIGPPFLDVGCAPWPFPSSSRLEASSPYITRRWCWCYSFHKLVSCWSCQISPWFG

SEQ ID NO: 163059 - protein, 334 aa, Oryza sativa
  Clone ID: PAT_MRT4530_6208C.1.pep
MDRRDMASHRGRSSTRGHGWGRGWRGRGEGRGLGLSRGAGPSPPPPPSSSTSSFPAAASATAAGTGGDAPPIVGSCPDMCPARERAQRERLRDLAVFERVGGDPARTSPSLAVKKDKIKFHILSHQKLSRSSQDSDASSLCYLNMEQLMKCLLSLFDMYDVIHKNNSQSSKETEYYSFYVLLHLGCKIPKMVDSLSLWYGHLSASIIQSKEMVFARSILRFYHLGNFKRFFCAIAAEGTDLQLRLLEPFLNEARVRALMYFNHSGYKLQHHPLTHLSEILMIEELDLETLCRLCGLEISNNEDTKAFAPKQASFCVPASIPQINGIYISRENQR

SEQ ID NO: 163060 - protein, 84 aa, Oryza sativa
  Clone ID: PAT_MRT4530_62090C.1.pep
DGVKGRNGSRGWHRWRTTVSVEQYSHLWARQGNSSTSTSLSTCGLGSAIAGIEAARVSRSCSGIGGDEDETRRDTIFLFFFFYI

SEQ ID NO: 163061 - protein, 214 aa, Oryza sativa
  Clone ID: PAT_MRT4530_62091C.1.pep
MSGNDGDMKMRVIVVEGDETSNAPKDVCCEYTLDGSVDIKGSPAVKGKSGGWLAGGLILLNQGLATLAFFGVNVNLVLFLTRVLQQSNGDAANNVSKWTGTVYMFSLIGAFLSDSYWGRYKTCAIFQAIFVLGLALLSLSSRLYLIRPVGCGTEHVPCEPHSGAELGIFYIALYMIAFGNGGYQPNVATFGADQFDGEDPAESHSKVSFFSYFY

SEQ ID NO: 163062 - protein, 77 aa, Oryza sativa
  Clone ID: PAT_MRT4530_62092C.1.pep
GDHHVAVRARRVHCPGRRRIIICRHVRVSTALANRRQQEQGAGGGGADEGGYSEHAAAGQRLVGLLLLLDLVPLHLA

SEQ ID NO: 163063 - protein, 638 aa, Oryza sativa
  Clone ID: PAT_MRT4530_62093C.1.pep
MSGNDGDMKMRVIVVEGDETSNAPKDVCCEYTLDGSVDIKGSPAVKGKSGGWLAGGLILRYVEYDIALPQFGFIAAFMGELSGALFALNQGLATLAFFGVNVNLVLFLTRVLQQSNGDAANNVSKWTGTVYMFSLIGAFLSDSYWGRYKTCAIFQAIFVLGLALLSLSSRLYLIRPVGCGTEHVPCEPHSGAELGIFYIALYMIAFGNGGYQPNVATFGADQFDGEDPAESHSKVSFFSYFYLALNLGSLFSNTFLSFLEDEGNWALGFWVSTAAAATALLLFLGGTLRYRYIRPSGNPVGRIFQVAFAACRNWKAGESPGAVTLYESDEKADSGGRKLLHTEGFRFLDRAAVVGANPKLGTCTQPRDPWKLCTVTQVEEVKSILRLLPIWLCTILYSVVFTQMASLFVVQGAAMRRTTRFPGFSVPPSSMSAFDILTVATTIFLYRRAVCPLVSRLTGRHTGPTELQRMGLGLVLGAMAMATAGTVEHFRKAGATTAMSSDLHIMWQVPQYALIGVSEVMMYVGQLEFFNGEMPDALKSFGSALCMMSMSLGNYFSDVIVSAVTKATAVRGRPGWIPADLNEGHLDKFFFLLAVLAVADFAVYLVCASRYRSGTVDVDRSDGEEEDGVAGRQMAATV

SEQ ID NO: 163064 - protein, 47 aa, Oryza sativa
  unsure (1)..(47): unsure at all Xaa locations
  Clone ID: PAT_MRT4530_62094C.1.pep
CLKXCNGPTQSMTSKDQIEQARTLKVENRRIGRQGIIELLLLETQPV

SEQ ID NO: 163065 - protein, 103 aa, Oryza sativa
  Clone ID: PAT_MRT4530_62095C.1.pep
APAGFVRRCVAWEQGHSDGGEHAAAALTELGRVAVGVGNGALRGRRRRGRACARGNQTRRGAARESHTAAWRGSKAHGDGDAHGAAARGSKATETVESTPPRP

SEQ ID NO: 163066 - protein, 43 aa, Oryza sativa
  Clone ID: PAT_MRT4530_62096C.1.pep
GPNRVVVDNSDDSRTVLCRAGVPVPLSVGHKPDRPNDLQRIKA

SEQ ID NO: 163067 - protein, 127 aa, Oryza sativa
  unsure (1)..(127): unsure at all Xaa locations
  Clone ID: PAT_MRT4530_62097C.1.pep
CRPPLPPSSPSRSPPSRTSSPSSSAMSSRTRTRXRCSPFASSSTRPRSSTFSSPRRPTMGVRSSASASWRTCPSSTPSSPSXARVSSRSSSTTSATQTPTGSFAAAPRASTASAASSEATRAASRRR

SEQ ID NO: 163068 - protein, 251 aa, Oryza sativa
  Clone ID: PAT_MRT4530_62098C.1.pep
MGTTNLNIPKDIPDHSSRKGARTDLPDRACCVVVEYLTGGTLKQHLIKHYRKNKKLLYEEVVRLALDLARGLSFLHSKKIVHRDVKSENMLLDPQLNLKIADFGVARLVEAQDPKDLTRTTGTLGYMAPEVLDGKPYNRKCDVYSFGICLWETYCCDMPYGPYSDLSFADFSSFVVHKNLRPEIPDCCPSAMASIMRRCWDANPEVRPEMEEVVRLLESLDTSNGGGMLLEKKKKKHPGGGCFCFFVPRAA

SEQ ID NO: 163069 - protein, 109 aa, Oryza sativa
  unsure (1)..(109): unsure at all Xaa locations
  Clone ID: PAT_MRT4530_62099C.1.pep
MPSEAGHRLYVKGRHLSYQRSRHTTRPATSLIKIEGVDDTNAANFYLGKKVAFVYRAQKEIRGTXIRVIWGKVTRPHGNSGVVRGKFTSPLPTKSFGASVRVMLYPSSI

SEQ ID NO: 163070 - protein, 240 aa, Oryza sativa
  Clone ID: PAT_MRT4530_6209C.1.pep
APGSTHASASFSTSSFPGAASATAAGTGGDAPPIVGSCPDMCPARERAQRERLRDLAVFERVGGDPARTWPSLAVKKFCRTISSTSVQASDIRPLPVLRETMDYLLHLLDSSEHQFEIVHDFIFDRTRSVRQDLSIQNIVNAQAIQIYEDVIKFHILSHQKLSRSSQDSDASSLCYLNMEQLMKCLLSLFDMYDVIHKNNSQSSKETEYYSFYVLLHLGLQDTQNGRFTLFVGWPSICFN

SEQ ID NO: 163071 - protein, 1350 aa, Oryza sativa
  Clone ID: PAT_MRT4530_620C.1.pep
MFDDDDDVEPPVNDVDIYYFEESEDKPVCFSVLPIKFDENEEVSCSDYKELNLRGFTDNNRHVFKKVIAWRVDLDCQRPKISVLSSDGKWIELLKPRMCYYEKKVRSILITVQMLHFVRKCPKKQQRSLFDHLGEVFNKFGPVPNGDDIKKHHHLIKLFMERDPILVKSKIIRCFIEDASRKAIEPIPRRACTEDRFIVSDESLESSDDCSYSNSDSSDDNNDDSTDEDTDTDGNATDDDTDMICAICDDGGKLLSCEGPCKRSFHARVKHGRKSKCRTLRFTSVELKLKESGTFLCENCEHNEHQCFKCGELEPSYGPNAKGSPDIIHHARYVGVLSTIRHGLMVFQCNKESCGHFYHPKCIAVLLEPEDTDGACKLEEMIADGMSFTCPVHWCFKCAKMEDRTRSEFQFAVCRRCPRSYHTECLPSYHVLMASNGIFHSEISFETKDKGAPKLAWKIKKRSYFYCLHHGIDATTGTPSGEHIKFPSIPKIKKTKNLSKKDAKVTGKRKKSGNKFSTKSTKLANVSPRGESKQTRRVARNSSSEHIALEHGCAVKRLKKDLQFEVPLVDVSARLSGAKTVEGKEGQPGTPSSFVMGEISKSASCAVDGETEKRVTSTAEKEISAGTSQDMATKDVLRQPRIEIDGLSECLVQIADKLHWYVQPGNTESCGKLPDGVLLERSIVVVREIVDLCFNMDNFSRLMKEKLEDVSKGCNFKNYDLFQHKNNLCFDESNWVTMQPKDLPHGLNLVMVLDLPLDIQAVSANKFVDKVLTFKPRLIIIVSPTDIERLDCKEEPYHLIWEYNQHIFGKPLYQPGDVDVNDDAKNGLHVIPLCVSLWSFPDKTEENMRIAGKHGHLNVGHKAHSVMLKDSSVDKGAKGDNEIFTVGKEDTSEREQTSEHCSGERLIIPNVVTFHANQEQNDELQSLYKEKHANGSGGGNNLTSGKESDVHRGENACGHNSAARQKTEISKRENRMTDSTHEENMRSGKEKIPRDGSNKGTVKPDLVDGLPPDKHVDVAFVHKTTTNRVDTQQECGYNVAVDVDDNYALQHEPKSPHGNDNLRGTEMDTSGDNSRKTREQKEVTDGKRLDLDRKREAVRMKNARDGHHEDDRTAHPQCVDVKSPSHNDDQRARGASVCKSRKRGTSNRILESRDTVSENSARRQVPVERRNGHAPYSRRPDYSATARRGSPSYPRRRRRSRHFSSERDWSTVPPRGNSPDTEYDGTRYNTEYDGYGSQSGCGYHGMDTLPVDRYYPQEHHNGAYRPQTNFGEEEQAAAYGRRRNDHGWGPDYRRRDSFDWEHRSSARGTVTDRYVPDLEQTNHQIPGQASLQDGYFMRRSRSFVNMHVPY

SEQ ID NO: 163072 - protein, 92 aa, Oryza sativa
  unsure (1)..(92): unsure at all Xaa locations
  Clone ID: PAT_MRT4530_62100C.1.pep
AAILKRLFMSKTNRPPISLRRLSKFMEGKEENNIAVIVATVTDDKRIHEIAXMMCTALMFTETAWARIVNAGSECLTFDQLALRAPLEENTV

SEQ ID NO: 163073 - protein, 266 aa, Oryza sativa
  Clone ID: PAT_MRT4530_62101C.1.pep
MRSSGISVIVVVRHLAWLVLILCSWPRVAAAQAQQAPKTDPVEAAALNTILGRWGKKASWEWNISGELCSGFASTEIDWDYYPTINPFIKCDCSFSNNTLCHITKLALASNSLSGQLPKELGNLTNLLSLGINLNNFTGVLPEELGNMTKLQQLRASDNGFIGKIPHYFGSMTNLEDIMSFSGFEGNSFEGPIPENLSNLTRLENLILRNCKISGDLRALDFSKFRTLISLFIGTIYVRMHDSKSSSHRAMYVKNNNQRSSIAQIF

SEQ ID NO: 163074 - protein, 42 aa, Oryza sativa
  unsure (1)..(42): unsure at all Xaa locations
  Clone ID: PAT_MRT4530_62102C.1.pep
REDEGGFGXLXXSCSTPHRPPCRLSGEGXSLWPASTFLPILK

SEQ ID NO: 163075 - protein, 99 aa, Oryza sativa
  Clone ID: PAT_MRT4530_62103C.1.pep
MSPPAPKPVLHGPVAVVGILSTREAVTTPLSQDSTPSADVRRVHPEHSVTTTASAATSFLPLPVAAFVSFLNNGSSLYKMGNVKIITTIYGQFCNFGHA

SEQ ID NO: 163076 - protein, 163 aa, Oryza sativa
  unsure (1)..(163): unsure at all Xaa locations
  Clone ID: PAT_MRT4530_62104C.1.pep
MPHLNYLPKALWRRRPSKERRRRLTDDGDGGDDGATAAHGAAPRRRRCEGGATTAHGAVAQRRRCSGAMAAARRHEGSGSVEREERRKREMEWGKWRGGXGGSARGDGTARRGVGLGARRWNGDDDSGAGSRRRWNTRGDGTGGDGVRGRAGRWDDGAPARGV

SEQ ID NO: 163077 - protein, 611 aa, Oryza sativa
  unsure (1)..(611): unsure at all Xaa locations
  Clone ID: PAT_MRT4530_62105C.1.pep
MVDVARRSRRRGPVDGCGLAGASEIGGRWGKDPTVIDCRRREVTLTTPWGSDMTATVDQDPRLTERARGIFTKLPLKGMPVVKRFPDVFPEDLPGMPPDRDIEFIIDLIPGTAPISKRPYRMPVNELEELKKQIRELQEKGFVRPSSSPWGAPVLFVKKKDGSMRMCVDYRSLNEVTFKNKYPLPRTDDLFDQLEGAKVFSKIDLRSGYHQLKIRTGDIPKTAFSTCYGLYEFAVISFGLTNAPAYFMNLMNKVFMDYLDKFVVVFIDDILIYSKDEEEHAEHLRLVLEKLRKHKLYAKFSKCEFWLEEVAFLGHVISAGGVAVDPAKVEAITEWKAPKSVTKIRSFLGLAGYYRRFIEGFSKIARPITQLLKKEKKFVCLKYIFTQSDLNLRQRRWLELIKDYDLEVHYHPGKANVVADALSRKSHCNHLRTEGMAPELKEEMAQLNLHIVPRGQINTLDIQPLLRTQIEKAQKDNEEIREVKERLAAGFAKEFSTDEKDVLWYKKRIYVPEQGGLRGLILKEAHESAYSLHPGSTKMYQDLKEGYWWPNMKRDVAEYVALCDVCQRITEWKWDEIGMDFIXGLPKTATGRVTPTPEEETWNLRKEITFI

SEQ ID NO: 163078 - protein, 86 aa, Oryza sativa
  unsure (1)..(86): unsure at all Xaa locations
  Clone ID: PAT_MRT4530_62106C.1.pep
SFPSCAIACYSWRLPPPRRLVEELPGDLSEEIVEEVGAXVVSGLEFTTFEVKQELPLVIEAWVVLSVRRLPPCPPLDEGGVRWHHG

SEQ ID NO: 163079 - protein, 80 aa, Oryza sativa
  Clone ID: PAT_MRT4530_62107C.1.pep
GGGVHLPLGLDVLAVDHRRRRRHGLLQVLRQHLDYLSVQALRMEDVGEDFLRLVARRGGGADLHGHERHRTALEIGRASG

SEQ ID NO: 163080 - protein, 68 aa, Oryza sativa
  unsure (1)..(68): unsure at all Xaa locations
  Clone ID: PAT_MRT4530_62108C.1.pep
KKKKKKKKKNKKKNKKKKKKKKKKKKXKNKKKKKIKKNKKGGGLFKGPNLYFRGFQQYIFLMGPPNIY

SEQ ID NO: 163081 - protein, 59 aa, Oryza sativa
  Clone ID: PAT_MRT4530_62109C.1.pep
IPKTLNLPLFRFSEKQRPEFNMSTLGYLPKGASVFQRSKNRSRWLNQFLKRANKRIMFP

SEQ ID NO: 163082 - protein, 354 aa, Oryza sativa
  Clone ID: PAT_MRT4530_6210C.1.pep
MVRADDPLYVALHEDGRSGDGNHMSPTQCDYEIKYADGASTIGALIVDQFSLPRIATRPNLPFGCGYNQGIGENFQQTSPVNGILGLDRGKVSFVSQLKMLGIITKHVVGHCLSSGGGGLLFVGDGDGNLVLLHASLGNYYSPGSATLYFDRHSLGMNPMDVVFDSGSTYTYFTAQPYQATVYAIKGGLSSTSLEQVSDPSLPLCWKGQKAFESVFDVKKEFKSLQLNFGNNAVMEIPPENYLIVTEYGNVCLGILHGCRLNFNIIGDITMQDQMVIYDNEREQLGWIRGSCVFGLRAELQPSDQGCTVQIFPPLGKTEQSICMAAAASELHFAGDAQPAAAAALIAGEISPST

SEQ ID NO: 163083 - protein, 87 aa, Oryza sativa
  Clone ID: PAT_MRT4530_62110C.1.pep
ITSILCPECQGTGIHVEGDELEKPTISLSEMFRYKLKAIEAHKAWMKSPEVLENCSTGLHFPAEQIENSEEQEVIPLKSVAFYAADG

SEQ ID NO: 163084 - protein, 83 aa, Oryza sativa
  Clone ID: PAT_MRT4530_62111C.1.pep
FFFFFFFFFFFFFFFFFFFFFFFFLIEEIFIDYIFINFDIHYKYKELIRNNRYPLTDTNEYNRSGNQHQRNTCTYITHSFPRL

SEQ ID NO: 163085 - protein, 131 aa, Oryza sativa
  Clone ID: PAT_MRT4530_62112C.1.pep
MSSPPPNPSQLTILYGGSARAYDPVPPEKAQAIMPIAAAAAAAASATKSNAATAVKPPEMPAANATQARGSPVPTRPLPLQSTPGATGQPQGAGDPSPIRKLQADPPTARRHPPQRLPKKRPEHKLASKAP

SEQ ID NO: 163086 - protein, 221 aa, Oryza sativa
  unsure (1)..(221): unsure at all Xaa locations
  Clone ID: PAT_MRT4530_62113C.1.pep
VRRRDGWHGAGAAGEAGGLGGSPGRFKGTRGGSRRKESVGEGPTAADCSGGHCRPREGENSPGQRKSNSPGKELLHGSGNSFQATGGDELAMANGDGRGAASKRESMRVTTLHSSRRRXTVGSSPTRGEXALAARMESRRDGRDGGATRHRGCAAEEEGRERWRLELLVTRPRTHRLPRCSATDGDGKXGGDRAVSHDRRVRGNQKRGFVKIDLGYFGTED

SEQ ID NO: 163087 - protein, 210 aa, Oryza sativa
  unsure (1)..(210): unsure at all Xaa locations
  Clone ID: PAT_MRT4530_62114C.1.pep
GLMYAQVFTQSNLVFVIGMLGIFLSNLGMDHXKVIMKVLRYLQGTKHYMLXIYKRSDKLEVVGYSDADFAGCLDTKKSTLGYIFTLVEGVISWKSSKPMLIASSTMQTEFVSCNHATGQAVWLKNFILKLRVVDSITKQLVIYYNNEXKSSEAVKHIGIKFHVVKDRVQDKKNKVEYISTKLMLVDPLTKALPPNLFKXHVVGIGLSHCL

SEQ ID NO: 163088 - protein, 90 aa, Oryza sativa
  Clone ID: PAT_MRT4530_62115C.1.pep
PAAVFRLPSAAPSPPNHPAKSKISPQSSSARRALFPPLIRSSFPRKPPPKSIPIQSPPPPQIPPTPALQRPASSPVPSGPHRRAPPSSPT

SEQ ID NO: 163089 - protein, 286 aa, Oryza sativa
  Clone ID: PAT_MRT4530_62116C.1.pep
MCLAAAIASASASPARCLSPSSAALPRRFLHHLLLAATPPRPTPPPPPLRCIPFHRMAQFWTQGSLDKNKALVEYLKQYGAVRTDKVAEVMESIDRALFVAEGLTPYTDSPMPIGYNATISAPHMHATCLELLKDHLQPGMHALDVGSGSGYLTACFAMMVGPEGRAVGIEHIPELVAASTENVQRSAAAQLLKDGSLSFHVADGRLGWPDDAPYDAIHVGAAAPEIPQPLVDQLKTGGRMVIPVGSYFQELQVVDKNADGSVTVQNDASVRYVPLTSRSAQLQDS

SEQ ID NO: 163090 - protein, 102 aa, Oryza sativa
  unsure (1)..(102): unsure at all Xaa locations
  Clone ID: PAT_MRT4530_62117C.1.pep
MEAAVADAGRKLLKAGIALPDQPPSLVMPPKMKLEVEDGQMGDGAVAEEVAQPVVRGFMKDWDAMEDLLNYVLYSNIGWEFGDEGQILFTEPLXTPKALLEQ

SEQ ID NO: 163091 - protein, 106 aa, Oryza sativa
  unsure (1)..(106): unsure at all Xaa locations
  Clone ID: PAT_MRT4530_62118C.1.pep
MQLNPRARTRRNKSKAKKIVLDVTLSMRGNHLEAHQXNPMTYTXSYYQNQLYRLAPSDSNSADLTLADLDCSRFLLCFRNDLHLGFHFDLIFISDANNDRIYQIWS

SEQ ID NO: 163092 - protein, 112 aa, Oryza sativa
  unsure (1)..(112): unsure at all Xaa locations
  Clone ID: PAT_MRT4530_62119C.1.pep
MQLNPRARTHRNKSKAXKGWRCAEIVLDMTLSMHGNHLEAHQXNPMTYTESNYRNRLYRLTPSDSNSANLTLADLDCSRFLLCFRNDLHLGFHFDLIFTSDANSDRIYQIWL

SEQ ID NO: 163093 - protein, 131 aa, Oryza sativa
  unsure (1)..(131): unsure at all Xaa locations
  Clone ID: PAT_MRT4530_6211C.1.pep
NGYKGFYWSNYLPMTPKSVXDIHKRGGTVLGTSRGGHDAGGLLFSAGSYGNQHISSXRGINKVAFFNWQKIRRRGLKVAVAGVPKTIDNDIAVIYDYKRLFLPARGSSRVDLQACKLEYSIVSLTSGRHWT

SEQ ID NO: 163094 - protein, 109 aa, Oryza sativa
  unsure (1)..(109): unsure at all Xaa locations
  Clone ID: PAT_MRT4530_62120C.1.pep
MQLNPRARTRRNKSKAXKGWRCAEIVLDVTLSMRGNYLETHQXNPMTYTESYWLYRLAPSDSNSVDLTLADLDCSRFLLCFRNDLHLGFHFDLIFISDANNDRIYEIWS

SEQ ID NO: 163095 - protein, 44 aa, Oryza sativa
  Clone ID: PAT_MRT4530_62121C.1.pep
TLKFSTTTGMTQIDTQINNISSEQLIHIKNVFHRRLKMFNHIIT

SEQ ID NO: 163096 - protein, 797 aa, Oryza sativa
  Clone ID: PAT_MRT4530_62122C.1.pep
MDRRSWLWRRRSTEKSPAETESSVSSPSERLSDEQDTPKSSPSSVQSPEISSKEAQDDNVKVKVLSERLSSAVLDIRAKDDLVKQHSKVAEEAVLGWEKAEKEIASLKTQLNAATAKNSTLEDRIVHLDGALKECVRQLRRAKEELDHGIQDALAQQSREWESEKADLELRVVELKAKLEAKSEFSVNAETDASSRLASLEKENSALKVQLLAMSEEVELRTIEKELNRRAAETASKQQLESIKKIAKLEAECRRLQANARRELKRAPSSVYAESVTDCQSDCSDSWASILITELDQFKNDKSITRSASLAAADIGMMDDFLEMEKIASANSPSKSEAEDAASVQLVKLEEKIKRLAMEKADREKALHEAQRELRNTRHRAMVAEEKSVELQRQLNLVKGVKHSMETEMEAMENRRNELEGRIELAHGEITSLLDKGRILEERLESEKALTLELAAKYQQMDALEAERRELRGHLEASQSEAKNLGDKITLLEKKLEEEKAFSTRLAVRCHGIEALEEKKKGTEHELESAREEIASLQKKVSILELKIQEERALSEKLATRSCDLEALGVQTNELRSQLQSANSEIAGLNEKVKMLEEAEEKHKPLTAGLESQLRLAQAEAMRLKDHVSSLEKKLESQKNLSSAYITALDASEAQKNKFASRFELKEAEVEELRRKIRLLEEEIHKEKAQSSELGVQCQNLKEQFTSRALSQPMKPMASKELHIKKEKELARAAGKLADCQKTIASLNRQLKSLADFDEFVPGFENDSVIAEGWEENGLKLLNSANYPAQLGCLAVK

SEQ ID NO: 163097 - protein, 49 aa, Oryza sativa
  Clone ID: PAT_MRT4530_62123C.1.pep
LLDLLMSLLSLVHVHCMHKPYTFSITFRDLVGTFNVEKDSLLKVIISFV

SEQ ID NO: 163098 - protein, 101 aa, Oryza sativa
  Clone ID: PAT_MRT4530_62124C.1.pep
VDPGVRNIYGSAASPAKVFRQKITIPEDVVEQKRAKASPGGNKGTTPATGRATNTAGKPAAKKFIIRVKAGDQITGQGFNDVGKMGKKGTGMAAENGGPPR

SEQ ID NO: 163099 - protein, 71 aa, Oryza sativa
  Clone ID: PAT_MRT4530_62125C.1.pep
LTRSLAMKDSNEPGSRHHKNVLGVCRCCDLHPCPPWLPWPPPSLGSHVRVLHILKAQIGDGSGRPLFRESC

SEQ ID NO: 163100 - protein, 104 aa, Oryza sativa
  unsure (1)..(104): unsure at all Xaa locations
  Clone ID: PAT_MRT4530_62126C.1.pep
VQDSARARVLXPFFXXFFFFFFFFFFFDQQWXTGNPLLWCATAITYILLTSGWXTKWDATLFAPGNRLQPTYFLTXLNCRLWVAGXKTYNXGGPYKRKFXPTST

SEQ ID NO: 163101 - protein, 604 aa, Oryza sativa
  Clone ID: PAT_MRT4530_62127C.1.pep
MDAVKTEGRKAAGTVDCALRQPLVPPEKNIAAPAGRRREVASRFKSGGTPAPQAAASSVRRCTSPSLSRASAAEGTASTNRAQSAERRRSSTPSSSSTPSGGGGGAASRPRTPVRVAAATEVHGISRRAASTKPPDGLWASARSVPPLLQKESMAMATSAKKRHKLADGSSSDQTKVQARNVTETERKRSPLRGRNIGNQCENARPSETPNKRVVEQHRWPAAMMGGRGSAVLTSRSNGVANTPIRSVTPSNPTRGLSPRRICPAEVKANGLNQPLNGLAKRLATHESRREDKTESGSDVSSQTSENSKAATRPSRTLSSPVLHRSSSPNKVLSAASPASTAFQSPLRTRPSAPCRSRCCSTSQSGVAPLVFNYIVDARKGKKSASQFENIHQLRLLYNRCLQWQFVNARSEDTLTFQKSSIESILYSVWKSIVQLRDSVTVRRIDVQLLQQELKLYYVLKEQIAYLQHWPKLEGENGSTLIGAIEALQACTLRLPVTSGAQADAVAVKNSISSAVDVMQALSSSILYLLSKVEGRTSLVSELSDMARQEKVALGTGVQPPYSSDATEGRSFRMTLIIQVEETSHAFNMYRHGVKMERTYKILE

SEQ ID NO: 163102 - protein, 211 aa, Oryza sativa
  Clone ID: PAT_MRT4530_62128C.1.pep
MEENPRNEPTSAPPGAGNMTLYGHTMLYDEHQMMSDSTRIGQQCTFTGLMHEIMQTPKSAINADQDYLGMSRDILHTPAGFENSMIMTSNRFPENYEQMGGEIEQGTQAICDQWASKNIEELYNINMNNQQGLSSIIKTLASRWSKKDIDELYNINNTHQVVNGSTPEVENNVSASELENNGTTSNNQDDEDSENQNTWAFESNNETSEGQ

SEQ ID NO: 163103 - protein, 276 aa, Oryza sativa
  unsure (1)..(276): unsure at all Xaa locations
  Clone ID: PAT_MRT4530_62129C.1.pep
TLVGNQELLKCGRLNLVDLAGSENIARSGAREGRAREAGEMNKSLLTLGRVITALVEHSVHVPYRFSKLTRLLRESLGGKAKTCIIATVSPSIHCLEETVVTLDYAYRAKSIKNKPEANQKVCKSVILKDLYQEMERMKQDVKAAREKNGIYIPQERFALEEAEKKTMRDKIEYLETQNKELKMNIEELQEXYLDLEEAHSRANISLKEKEFIISNLLHAEQSIVERAKDIRGALENVSGDISALVDKLGRQSNTEAENKGLLFDFRSQLDHGLDL

SEQ ID NO: 163104 - protein, 30 aa, Oryza sativa
  Clone ID: PAT_MRT4530_6212C.1.pep
TSTQYSYLTNFAFSTSFAHSISRVLNTREN

SEQ ID NO: 163105 - protein, 832 aa, Oryza sativa
  Clone ID: PAT_MRT4530_62130C.1.pep
MATSPEIGWSAANLEGIRKSGCDSHRLLNAKKTVIGRATCNSPAPKSIPTLVRTSSSIIITEVADQPHPASDLSPDLTQRSPIPTDSAPIISDEVSAQHSAPDTAVEPPAIEAGGVIGNVSSASTASQMEDALRAVDQEQHRTELLAETNEDTDDVNSTPWSQPKRFIQKPARFVSPVVVGPSIMPSDVSLSVQLRDFLLNNGGRMSVFITTLIIYLCVKLMEIDSYVAYGNDVVNSFSTGNQTEGLFIDAFSSILIKDDRRNRPDTFGKRIFFSTSISIMVPVLHHDHWSLYAINIAHRRVDIMDSNNYNLIGTLESDHHRALSKRIVKRLSDALHEGPSVPPHMVPTKGMAFPTYDDPYNFYKTYAYHAGFDIKKSRTHKSIHEVCCTREGKHVSKVADCDRERKKPSKKMGCKAYVKLRHNYDGGVLSSVQYDVVELQHNHPLTPSPSAVKPMRAHKNHDDTAMKIVDIMQESHVPQSCIMGVLYDLHGGLDKIPFTTRDVENRKAANVRMENANDINKLLEFFNECTLQNPKFYWDAQLDENDQDPAMAVAVGRCFPGIIHRLCRWHILNCHSDPLNTIFERNEQIEPDMMLCINQTYKPYEFETSWDQFLKRYDLEGCPIMKALYDIREKWVPAFFRKDYCGRMTSTQRSESMNKLVKHKRMLEVITDRKEKEAAETRACSGKPMLAVRWPFVIQMSRLYTRAAFRLFEEALQDSTDLRISQDHDFRNGWIVSHTKRSEKHDWCQKQFKLIADVDAGVFTCECKQWEHTCMFCTHMLRAFVHVQLEKIPAAYILKRYTKKVKSDVPFDRHDREATGPMVFKKITGQT

SEQ ID NO: 163106 - protein, 168 aa, Oryza sativa
  unsure (1)..(168): unsure at all Xaa locations
  Clone ID: PAT_MRT4530_62131C.1.pep
CKYKIRAELEDAYITQKKKKKKKKKKKKKGGRVRRFQVLRSPCLSTSSSFLFLSPNFNSLVRGGGAYRLGMPLAVALLYLPCRPSPFRLAGVVAYRPAPFALPSVALPVWLLGRALSRRFLRGACGGCAPRVRSLCLSLALPPFVFFFSFLSCFGVFPFXVLVVWLFF

SEQ ID NO: 163107 - protein, 398 aa, Oryza sativa
  Clone ID: PAT_MRT4530_62132C.1.pep
HASGHFSSSSRVPTSALQKIRAMEMTLSKAQRAYPHCSHMTAKLRAMTHQSEELVRAHRSETSFLEQVAVRTLPKSHHCLAMRLTSEYFLLDPKEREFPQRYTMQMGDLYHYAIFSDNVLAQGVVVMDIISSSNDPKRIMFHIVTDALNFPAMMMWFLTNPPNPATIQIKSLDNLKWLPADFSFRFKQKGIRDPRYTSALNHLRFYLPEVFPSLNKLVLLDHDIVVQRDLSGLWQIDLNGKVNGAVETCTSGDGYHRLENLVNFSDPSIINKFDAKACIHAFGMNIFDLKEWRRQGLTTAYNKWFQAGKRRRLWKAGSLPLGQIVFYNQTVPLDHRWHVLGLGHDRSIGRDAIERAAVIHYSGKLKPWLEISIPKYRDYWNNFLDYDNPYLQQCNIHM

SEQ ID NO: 163108 - protein, 214 aa, Oryza sativa
  Clone ID: PAT_MRT4530_62133C.1.pep
DEIFKDELSSSSSRKKRNHARHASAGTVEKSTRTELVIVPTKKSVLGEKWEAFKNKVAEDVRERWETSDNPVVQKIQDLNESIFEETATAVSFREIRQRDPSFSLPDFAGDVQEMIKPVLTAYSKILHISDADVRETKMMGSTPIIIVGFQTQQIYCVRDREGQVTEGGQDTIQTVFYAWAMQLMDSDEVPEEESYYPVWRLREIQQVGIKALI

SEQ ID NO: 163109 - protein, 80 aa, Oryza sativa
  Clone ID: PAT_MRT4530_62134C.1.pep
GGFFFFFSFSLKKKPKGVHRKISGFFGSFHFPFNKHLKLGLVLWGMVYHKAPNLSFLFAQRTGQGLFHSFDNKQSSFHNN

SEQ ID NO: 163110 - protein, 83 aa, Oryza sativa
  Clone ID: PAT_MRT4530_62135C.1.pep
CGKQMLSADEADGATISLPGYLHHGQVYHGKQVASLMLALLVSTPSSGTRHQVALKLCPSMCGVYPRYCSTPCNVATGHSGSW

SEQ ID NO: 163111 - protein, 56 aa, Oryza sativa
  Clone ID: PAT_MRT4530_62136C.1.pep
KMSSKINGKWHRHKKNIFLEKKIGLRSQNGRLFRCCIRRPWRKNELDKRSCSLRKL

SEQ ID NO: 163112 - protein, 150 aa, Oryza sativa
  unsure (1)..(150): unsure at all Xaa locations
  Clone ID: PAT_MRT4530_62137C.1.pep
MKIFVILSLLALAASSASAQFDACTYGQCQQQPFMQPIMNPCNEFVRQQCSPMSLPWEQSRRLQLSSCQVMRQQCCQQMRLMAQQYHCPGYLHHGAVYHAXQVQFDAGFVGEPQAQAQAQVALNXPSMCGVYPRYCSTPCKVATGHCGSW

SEQ ID NO: 163113 - protein, 224 aa, Oryza sativa
  Clone ID: PAT_MRT4530_62138C.1.pep
RPGSAHPTGDGTRRRRGRGGAGAEPRRRGAAPLRPHHPPWPPLPQRPHHRLLPRPPRRRPPRRRPTPASPLRPLPPLQPSRPRLRLRRRRPPPLAHGPASDWYHHTTSPCGSTLRANCSGPSFDAPTSRHFTSNMITVTSTADCAELIIDSTTAGSDAGICKDGQTCEHALVAFTLGVKHMIGWCNKMDATTAKYSRGRYDEILNEGSSYLKKVRYKPDKIPFV

SEQ ID NO: 163114 - protein, 192 aa, Oryza sativa
  Clone ID: PAT_MRT4530_62139C.1.pep
MSERVFAELATIHYQKSLPCRHSFDPPRTTPILHLYIIHLLLPPLIAIVCLCYIAIVPFEEEEERMRMQVVETAAVEEEEAAAAMMSVYERVARMASGNAVVVFSASGCCMCHVVKRLLLGLGVGPAVYELDQLAAAADIQAALSQLLPPGQPPVPVVFVGGRLLGGVEKVMACHINGTLVPLLKQAGALWL

SEQ ID NO: 163115 - protein, 93 aa, Oryza sativa
  Clone ID: PAT_MRT4530_6213C.1.pep
MQRREAIPDHAIVVAPVQYSNLATAIITRWYAHPSAMAWSAAPAFEHDGGDDKRRRKKRAMVAREGPAMVTVAPYTSRIEREKSGRRPRLREI

SEQ ID NO: 163116 - protein, 245 aa, Oryza sativa
  Clone ID: PAT_MRT4530_62140C.1.pep
MEAANPAADASSRLSRLHRLPPSPPPPSPPPPLLAATASSTSPRTGGRSPSTPPTSPRRSSTSSPEPSAPSRRSRPSSPRRTTWPGTGRRMASWRPAARDSSSTPPTRPPPPGPLSPPWPTATRAASTTPVASSLSSRTTSATAAPPSSTPSPSPSPPSSRCPPSSSPPRRASRWQATSSSFSSSPKDVPLRRRHRLLQGFRTALTWPDRSSPASAAAPCSSIPSTGSPWRPRDSRTSRATPSTP

SEQ ID NO: 163117 - protein, 253 aa, Oryza sativa
  Clone ID: PAT_MRT4530_62141C.1.pep
MADPFPAAARGGEQGGGTAGQLVSTPSRLRTAVASMLNRTGHARFRRAAPVVVQEEEDEAAAAARDAVVRCDGLSASASSSFPSSVTGVTGDGSVSNARAVLPAAGDGDKPPPMQSASDYASDGRLKRSSDDDGERCHCSKKKRKASWRARRRIRVPAISSRNADIPADDYSWRKYGQKPIKGSPYPRGYYKCSTVRGCPARKHVERDPGEPAMLIVTYDGDHRHGEPGHRRPDEAATTTEHRTTDQTTGRLL

SEQ ID NO: 163118 - protein, 59 aa, Oryza sativa
  Clone ID: PAT_MRT4530_62142C.1.pep
MVCILWLHEICFLMEVLQLKIPMYLSMGNYIYLILKTSILLHPRNLLVILYYLCFCCFG

SEQ ID NO: 163119 - protein, 65 aa, Oryza sativa
  unsure (1)..(65): unsure at all Xaa locations
  Clone ID: PAT_MRT4530_62145C.1.pep
IMVNRIIYREFIKTSXKIELSQNRQKSDGSSXXFCLKEQXXIDHYLFFXXINNXIQLSGHTSXFS

SEQ ID NO: 163120 - protein, 228 aa, Oryza sativa
  unsure (1)..(228): unsure at all Xaa locations
  Clone ID: PAT_MRT4530_62146C.1.pep
FCQIICNFVEISGDPFDVNFPSLQKFCEALEYSDQYNQLFGCXVGNFPFRYLDISINYRKLRNTEXERSSXRFERKLSSWKRKLLSLGGRLTLINSVLSSLXCIMYMMSFLAIPSGVLKKLNYLXSRFYWQGDGYKKKYRLAKWDIICRPXRTGGLGIHDLEVKNKVLISKWLYKLLXTDGIXQQLLRYKYLGSQPLSQAYWKAGDSHFWASLIKVKQDFFRFGSFKI

SEQ ID NO: 163121 - protein, 98 aa, Oryza sativa
  unsure (1)..(98): unsure at all Xaa locations
  Clone ID: PAT_MRT4530_62147C.1.pep
NVSESQKHKMKVRPKKGGLGSLLYNRMPNQKHFGQTYLLAVYILLVFIVGTSHILKKRFCYVPPFWLKWXPPSKMPISSGFHHLSWXPYXIESISILG

SEQ ID NO: 163122 - protein, 44 aa, Oryza sativa
  unsure (1)..(44): unsure at all Xaa locations
  Clone ID: PAT_MRT4530_62148C.1.pep
GRLLACISSRPGXXGRADGYILGGKXLXFYMKKLXXKKGKGAXA

SEQ ID NO: 163123 - protein, 69 aa, Oryza sativa
  Clone ID: PAT_MRT4530_62149C.1.pep
NRDLFNSTISCIECCFILILLGLCVVYLAVYRARISGLFFDRGNSSYLTGAIISKTLGPIARQVTTHPP

SEQ ID NO: 163124 - protein, 212 aa, Oryza sativa
  Clone ID: PAT_MRT4530_6214C.1.pep
MASSKPILYGAWISSCSHRIRIVLNLKGVDYEYKSVNPRTDPDYEKINPIKYIPALVDGDLVVSDSLAIALYLEDKYPQHALLPKDLKKKALNLQIANIVCSSIQPLQGYAVIGLHEGKLSPDESLQIVQHYIDKGFKAIEKLLEGSNFKYATGDEVQLGDVFLAPQIHAGINRFQIDITKYPNLARLHDTYMEIPAFQAALPKNQPDAPSC

SEQ ID NO: 163125 - protein, 199 aa, Oryza sativa
  unsure (1)..(199): unsure at all Xaa locations
  Clone ID: PAT_MRT4530_62150C.1.pep
MADPIAKALIAFALLASLLLCLQASSDVPFIVAHKKASLNRLKSGAERVSVTIDIYNQGTSTAYDVSLSDDSWPSDAFDVISGSTSKSWERLDAGGIISHTFELEAKSKGVFAGEPAVIKFRVPTKAALQEAYSTPILPLDVLSDRPPEKKFEWAKRLLAKYGSLISVISIMVLFIYLVASPSKSSAXGSKKKPLSWAN

SEQ ID NO: 163126 - protein, 274 aa, Oryza sativa
  Clone ID: PAT_MRT4530_62151C.1.pep
MEKLTSSEPLDPLSHEASIGSSSRVWTVGDEEFLHMSNFAKLPDLNKDDMERERYYTNLINDESNHFGSSEMGSQYDDEQEPVVNENVAHVQASLMYKKKEEKKFQFMHCYNVLKNLPKWNDKRNQLAASKTSSKKQKKTANDSPAISTPACNVDENWAADPENTVGEGRPMGRKKAKQQMCERSDLSRKESLDYLWDKKKEADAEERKFEERYQIAFALEQKRIDLERDKFEFKRMIKEDKLLRTDTSAMSIEEQEYYKNVKNQILSHRSAQA

SEQ ID NO: 163127 - protein, 89 aa, Oryza sativa
  Clone ID: PAT_MRT4530_62152C.1.pep
MYIQGFTVGIFGYWRCALATSRVWGDRQKGLDGLEGEGYLPWPIWLGKKGELVVRMLLCAGGAASSATIDQLLMHGSRWKKYADAVIHL

SEQ ID NO: 163128 - protein, 310 aa, Oryza sativa
  Clone ID: PAT_MRT4530_62153C.1.pep
MEKLTSSEPLDPLSHEASIGSSSRVWTVGDEEFLHMNNFAKLPDLNKGMSAVCADVIHCGVYPAFMSRNDMERERYYTNLINDESNHFGSSEMGSQYDDEQEPVVNENVAIQNRNQSGVNHEDMHVQASLMYKKKEEKKFQFMHCYNILKNLPKWDDKRNQLAASKTSSKKQKKTANDSPAISTPACNVDENRAADPENTVGEGRPMGRKKAKQQMRERSDLSRKESLDYLWDKKKEADAEKERKFEERYQIAFALEQKRIDLERDKFEFKRMTKEDKLLRTDTSAMSIEEQEYYKNVKNQILSRRSAQA

SEQ ID NO: 163129 - protein, 49 aa, Oryza sativa
  Clone ID: PAT_MRT4530_62154C.1.pep
RRQRSEPGGSRSGVGGRRGGAGVADDGRGGVGGVGGREAGGGAGGGGGV

SEQ ID NO: 163130 - protein, 866 aa, Oryza sativa
  Clone ID: PAT_MRT4530_62155C.1.pep
MSLFDGLLPLLLIVFTMTPVIQASNRTTSLPSAATLAGCQRSCSNLTIDYPFGIGSSHCSRQPDFELICNNTTQPPRLLFKNGTTEIIDSPSTEYLDVMFSHSISMKSNVSVYNMSWDAPGKSFTLGYARLNITGCDFDIYQVLDQSGNVPAKLCNVTCPNRGITEDIARQDCNGTGCCSIDVPIRAQTLQLMFVRHGKGAVELDAQSNQSSLWSTINVTTVYAVILWRILDQPTCASTFDNRTNYACISEHSKCMDGYFAPILGYNCLCDGGYQGNPYILDGCSRDRGYNPFQQKDVCDRKCGSIDVPYPFGLEEGCAARKSFQLNCTNMLSSSLQLNDEYHVTYINVSNGLMGVEDTTDYKQYMYGMRVTQEPQLYIGSGESASVQWAVANLTCLEAQQNISGYACVSINSTCLGVNSTDDYIGYRCSCTLGFQGNPYIQDGCQGVVIGLSCGFSILLLSLGIMLLIHRWKKDIQKQLRRKHFQKNQGLLLEQLISSDENASENTKIFSLDELEKATNNFDPTRILGHGGHGMVYKGILSDQRVVAIKRSKHIEEGEISQFINEVAILSQINHRNIVKLFGCCLETEVPLLVYDFIPNGSLFGILHSGSNNGFSLSWDDCLRIAVEAAGALYYLHSAASVSVFHRDVKSSNILLDANYTAKVSDFGASRLVPIDQTHVVTNVQGTFGYLDPEYYHTGQLNEKSDVYSFGVVLVELLLRKEPIFTRVSGSKQNLSNYFLWELKVKPITEIVAAQVREEATDEEIESVASLAQMCLRLRSEDRPTMKQVEMNLQFLRTKRLNSCPDALDKAEEMQPLLCTRSEASCASLAINLGDSYNPESQSSHKCYSLEQEFSSSVGLPRSRQV

SEQ ID NO: 163131 - protein, 390 aa, Oryza sativa
  unsure (1)..(390): unsure at all Xaa locations
  Clone ID: PAT_MRT4530_62156C.1.pep
MGVSLVLLGTWPVVLAVLERRGRLPQHTYLDYSITNFLAALLVAFTFGQIGADPPQTPNFLTQPSHLLVNWPSFFCLFSGSGEIMYLVKDIGGAIALMGVSLVLLGTWPVVLAVLERRGRLXPQHTYLDYSITNFLAALLVAFTFGQIGADTPETPNFLTQLTQMQDNWPSILFAMSGGIFNGLGTLATQYGWAFVGLSVTEVMASSLKVVIGTTLNYFLDGRINKAEIPFPGXLFPPAFNLATIYWWHTLGGCVPDKVVXWAVYYFSHACFTIGIALNIRFLYHPMVGVPRSSLTAYLKDWKGRDLALVAGMVCGLGNAFQFMAGQAAGYAAADAVQALPLVSTVWGIVLFGEYRRSSRRTYTLLGSMLFMFVVAMVILMASSAHRRPL

SEQ ID NO: 163132 - protein, 154 aa, Oryza sativa
  unsure (1)..(154): unsure at all Xaa locations
  Clone ID: PAT_MRT4530_62157C.1.pep
ACWELLLQTAFITANTLAFSCSLLATVSLLYSGMPSREISIRYVYQSLSLVMMRSSATSLVAAFALGMYVVLAPVALTMAKSVCAITFLSFLSACMEVRRPLIVAXSVRIRVGIWAARYQAAPVLKFIGKRFWSYVIIFGLPAVLKIRGTHDFV

SEQ ID NO: 163133 - protein, 78 aa, Oryza sativa
  unsure (1)..(78): unsure at all Xaa locations
  Clone ID: PAT_MRT4530_62158C.1.pep
MRGNHHEARQPKPTTYAVSYCRIRLNRLTPSNSNSVDPSRSRFGLXPIFTLFPGQSLSRFPSRFLLHIRYLDYQIWSL

SEQ ID NO: 163134 - protein, 269 aa, Oryza sativa
  Clone ID: PAT_MRT4530_62159C.1.pep
MITHVKSALLSGHRGPHHLAASAAAAASFHSTPPLQRKRKTQWHHGIMHAKIEEFIVSARRFSYYEKRRRNRESKRTMLRNMSEYAEYLFQSWRDEDDKNDESSGPSWFRGHRWVRNPKNNGFRPHDFYFGNFRSRGGFEFCTSDEDEPETVFRNAFRGQQTFYWSFDSDDFCQRNHRRSHSESSRRWSYETDDEDETPAQTEVSLARQALGLSTSGPLKLEDVKSAYRTCALRWHPDRHNGSTKATAEEKFKHCSAAYQTLCDSLASA

SEQ ID NO: 163135 - protein, 52 aa, Oryza sativa
  Clone ID: PAT_MRT4530_6215C.1.pep
MPPDFMVETILDIVLKLRESSWRLGALKGQRRRGGEGKKACRLNCSLTEEMG

SEQ ID NO: 163136 - protein, 63 aa, Oryza sativa
  Clone ID: PAT_MRT4530_62160C.1.pep
HDYPYSSGYRGSDDIGPIDSYASYGSSQVFGGGYGAYGGYSGRSGSSGLSGPSSFSYGKRHGY

SEQ ID NO: 163137 - protein, 542 aa, Oryza sativa
  Clone ID: PAT_MRT4530_62161C.1.pep
MVGPGHRNSHGKRHSDYAENGGGKRRNPGDDTYAPGPDDTVYRYLCPSRKIGSIIGRGGEIAKQMRADTQAKIRIGESVSGCDERVITIFSSSRETNTLVDAEDKVCPAQDALFRVHEKLSIDDDIGNEESDEGLAQVTVRLLVPSDQIGCIIGKGGHIIQGIRSDTGAHIRVLSNENLPACAISGDELLQISGDSTVVRKALLQVSSRLHDNPSRSQHLLASSMTQPYPVGSHLGSSSTAPVVGITPLISSYGGYKGDVAGDWPSIYQPRREESSAKEFSLRLLCAASNVGGVIGKGGGIIKQIRQESGAFIKVDSSNTEDDCIITVSAKEFFEDPVSPTINAAVHLQPRCSEKTDPESAIPSYTTRLLVSTSRIGCLIGKGGSIITEIRRTSRANIRILSKENVPKVAAEDEEMVQISGDLDVVRHALLQITTRLKANFFEREGALSGFPPVIPYHPLPVGVSEGPKYLGRDTKPLGHDYPYSSGYRGSDDIGPIDSYASYGSSQVSGGGYGAYGGYSGRSGSSGLSGPSSFSYGKRHGY

SEQ ID NO: 163138 - protein, 86 aa, Oryza sativa
  Clone ID: PAT_MRT4530_62162C.1.pep
MDDLSPAATDAEQWSNYFNDAYQAATATQGGALLGRCLYNGGGGDGKDVDDAVQFLDVHSLSNWRMGAPRRSLPQPAGARPRVGGW

SEQ ID NO: 163139 - protein, 136 aa, Oryza sativa
  Clone ID: PAT_MRT4530_62163C.1.pep
MMPLRGLEECGLVRETGFVWMRQKAPYEHYFRGTGTRVRYDVEVTAFVEEGRMKRMTGVRRGRLMLWVPIVEMSLDGADRVYFKSNVGIGRSFPASAFADETAAAAAFLRKPTPPPPPPRKKPPPQPPPSRPTSDR

SEQ ID NO: 163140 - protein, 99 aa, Oryza sativa
  Clone ID: PAT_MRT4530_62164C.1.pep
MEPSNIAGAKKFQKPNLAKTLASIPIPLELAATVTVAAHPRAHRSSRGQWRRCRIYCPRAPPSPLLGLRATLLDPPPKPTKQEWQGGRVGRGKWEGGGG

SEQ ID NO: 163141 - protein, 143 aa, Oryza sativa
  Clone ID: PAT_MRT4530_62165C.1.pep
HASEDKLLPRIEFLESLGLPSRAARSMARRFPALFYYGIDGNMRPKAEYLLGDMARDADDLFEFPEYFSYALATRIAPRHEACAARGVRMPLPAMLRPGDDKFRATLAGCVGSTPPRRRSPLWHAYWVDDAGEVEEIGAASQP

SEQ ID NO: 163142 - protein, 95 aa, Oryza sativa
  unsure (1)..(95): unsure at all Xaa locations
  Clone ID: PAT_MRT4530_62166C.1.pep
IDHQEQNRGRDGYNXGSCDIYTRNHRTSTXMYPMPTRQHHASXLFKLSEKRQCVPSAXNRFITEEIQXRIKTSNPETSHREAFKCMLQRSWAHIS

SEQ ID NO: 163143 - protein, 246 aa, Oryza sativa
  unsure (1)..(246): unsure at all Xaa locations
  Clone ID: PAT_MRT4530_62167C.1.pep
HELMIRRRPESRGILVNTFESLETRGSRALEDGLCVPGRATPTVYSXIGPMVSGGGGSDKDHDCLRWLDAXPDNSVAFLSFGSLGRFCKKQLEEIAIGLQKSEKRFLWVVRIPRIYEKNVSEPLAEPDLDALLPAGFMEETRGRGLVVKLWAPQVEVLRHRATGAFVTHCGWNSTLEGITAGLPLLCWPLYAEQRLNKVFVVEEMKLGVEMRGYDEEVVVAEEVEAKVRWVMESEGGQALRQRAPL

SEQ ID NO: 163144 - protein, 627 aa, Oryza sativa
  Clone ID: PAT_MRT4530_62168C.1.pep
MVPLYVAMILAYGSVKWWRIFTPDQCSGINRFVALFAVPLLSFHFISTNNPYTMNLRFIAADTLQKLIVLALLTLWSHLSRRGSLEWTITLFSLSTLPNTLVMGIPLLKGMYGEFSGSLMVQIVVLQCIIWYTLMLFMFEYRGARILITEQFPDTAGAIASIVVDADVVSLDGRRDMIETEAEVKEDGKIHVTVRRSNASRSDVYSRRSMGFSSTTPRPSNLTNAEIYSLQSSRNPTPRGSSFNHTDFYSMVGRSSNFAAGDAFGVRTGATPRPSNYEEDAAAPNKAGSKYGQYPAPNPAMAAPPKPKKAANGQAKGEDGKDLHMFVWSSSASPVSDVFGNGAEYNDAAAVKEVRMAVASPRKADGVERDDFSFGNRGVAERDAEAGDEKSVAAAVSGEHGKPGLTPAPTAMPPTSVMTRLILIMVWRKLIRNPNTYSSLIGLIWSLVCFRWNFEMPAIILKSISILSDAGLGMAMFSLGLFMALQPRIIACGNKVATFAMAVRFLTGPAVMAAASIAVGLRGTLLHVAIVQAALPQGIVPFVFAKEYSVHPDILSTAVIFGMLIALPITLVYYILLGLWKKTELVHCLQSQDSLIFLFFSVFLEVEFGRRGIGRESNESRGGQDGS

SEQ ID NO: 163145 - protein, 605 aa, Oryza sativa
  unsure (1)..(605): unsure at all Xaa locations
  Clone ID: PAT_MRT4530_62169C.1.pep
MITAADFYHVMTAMVPLYVAMILAYGSVKWWRIFTPDQCSGINRFVALFAVPLLSFHFISTNNPYTMNLRFIAADTLQKLMVLAMLTAWSHLSRRGSLEWTITLFSLSTLPNTLVMGIPLHIGMXSLGGHRIGDLSGSLMLVLGGDCGSFGWLLLLLTLCKPRRPILTRDRPCFHRLVELLTTTXNDDVSHDCRREENEKKKTETEVKEDGRIHVTVRRSNASRSDIYSRRSMGFSSTTPRPSNLTNAEIYSLQSSRNPTPRGSSFNHTDFYSMVGRSSNFGAADAFGVRTGATPRPSNYEDDASKPKYPLPASNAAPMAGHYPAPNPAVSSAPKGAKKAATNGQAKGEDLHMFVWSSSASPVSDVFGGGAPDYNDAAAVKSPRKMDGAKDREDYVERDDFSFGNRGVMDRDAEAGDEKAAAAAGADPSKAMAAPTAMPPTSVMTRLILIMVWRKLIRNPNTYSSLIGLIWSLVCFRWNFEMPAIVLKSISILSDAGLGMAMFSLGLFMALQPHIIACGNKVATYAMAVRFLAGPAVMAAASFAVGLRGTLLHVAIVQAALPQGIVPFVFAKEYSVHPSILSTAVIFGMLIALPITLVYYILLGL

SEQ ID NO: 163146 - protein, 273 aa, Oryza sativa
  unsure (1)..(273): unsure at all Xaa locations
  Clone ID: PAT_MRT4530_6216C.1.pep
VGDNDFFKSCWEMFAPSPTGTEWGTQALQCLPXDPLTRKSYSKVFWLTMRTPLHPRSRPLPRNLWSVKSGIRIPLRFNLDPRDLLSPTTLGSRWNNERRFRSSLYDPSRGKAEWESRNRGNLGVGQSTGMEKGLYGVLGWMKEATTPLVHFNAHEFYISAVSEAIALNSASALERDTAVCFLVFQRSGGAEEFIVEKGRALANPSIPTLEKKHFLLIVHLFGERSTSLIRDSEMIVISRHILWADVAPRKTRIVVSLAFVDGTNAPVYALQGN

SEQ ID NO: 163147 - protein, 87 aa, Oryza sativa
  Clone ID: PAT_MRT4530_62170C.1.pep
ARSSPRQLQVVGCCLLLLLLLLLVLKSPREFVLCREQRAAISPESFVGGGDELITRCALSDSVGFLSDARARRCPPPLCLICFRCCC

SEQ ID NO: 163148 - protein, 552 aa, Oryza sativa
  Clone ID: PAT_MRT4530_62171C.1.pep
MEEELCGNNWDLDAVVRLGCCRRRISPAAVAQQVDPFASFLQQGVAMEVAAEKEVGVEAAWSFPELTVRDGGGGGLGRDADELLKAFCAAFPSSSSSKSSPLPTPPPPPPTQPQPEQQKPVTVQENLPAPTTAPARASQTAAARQVPAGGVPRSKRRKNQQKKVVRHVPADGVSADVWAWRKYGQKPIKGSPYPRGYYRCSSSKGCPARKQVERSRSDPNTFILTYTGEHNHSAPTHRNSLAGTTRNKLPSSSAASAASAQPQPPPPSVVVVGAGGGGAEAAGLSPTTPLRTPSMEEDEEEEEEEELLVEDMEMAGEDELLFLNGGDDNAALDGTPIRGALLFLALPFSVQQPNLSACSSLGMFDWDLNSHHSSLFLHPQLLMVGDDGGIADVASLGDGNAITTEDDGGGADPVRGDGGGGGCSDAVRGGGSGSNVARGGGGCAVAASGGNDCTVVAYVGVGGVSLGGWIWDPSSSLSPGSGIHAGCAIRVELKLLRFNGELRGEVWLSPFLWRRPKGINGSSSGLHAKGDPRLQLSWLCRCSLSIRAFCTV

SEQ ID NO: 163149 - protein, 55 aa, Oryza sativa
  Clone ID: PAT_MRT4530_62172C.1.pep
MGAMGKLRVFVVQEPVVAASCLIAGFDRGTLEWNLPDSEPSVMARPGSPGAFTRP

SEQ ID NO: 163150 - protein, 119 aa, Oryza sativa
  Clone ID: PAT_MRT4530_62173C.1.pep
MWVVTTIGDRAIVEVDRRGARRTQPLAMSSDMAWTVEDAAISDELRRGAWMTERTRPPPLSSDVAWTVEDAAAGDELRRETWTMGPPATMPWCPAPGAAPASQTPRRPPTSRISHRRVA

SEQ ID NO: 163151 - protein, 48 aa, Oryza sativa
  Clone ID: PAT_MRT4530_62174C.1.pep
AHLSNSHMVYTYFLLLHYPGSTITQRCLHELLILSSLDTPYHAIINAL

SEQ ID NO: 163152 - protein, 63 aa, Oryza sativa
  Clone ID: PAT_MRT4530_62175C.1.pep
MDWIGVQATVPIHPSIHPNPSPLQPDLARRHGNGPNATRASVRLHTFFSLKGSGAQTLRLAQR

SEQ ID NO: 163153 - protein, 58 aa, Oryza sativa
  Clone ID: PAT_MRT4530_62176C.1.pep
FGLILFLNKFKKFITKIIERHNYIFNTKCTITIYSTLHLVKLIWCYRCIFFFCKFDQI

SEQ ID NO: 163154 - protein, 50 aa, Oryza sativa
  Clone ID: PAT_MRT4530_62178C.1.pep
KRLLDDPVMSLKLIVRANFLQKLIYLYTKHKCIAWKEKKKGLTPFFFFIL

SEQ ID NO: 163155 - protein, 772 aa, Oryza sativa
  Clone ID: PAT_MRT4530_62179C.1.pep
RAKCRDNTRRRHSWPCHSRRTCCRCSAHGATTPTAAGPGPAARPPSSSWSLCLYSGARGCHGSRGGGPPDPRGEPSCSGAALGRLGLGRRKPMTKLLHSACLLICISGAIGLAAAAAGHPGCQTRCGDVDIPFPFGIGDHCAIHEGFRLECDNATKGTSNQKPFWGDFEVIKISMEDGKVWVKAYMSRQCYDQSTGGMSYSDASANLSGSSFWLSDTDNKITVIGCKTLAYMTTDSYVIGCSSACDNKVNKLTPKNGSCSGAGCCQANVPKSIQYYQGYFNEGYNTTKIWMSSPCSYMAVMETAAFNFSTSYLTSSVFYDTYKGGVPVVYDWAITSKTCTESRRNKTSYACISNNSQCIDNLTNAQGYRCKCSNGYEGNPYIKDGCKDIDECLNNATYPCKGICTNTLGNFTCSCSPGSYMMNGDCMPKKKLRFDSVPVVVELQEATNRFNEQQILGQGGHGTVYKGLLKGNMEVAVKRCMTINEHQKKEFGKEMLILSQINHKNIVKLLGCCLEVEVPMLVYEFIPNGTLFDLIHGNHGQQISLATRLQIAHESAEALTYLHSCASPPILHGDIKSSNILLDRNLIAKVSDFGASILAPTDESQFVTLVQGTCGYLDPEYMQLCQLTDKSDVYSFGVVLVELLTCQKAFNLNAPEHEKSLSMRFLNAMKNNKLADILDDQIKNSENMPFLEEIAELAAQCLEMSGVNRPSMKHIADNLDRLRKVMQHPWAEQNSEELESLLGESSMVSSRYTSTGNFSIERKGVMELDSGR

SEQ ID NO: 163156 - protein, 110 aa, Oryza sativa
  Clone ID: PAT_MRT4530_6217C.1.pep
MAVLTSPSRDSSGLADVYWLNMSSTLTASQSAWTRGSRNCHRPLVTGTARPLHGARSPLRRSKPAVQAGRPRRRRRLDDPADDGQSKHVAPVEVEPQQDRPTPDEKSKRA

SEQ ID NO: 163157 - protein, 58 aa, Oryza sativa
  Clone ID: PAT_MRT4530_62180C.1.pep
SLSVLTTHRCYYCFVFFPITELYSSVENIAYCSETVLLGSKGIIKGTRQCYVSFSRGG

SEQ ID NO: 163158 - protein, 89 aa, Oryza sativa
  Clone ID: PAT_MRT4530_62181C.1.pep
LLLFSFFFPVGVFFSFWRNVMFYDALYGCIVRGSAESVTEFSVPCTYIYGHIVLLLIVSSTVTGEVSQKEHWNLYCLVCGQNINKKKRE

SEQ ID NO: 163159 - protein, 94 aa, Oryza sativa
  unsure (1)..(94): unsure at all Xaa locations
  Clone ID: PAT_MRT4530_62182C.1.pep
MRECISIHMRHRGIQACNSCWKLYWTQTGINADGHIPTDTTAAGREQTXHTFLTESGAQDHIPRTGSYDLHHTETDEARTGXYQQLFQHEPVIN

SEQ ID NO: 163160 - protein, 147 aa, Oryza sativa
  unsure (1)..(147): unsure at all Xaa locations
  Clone ID: PAT_MRT4530_62183C.1.pep
MKIGDSSNSGAAVERVIANSGAVELPLLTRTNYHEWSLVMRVSLEALGLWDTVEKDKLEHREGRARCEEVAKEARAAVEKMRVGDDRAKSASMQRLLKEFKNVAFHDGESVDDFAMHINGLVASLAQXGEAMEDSHVVKKILARGPQ

SEQ ID NO: 163161 - protein, 156 aa, Oryza sativa
  Clone ID: PAT_MRT4530_62184C.1.pep
MALGARHPPSSKKTTTNFKTNRNNINTYQCKNTDQLQNQPQQHQHTPTQEHRPQHSRPRVKLSQNRLKIEDKHNTQWSRSSTPQDHGERNETARTRRAAATSNSITNTNTWTLKKRRNLTVVLEQRKAEEEEEEERVGERSNQALTSPRFRCACDL

SEQ ID NO: 163162 - protein, 778 aa, Oryza sativa
  Clone ID: PAT_MRT4530_62185C.1.pep
MSLAAPVETGSKATARHRSPFSLQACSEGAARQESERPPARTWRPDRGCRRWRLSREQTASREEARQVSVELAHLSKADIAAVPKYGTPTPIPMHALHANLGCDDQLRHAKRLISPSDMLISKGGDFALGFFSPATSNQSLFLGIWYHNISERTYVWVANRDDPIAASSSATLSISNNSALVLSDSKGRTLWTTMASPNSMVTEDDGVYAVLLDSGNLVLRLSNNTTIWQSFDQPTDTILPNMKFLVRSYGQVAMRFIAWKGPDDPSTGDFSFSGDPTSNFQIFIWHETRPYYRFILFDSVSVSGATYLHNSTSFVYKTVVNTKDEFYLKYTISDDSPYTRVMIDYMGNFRFMSWNSSLSSWTVANQLPRAPGCDTYGSCGPFGYCDLTSAVPSCQCLDGFEPVGSNSSSGCRRKQQLRCGDDHFVIMSRMKVPDKFLHVQNRNFDECTDECTRNCSCTAYAYTNLTATGTMSNQPRCLLWTGELADAWRDIRNTIAENLYLRLADSTGSNSTVNRKKKRHMVGTLEDGKEIAVKRLSKCSEQGMEQFRNELVLIAKLQHKNLVRLLGCCIHGDEKLLIYEYLPNKSLDKFLFNHTTEATLDWLTRFNIIKGVARGLLYLHQDSRMKIIHRDLKASNILLDGEMNPKISDFGMARIFGGNEQQESTRRVVGTYGYMSPEYAMEGTFSVKSDTYSFGILLLEIDSPNARPLMSFVVSMLENEDMPHPIPTQPIYFVQRHYESEEPREYSDKSVNNEELIYVQKLNRYSSNRIMIRDPHK

SEQ ID NO: 163163 - protein, 121 aa, Oryza sativa
  Clone ID: PAT_MRT4530_62186C.1.pep
SQQSGHPTVHNTLPNPQLRRRLPAEILQDMLLMPELTPPSLMPALMLVSMLVTIQEDKLVDEMVVSKLEDKLNDMLKNNSKIEIIVETIGEPNEDYNDEDDDDDDDNDDEYDGDYYEHETD

SEQ ID NO: 163164 - protein, 96 aa, Oryza sativa
  Clone ID: PAT_MRT4530_62187C.1.pep
SKIPLGPHVRSISYLSPHLSLFSRAASRRLFPARRSQPGPPLVAAGRRASRPACTIAGHVLPVCVAADELFLRSRPSFHKSVPPPVLLARLPMSFS

SEQ ID NO: 163165 - protein, 653 aa, Oryza sativa
  Clone ID: PAT_MRT4530_62188C.1.pep
MAERRKRRRGRHGGEAQHPAHVAGADGGHRISLPPTPPLSPPRLKTTMTSSGAMAAMESRRLGAEGQSRRRRVGGQRGRPHAPPAPPRSNSPVATDASPCALANLHQRERERDLGRQEEKWGTKCKYVATLDRHRSEEWMRERVDRLKMQVGCKILKTINVPYTVMLVDVLERLHIDNHFRDEIATALQHVFHHDEQQKAAAGFDDGDQLYLESLRFRLLRQHGFWVSADVFDKFKDSTGCFRESLSTDARGLLSLYNAAHLAMPGEAALDDAIAFSRRSLQSLQGALRSPMAKQVSRALDIPLPRAPKLLETMHYITEYEQEAAHDGMVLELARLDFELVRSLYLKELKALSLWWRQLYDSVQLSYARDCLVESYFWTCAMFHGEDYSRARIIFAKVFQLMTMTDDIYDIHATLEECYKFNEAVQRWDKSAVSILPEYLRNFYIRILNDFDEMEDSLEPDEKHRMSYVKSSFKQQSEYYLREAQWSSDKHMPSFAEHLDVSFMSIGYPTMAVVVLLCARDGDGAAASMEASEWAPSLVRAGGEVTRFLNDIASYKTGKSGKDAASTIECYMAERGVGGEEAVAAVAALVESAWRTINRACVEMDPNLLPAARLLVNLATTPEVIYFGGRDGYTVGADLKGLVTALFLDPLRV

SEQ ID NO: 163166 - protein, 101 aa, Oryza sativa
  Clone ID: PAT_MRT4530_62189C.1.pep
SFHVYLCLLLSHDASMGLNSSSVLITREDNEIKIRNHLFGCIKLTSLSCSKILCSNQCLNYRLADWAQELGIFIELSFYFIAYISPHTMETVIQFHLYHYT

SEQ ID NO: 163167 - protein, 281 aa, Oryza sativa
  Clone ID: PAT_MRT4530_6218C.1.pep
MVAAGVVVLDGGGGWSWWLCASMMGNRSSGGGFTLPLWSQRVVKIPDLSYLGGDGGGSSGGCWRCPACVWAHAGGGNYVALGVVAVVVSLRCTCAGGGDGVYAALGVAAVIVSLRRACAGSGDSVCTALGAAAVVVSLRRAPVVCCAPACAAPVAASASVGSSHGWLDDDNLLQVTSFLAIVVLTARHKSIGNLSNAPLLMQVDPLLLKNVENLAKRQLLRDLTKSPLLEACHAGLRPKLPKPLYRRSTGQRPRRSPRAKPGRFAIMPKGLAVKSSLRMKL

SEQ ID NO: 163168 - protein, 68 aa, Oryza sativa
  unsure (1)..(68): unsure at all Xaa locations
  Clone ID: PAT_MRT4530_62190C.1.pep
YLFQRFHVFXAVIXLNHVLCFYLLSSNVSCIQRNLSGWYHTTIHDVKCTVGHLCDVRYICSATSHLKG

SEQ ID NO: 163169 - protein, 104 aa, Oryza sativa
  Clone ID: PAT_MRT4530_62191C.1.pep
MNTLQCCWLAALPFELVTNSSAFRLEKDCLVLRCALVLLIVASSEVWSVQGEDCWNVDNVRYLVCTHTHKCRETCQDHGNVDGRCKWGCSHLWPICECLPPNFQ

SEQ ID NO: 163170 - protein, 146 aa, Oryza sativa
  Clone ID: PAT_MRT4530_62192C.1.pep
MASGTAAAAPGGKEGEPVALWEWALATGGAWPDLVSPARSGQSRRQQRLVGSRAAANGDMGRQRWWSAARGDLSGLWQQARKRLEGGEFVLYCRPSILFSTGLIPFYGPSASVLVVGMAAMGHLDDNDTIRYRSASWRRYYGVEPS

SEQ ID NO: 163171 - protein, 609 aa, Oryza sativa
  Clone ID: PAT_MRT4530_62193C.1.pep
MAASTMKHLVQVGEAREAAEEDGGAPSAGPAYRCAYGGGAASPPAVPGLECCWDIFRMTVERCPDNKMLGRREIVDGKAGKYTWITYKEAYDTVIKVGASIRSLGVGKGGRCGIYGANCPEWVISMQACNAHGIYCVPLYDTLGAGAVEFILCHAEVEIAFIEEKKIGEVLKTFPNATKYLKTIVSFGKVNPEQKEKVEQNGVSIYSWEEFLQLLREDDVYISYLPLAHIFDRVLEEVFIHHGASIGFWRGDVKLLVEDIGELKPTIFCAVPRVLDRIYGGLQDKVSTGGFLKKTLFNVAYKYKQGNMVKGSKHEEAAAMFDKLVFTKVKRGLGGRVRLILSGAAPLSNHVEEYLRVVTCSLVLQGYGLTETCAGSFVSLPNNMSMLGTVGPPVPYVEVHLESVPEMGYDALSKESPRGEICIRGDTLFSGYHKREDLTKEVLVDGWFHTGDIGEWQSDGSMKIIDRKKNIFKLSQGEYVAVENLENIFGQAPGVDSIWVYGNSFESCLVAVVNPNKQALERWAESNGVTGDFATMCEDPKAKEFILGELTKTGKEKKLKGFELIRAVHLEPVPFDMDRDLITPTYKKKRPQLLKYYQNVIDSMYKNMK

SEQ ID NO: 163172 - protein, 589 aa, Oryza sativa
  Clone ID: PAT_MRT4530_62194C.1.pep
MALSCMRCSPAAGAVRRGLASAAPPAALSFARCGLRRAAALGWRVAAVATTGVQGAKDAGLEKAARSASQSKVENGSPSEIILDDFEDLSPLSENDDSTVSITVVGASGDLAKKKIFPALFALYYEDCLPKHFTIFGYARSKMTDAELRNMVSKTLTCRIDKRENCNEKMEEFLKRCFYHSGQYDSEEHFMDLDKKLKQHEGSRVSNRLFYLSIPPNIFLDVVKCASKSASSGNGWTRVIVEKPFGRDSDSSSALTRGLKQYLVEDQIFRWIDHYLGKELVENLSVLRFSNLVFEPLWSRQYIRNVQLIFSEDFGTEGRGGYFDRYGIIRDIMQNHLLQILALFAMETPVSLEAEDIRNEKVKVLRSMKPLQLEDVVIGQYKSHTKGGTTYPGYTEDKTVPKDSVTPTFAAAALFINNARWDGVPFLMKAGKALHTKGAEIRVQFRHVPGNLYKRSFGTDLDTATNELVIRVQPDEAIYLKINNKIPGLGMRLDRSNLNLHYAARYSKEIPDAYERLLLDAIEGERRLFIRSDELDAAWELFTPLLKELEEKRIAPELYPYGSRGPVGAHYLAAKYNVRWGDLTTEQKA

SEQ ID NO: 163173 - protein, 119 aa, Oryza sativa
  unsure (1)..(119): unsure at all Xaa locations
  Clone ID: PAT_MRT4530_62195C.1.pep
SRSRRGRPPSSPPPRPALPHLLLPRSCFSHSDQLPEPPSEPTLAPSPPPEPTSTSARGRPSSSPPPRLSSSRTSPRPHCRRYATSSPEPPPYRSSPXSDPYKSPPPPSPVAPLSLSLCP

SEQ ID NO: 163174 - protein, 167 aa, Oryza sativa
  Clone ID: PAT_MRT4530_62196C.1.pep
AAAETARFSSSLTPPSVLAGATPHCRRSHPPRSLLLLPAAAATPRPSRSRRGRPPSSPPPRPALPHLLLPRSCFSHSDQPPPEPTLAPSPPPEPTSTSARGRPSSSPPPRLSSSRASPLPRCRRYAASSPEPPPYRSSPTRTRTNLRPPPSPLAPLSLSSPATPSPP

SEQ ID NO: 163175 - protein, 84 aa, Oryza sativa
  Clone ID: PAT_MRT4530_62197C.1.pep
PLHHCARPQHHPYFSSIGSSDPLSPSIYKRRRGAMRVDLTYELRATASWFAVETALCRRGGRRRRRRRTRASVSSRACHGLEER

SEQ ID NO: 163176 - protein, 152 aa, Oryza sativa
  Clone ID: PAT_MRT4530_62198C.1.pep
MVRTPERSYSCSSAKEVAYSCGYCGYALNLSSSTRNTANIGSKYGKQIRKGVISFFAIDESRFTQTDEVSCMPYFHSRRSWGLFRKRTRLICRKCGGRIGNAYEDEDSTLYDGSDDLHMSSEGYSMSSGKKYVIKINALQPSTDDSGVPFTL

SEQ ID NO: 163177 - protein, 219 aa, Oryza sativa
  Clone ID: PAT_MRT4530_62199C.1.pep
MAAAAGDATAAAQEKGRASAVGALGGVGGSATGGSAADGTAATQEKGRASAAGVLGEGGGSEAAGTLRVPQGPPPGRLLPRLGLLRAGGGRPTKERLGAWFGGKTCLYRGPMRLSSSQQNNMIKVGSDIRGCLGEAGIIRCRPSSFLTLDRPREGDVDTSNSTLTVAVTVPLSLDRPHEAMRTSARRGLSCHYRPSSLVARSEHRLKVLTERGLSPPRF

SEQ ID NO: 163178 - protein, 93 aa, Oryza sativa
  Clone ID: PAT_MRT4530_6219C.1.pep
GTGLCFKEEQRSSAVRIPCEKVTRVRILGDQLRSTVGIGTRLREELRSRRSRIPGDEVGYEIAYGGWISCGKDLRNGLHEVCMQASVFEEEIG

SEQ ID NO: 163179 - protein, 94 aa, Oryza sativa
  Clone ID: PAT_MRT4530_621C.1.pep
MLMTIVGGTKGFVDVSHWGFVGGADRKRRESKGSRRGGGRKAIIKASYRDVANKYFINSSPLRYHRNNRKHPRVGLSRLFPNLDFLKGLLIPTD

SEQ ID NO: 163180 - protein, 82 aa, Oryza sativa
  Clone ID: PAT_MRT4530_62200C.1.pep
MYAPAQLFHRQRAAAYVLGCCVVHPMRDARDVCGGERDESAAGERDASSGGGECDESSGGESDESATGERDASGGGKRERRG

SEQ ID NO: 163181 - protein, 81 aa, Oryza sativa
  unsure (1)..(81): unsure at all Xaa locations
  Clone ID: PAT_MRT4530_62201C.1.pep
FLMKALCNSYPPQVSGCTKSSLLILLPTRPPLLLYTFYSTHTVLTKTIGNSTGKESRSLLERLRPXQCSWVCLKSTSRTSL

SEQ ID NO: 163182 - protein, 65 aa, Oryza sativa
  unsure (1)..(65): unsure at all Xaa locations
  Clone ID: PAT_MRT4530_62202C.1.pep
VGPTCHPLSPFLLLLPFSLSFSFSSPLRPTAGSTGGXSWSGGGRGQSSGGGLTIGLAKWREERRG

SEQ ID NO: 163183 - protein, 72 aa, Oryza sativa
  Clone ID: PAT_MRT4530_62203C.1.pep
LYQNFSNCQTLPYQKKKIVKAGARIKQALSLSGLFGHQPRDNTNPPRAKVVRDRPFATGSCKGLDCPNFPQN

SEQ ID NO: 163184 - protein, 78 aa, Oryza sativa
  Clone ID: PAT_MRT4530_62204C.1.pep
PLSPRCRRRRRLRHASRRSDRSCQFRYCTPARTTGRDLCSTGCSPAQLLSPDVGLTADTPIQIFAEVFARPCYSTRSY

SEQ ID NO: 163185 - protein, 172 aa, Oryza sativa
  unsure (1)..(172): unsure at all Xaa locations
  Clone ID: PAT_MRT4530_62205C.1.pep
DPXXSXRVVWXXWRQXRREKXENGGRLTYDEEEPXXADXCXXARXXAAALDRXXVAXXGGESFAPRXGASGPLRPSDPRRTCARRRRALXXSGPVHWRXXTRGVRVPVVPAXXPASFRRXAFPVSPAPPDPPGKSFGGXXGGGSPXXVGASCSXRWTVLLNRGGAPFALPCA

SEQ ID NO: 163186 - protein, 115 aa, Oryza sativa
  Clone ID: PAT_MRT4530_62206C.1.pep
KQLSPKGVFKFAPPPGGVKKPPRSPPGTVAPRGIPQAPKSTGLFFRKLPFPRLFREIAPGFKPHLGFQSHSVLAPPEGSGASLVGFFWAPPLWPLHAQGVALMPKALPLARRIFG

SEQ ID NO: 163187 - protein, 556 aa, Oryza sativa
  Clone ID: PAT_MRT4530_62207C.1.pep
MTKALQAAGGKPWRPGKMSTVLVAVLMTMPPLVVIFSGRIGDQAMWIKTAVDGIRGGTDDDVSFMKHPTTSHDKLLGGLLVDGFDQESCHSRYQSAAYRRNAGRRPSEHLVSKLRRHEDLQRRCGPGTAAYSAAVEQLKSGKSPAAAEASPEACRYLVSISYRGLGNRILAAASAFLYAMLTDRVLLVDPSNEMGELFCEPFAGTTWLLPPEFPLVGYQGFYLHTAERYGKMREDRVLRPDGGEAAAAAPPPAFAYIHLDYNQTDYDKLFFCDEDQRLLSSIQWLVMRTDSYIVPGLFLVDAFQDELAALFPERDAVFHHLGRYLFHPTNHVWGLVTRYYRGHLAWARRRVGIQVRVSSWEWESPEILRTITSCTQDEGLLPRVLDDTDQEPPATAAASARRGLRPSAVVITSLKSWYYEKMKGMYWERATESGEVVVFDQPSHEEQQMYGVRAHERKAWAEMYLLSTTDVLVTTGTSTFGYVAQGLGGLTPWVLPRREVNGTAPPCRRDMSMEPCFHVAPLYDCKRWEDAGKIVPHVRHCHDMPAGLKLVDRTEW

SEQ ID NO: 163188 - protein, 180 aa, Oryza sativa
  Clone ID: PAT_MRT4530_62208C.1.pep
MRPGAGFNATAVAAAKAAVVAPVAAGGAAAHSAWHSPVPYLFGGLAAMLGLIAFALLILACSYWKLSGYLEGGAGGRGGNDDGGAPADGAKPAASELPPPIWEEKILVIMAGDVKPTYLATPMSSRASSFGDRSSSNGDQADDEKKKVQEVAMGSLVKDGENGEHSESQRDRDEHHIPEV

SEQ ID NO: 163189 - protein, 84 aa, Oryza sativa
  Clone ID: PAT_MRT4530_62209C.1.pep
CSRSQRPFIFMEGFFIYIFLYFYHVPLIITNYSSSTLNTTHTPTTARTKQESTLTPKKTETKKKTKPPITHYPSTKDKSATATL

SEQ ID NO: 163190 - protein, 83 aa, Oryza sativa
  Clone ID: PAT_MRT4530_6220C.1.pep
MFACENKIPQILWMSSEPALIASPRSLSKGGRKTKSFDSQPHSFLPWPPGHRRVKHLDLLCRTIKRVNELGKEAADLAGPPSV

SEQ ID NO: 163191 - protein, 136 aa, Oryza sativa
  Clone ID: PAT_MRT4530_62210C.1.pep
LTFFIVATLVLTPVTPLLSFSRFHEPHTSSASEGIRAGHPQVAMMENPCTSFWHDKDFADCIGPRYSAVISLHLMTTTNSENNTQHILNLSEYLTSIFQRGANLLGIFMHYVATWRLKTVGDSKGNLKTVRKWFSK

SEQ ID NO: 163192 - protein, 69 aa, Oryza sativa
  Clone ID: PAT_MRT4530_62211C.1.pep
MAVRSDRKWLVRPRGKASRIEVNVISGEEMIYLGLDETHRAAPGEAAKENNPSLEDREMMAAWPYSRSG

SEQ ID NO: 163193 - protein, 131 aa, Oryza sativa
  Clone ID: PAT_MRT4530_62212C.1.pep
WPHWYSLPLLHYLASHVFMNHTLHQHLRASGQAILKFANDGKSMHILTSNVQPKKRMKIIRRFAKKKKGADYRCIRTFWHDKDFADCIGPRYSAVISLHLMTTTNSENNTQHILNLSEYLTSIFQRGANLL

SEQ ID NO: 163194 - protein, 109 aa, Oryza sativa
  Clone ID: PAT_MRT4530_62213C.1.pep
MMMRKSPPSTSPVHAAAAVLLLMYLMAMGVGVVEAAVLPPSRCNPTLLTPCAGPTLFGGPVPPACCAQLRAQAACLCAYARSPNYGSYIRSPNAKRLFTVCGLPIPQCS

SEQ ID NO: 163195 - protein, 151 aa, Oryza sativa
  Clone ID: PAT_MRT4530_62214C.1.pep
MKSEGTLSPSLGRAPTCAGAATGACLSHRARKWREEEAIEIRWREKAAFADLQHGSTPSIPQPCRLPQGPFTTPPSSSACSWRPPLPPPSISSRGWHWLLLAPSYPLSPHALHTAAGTPHRAPPPAFPATKACPSSPASFIISTLAAQLPV

SEQ ID NO: 163196 - protein, 72 aa, Oryza sativa
  Clone ID: PAT_MRT4530_62215C.1.pep
METLISICMNKSLPTHSGALYRAPGEQGQRHPKPARAASSSVNPLTSSSAQPLPLLLPTSPAKDPRKGIVVS

SEQ ID NO: 163197 - protein, 64 aa, Oryza sativa
  unsure (1)..(64): unsure at all Xaa locations
  Clone ID: PAT_MRT4530_62216C.1.pep
MSPRVAQREYEPLLLVLLLLLQTLIASSLPCFAGTRRRRCFQLKRSXFSATTGSATGFGHGRND

SEQ ID NO: 163198 - protein, 448 aa, Oryza sativa
  Clone ID: PAT_MRT4530_62217C.1.pep
MGTSGLRNLRLRCLALGEGGNKVFGKCFARLLPVCPQWLIFLFAGVLRAIVNARYPESFLLSSQFSKTLGVLIAEKQKEFEKTTTLFVGWIRSVLIDRLVEFHDYRMVDKRFVLEQAHEIHAMAKELELLKRVVRHLPGFDGALPFELETGYVEVDRIAGVRLFYYFIRSESSPADDPLLLWLTGGPGCSAFSGLVYEVGPLTFDVHGHGHGQLPRLLYKPESWTKRTNVIFLDSPVGTGFSYADTDAGFRTGDTIAVHHILVFLNNWFQEVHPDFLSNPLYIAGDSYSGMIVPAVTFGIATSSPKPSLNLKGYLLGNPVTDHNFDAPSKIPFAHGMGLISDQLYQTAEYTMSRIWANNDTVREALGIHQGTVPSWQRCNYDILYTYDIKSSVRYHLDLTTRGYRSLIYSGDHDMIIPFIGTQAWIRSLNFSVVDEWRPWFVDGQVAG

SEQ ID NO: 163199 - protein, 100 aa, Oryza sativa
  unsure (1)..(100): unsure at all Xaa locations
  Clone ID: PAT_MRT4530_62218C.1.pep
RTVAFAVTTTLEDVLMLFKVLNGGXPANVTDGYQASQVSRSISRILGRKSPYLTHLIYNMYHTXHELLRDLHKLQCKDLSLSPSLIHLGHCTMNLNATVE

SEQ ID NO: 163200 - protein, 141 aa, Oryza sativa
  Clone ID: PAT_MRT4530_62219C.1.pep
SPLVDANFTIENAKDFCQGLDYVVSTLPNTPNTHKIISKEFLEYLPANCVLINVGRGQAVDDDALISALNGDRLKAAVLDVFQTEPLPQTHPYWTTKNVFITGHTSAPSYPKSVLKVFSENLTRHLEGKPLEHIVDFSKGY

SEQ ID NO: 163201 - protein, 91 aa, Oryza sativa
  Clone ID: PAT_MRT4530_6221C.1.pep
CRRLGHRPPWQSSSSPSRHCHARAPPPPPPRARGAPSPPPHLHRCRRRLAPRAHGESPPPLDQWADAAMREKRKGKRKRKRRKKKGMEMGG

SEQ ID NO: 163202 - protein, 462 aa, Oryza sativa
  Clone ID: PAT_MRT4530_62220C.1.pep
MNLCTEQPAVTRRQLLLLLLLLLLLLTSSPLCSRVSASAGARARSNGGGSSRRVVRHLPGFDGPLPFELETGYVEVDHIAGVRLFYYFIRSERRPAADDDPLLLWLTGGPGCSAFSGLVYEVGPLTFDLHHGRHGGLPRLLYKPESWTKRASVIFLDSPVGTGFSYAADADTDGAGFRTGDTIAVRHILVFLRKWLQEVHPVAKPGFGYRGCWPGDGYLLGNPVTDPNFDTPSKIPFTHGMGLISDELYECVKDIYQNHILEPYCTLASPHNPRIDKPFTSGGRQMLQLQEDQDLHLSEISSECRTARYTMSRIWANNDTVREALGIHQGTVPSWQRCIFAIPYTRDIKSSVRYHLDLTARGYRSLIYSGDHDMAIPFIGTQAWIRSLNFSVVDEWRPWFVDGQVAGYTRSYSNNLTFATVKGGGHTAPEYMPKQCLAMLASGFFSPRVAVETPARVCIASG

SEQ ID NO: 163203 - protein, 79 aa, Oryza sativa
  Clone ID: PAT_MRT4530_62221C.1.pep
PEGCQGPPGWGPPALAFGGAGREIPNPPPAGPPGPAPGWRMRALEGLPVTLGFTQLLYVLLLHPPVAGERWGLACAPEA

SEQ ID NO: 163204 - protein, 237 aa, Oryza sativa
  Clone ID: PAT_MRT4530_62222C.1.pep
MHLCTEAAVTRRRLLLLLLLLLVTCSCLSARERSNSSSSSSSRRVVRHLPGFDGALPFELETGYVEVDRIAGVRLFYYFIRSESSPADDPLLLWLTGGPGCSAFSGLVYEVGPLTFDVHGHGHGQLPRLLYKPESWTKRTNVIFLDSPVGTGFSYADTDAGFRTGDTIAVHHILVFLNNWFQEVHPDFLSNPLYIAGDSYSGMIVPAVTFGIATSSPKPSLNLRGYLFGHPVTDHNF

SEQ ID NO: 163205 - protein, 103 aa, Oryza sativa
  unsure (1)..(103): unsure at all Xaa locations
  Clone ID: PAT_MRT4530_62223C.1.pep
TLSSSPLSLSLSTGAARRGGLERRARHRQRLRPSXRDGGGHXDDDGSGGGGXGCSCGXGRXASEGRGAADXXXVEXXAGDDDGXCXDXEXGELDXWHGLXRSX

SEQ ID NO: 163206 - protein, 68 aa, Oryza sativa
  Clone ID: PAT_MRT4530_62224C.1.pep
TTKKPEATLTFSTETGSFFLQDVMGFKTIKRSGASLIKGWRKGLQKEGIQSNMGGIQIQIPLKSFFLG

SEQ ID NO: 163207 - protein, 52 aa, Oryza sativa
  Clone ID: PAT_MRT4530_62225C.1.pep
INRASKKTFNTKKKKRGGGGKKKKKKKKKKKKKKKKKKNKKKKKKKKKKKRG

SEQ ID NO: 163208 - protein, 166 aa, Oryza sativa
  Clone ID: PAT_MRT4530_62226C.1.pep
MPPKLDPTQVVDVFVRVTGGEVGAASSLAPKIGPLGLSPKKIGEDIAKETAKDWKGLRVTVKLTVQNRQAKVSVVPSAAALVIKALKEPERDRKKVKNIKHSGNISLDDVIEIARIMRNRSMAKEMAGTVKEILGTCVSVGCTVDGKDPKDLQQEISDGEVEIPSA

SEQ ID NO: 163209 - protein, 51 aa, Oryza sativa
  Clone ID: PAT_MRT4530_62227C.1.pep
TFERKVNFVRLASILWMDKDPFSRRRDQVQFCLLWLSHCRTCKLSVIRSCP

SEQ ID NO: 163210 - protein, 54 aa, Oryza sativa
  Clone ID: PAT_MRT4530_62228C.1.pep
KANLVKNLRTLSVLRFLKDPLIFGKIHISRRQITSNPPETRIILCIQTCLKSMA

SEQ ID NO: 163211 - protein, 80 aa, Oryza sativa
  Clone ID: PAT_MRT4530_62229C.1.pep
MQHVPTTTLLRPLCHVNVLGLLAALQSPASAPVFYAFAAVGCCRPRSLIDAGLLPTYRGLLESSSFRHKRNNFVAGPVKR

SEQ ID NO: 163212 - protein, 345 aa, Oryza sativa
  Clone ID: PAT_MRT4530_6222C.1.pep
MTIIVLAYVDGSIQNGITGPEYTIPPKITFPTSNRSTFEDVKNEIFRGLGYTEDDYIISIQARFDIGAPGPHYFQLIPIYEERGWKMIFEKTQTRASWHIIELYVDCKPAQVVLSQITESSRQTERNDTNVYLQHRTIHPAQVASQEDDYVGEETDLAEDRIEQDDDSEHDTDGSTDHSTDDEHPEPQPVVHSINSFPFMHATGKNPIKAFSDIYVLKETIADESFFGHKKQFDSPLARGKTFDSKEHLKIAIGEFHIEKNAEVKYSTSSKSKIVAECTDNSCTWRLYATPTGIDCFLFHRCIISLNIQLIGNYQELPALWTQHCRSDVPLFVIICFIASCAQIL

SEQ ID NO: 163213 - protein, 96 aa, Oryza sativa
  Clone ID: PAT_MRT4530_62230C.1.pep
MRQLRMMLRLAPFPPEAGCWAQYHMLAKMGSGVGVKFCKGKLSFIKHYIDWCDCHRDCHGLFFRGFQRCWCHGCRWGYCDCCRHHLCRVAAVLNRD

SEQ ID NO: 163214 - protein, 1398 aa, Oryza sativa
  unsure (1)..(1398): unsure at all Xaa locations
  Clone ID: PAT_MRT4530_62231C.1.pep
TSTGNSLAGQLISEKLGKSNHALXEALVLAAIRGAKLEGHLTGASRALAAVLRSKDGEAETIVNNPEYEEWVAVDQQVLSYLLSFMTMDMLIQVAACATAASAWKMIEGMFSSMTRVRCINTRLSLTTLKKGEMTVIAYVGKMRALAYELIITGKSVNDDDLISYIITGLDEEYEPVISNIVGQDQITIEEAXAQIISFEQRLALHRREXERTWPIELQRGIGGGGSNRNSPSGNRGTSNAGNHGRRGRGNPGGNRTNPRGIDNWPKCQLCYKIGHTVKDYWYHYDENFVLDERFAGTATSYGVDTNWYLDTXATDHAIGELDKLTVRDKYHGNDQIHTASGAGMEISHIGNSVVKTPSRNIYLNKILYAPKASKNLVSAHCLACDNFAFIELYRFFFFTKDLAMRRTLLRGRCHKGLYALPSAPPSQHHTKQVYGVSQPSFERLHSHLGHPSYVVVEKVIKSHKLPCLDVSNEVLVCDACLFXDVWDTALQSVGRCKYYVSFFDDYRKFTWIYLLKYKSEDFQKFHEFLXLVERFFNRKNITMQTDWGGEYQKLHSFIAQAGITXISHVLTLXQQNGSAERKHCHIVEVGLALLAYSSMPLKFWNEAFLSAVYLINHTPSRALGDISLLEKLFDCQPNYIALRVFGCACWPNLRPYNKHKLHFRSKECTFIGYRIFHKGIKCLDPTTGHVYIYXSHDVMFDETQFPFAKLHSNAGAHLRAEISLILELAPYIPRGPQQNSYVIDSPEISDNSLENTEAYDNTAPASASSSTAASRQPSGSHLHQSPAHGSPGGHSILXAATSPNSQSPGTTRPRSGAGSDTVTSLPGSSMAXGITVGNRVSRSHRISQQWPXSGGGHIDADAADIPVARPHTRLQSGIRKEKDYIDGTLKWGRLTSSSDPQNLQDAXYWKDAVDAEYIALIKNKTWHLVPPQKDKNIIYYKWVYKIKRKXDGSLEXLVAKGFKQRYGIDYEDTFSHVNKAITIKIVLSIXRGWSLRQLDVQNAFLHGVLEEGVYMKQPLGYEXSSTLGYVCKLDKALYGLKQAPRAWYAKLSGKLYDLGFKGSKADTSLFFNNKGDLTLFLPIYVDDIIVVSSRQETVPTLLQDLQKEFALKDLGELHYFLGIEVNKIANGIXLTQEKYASDLLKXTRMSDCKPVSTLLSTSEKLKVDKGSXLGQTYATQYRSLEHFXYLTLTRLDIAFSVNKVCQFLHTPTTVHWAAIKRILRYLRQSIKLGLKICKSKTMMVSAYSDADWVECLDDKRSTGGFAVYLGDNMVSWSAKKQTIISRSSTXAEYKALVNATAEIMWVQTLLQELHIDSPTTAQLWCDNMGARYLSFNHVFHARTKHIATDYHFVRERVAQKLLQVGYVXKDQVANGFTKPLSERLPENFKYNLNLGRL

SEQ ID NO: 163215 - protein, 117 aa, Oryza sativa
  Clone ID: PAT_MRT4530_62232C.1.pep
KERRRWPVKMMGPSRPCPPWRLANDRRGNATTEADDVESGGDLVSSLVNPVQRRLTAITAIGASSTFQTTMMWIERWPPKLVEARPMAWAATWTTSGSVTFHSRQLRARPWEALSAA

SEQ ID NO: 163216 - protein, 64 aa, Oryza sativa
  Clone ID: PAT_MRT4530_62233C.1.pep
MPQRLSKAVSFLFLLQVYPTINENNTQEYPQKHFCRQTCQVFKFHALNKAHDGNDLLTYYECRH

SEQ ID NO: 163217 - protein, 57 aa, Oryza sativa
  Clone ID: PAT_MRT4530_62234C.1.pep
TDQGGCSRPIQAPKSKTQVIHTSSITRTRRPLSPRGHRITAWCIRYRGSRMNDYSIN

SEQ ID NO: 163218 - protein, 60 aa, Oryza sativa
  Clone ID: PAT_MRT4530_62235C.1.pep
MAAGCCCWEEQCLDAMGFQLHLRIHSMCLLKGIKPYLDWSSCYEKSGNTASQQTTIRTSQ

SEQ ID NO: 163219 - protein, 354 aa, Oryza sativa
  Clone ID: PAT_MRT4530_62236C.1.pep
MEVRSEQGLMAGRDLFGMPKSPPAAAAAPPQSVRMAYTSDGTPVFAPVSAAVSAPPGYQPGGAAGGNGAAALADSGGEPVAKKKRGRPRKYGPDGSMSLGLVTSPTAAASTPVAQGVPGPFSPTQPKPPASFLSSGWPDGVKKRGRPKGSTNKPRIDAVGSAGVGFTPHVITVLAGEDVSAKIMSFAQHGNRAVCVLSANGAISNVTLRQTATSGGTVTYEGRFEILSLSGSFLLTDHGGQRSRTGGLSVSLAGPDGRLLGGGVAGLLIAATPVQIVVGSFNSEGKKEPKQHAHSEPASAPSKAVPTAGMGPNSPPSRGTLSESSGGAGSPLHPGIAPPSSNSQPPFLSSMPWK

SEQ ID NO: 163220 - protein, 60 aa, Oryza sativa
  Clone ID: PAT_MRT4530_62237C.1.pep
RTLEDLAWPVGLSLCHYSFSLTGNQGLFMDYCLWMAMLFNKMKRLNIMKYYFLDPIKLQM

SEQ ID NO: 163221 - protein, 82 aa, Oryza sativa
  Clone ID: PAT_MRT4530_62238C.1.pep
MAHFMDLRAFILRSRVLKLYRQALRMTRRAPVHACDELRQTVRAEIEKNRRCDDKQKIKFLISEGLQRLKGLDEMLDMTGNS

SEQ ID NO: 163222 - protein, 76 aa, Oryza sativa
  unsure (1)..(76): unsure at all Xaa locations
  Clone ID: PAT_MRT4530_62239C.1.pep
MAHFMDLRAFILRARGLKLYRQALRMTRRAPVHACDELRQTVRAEIEKXNRRCDDKQKIKFLISEXLPRLKGPDEM

SEQ ID NO: 163223 - protein, 175 aa, Oryza sativa
  Clone ID: PAT_MRT4530_6223C.1.pep
SYPPLLPLALLALLFLCLLHGERAAAADDDLTSGTGDGSELWGYVQVRPKAHLFWWYYKSPQRASSPGKPWPTILWLQGGPGASGVGLGNFLEVGPLDVNLKPRDSTWLQKADLIFVDNPVGVGYSYADDPSALVTTDWQAATDATELLRALAAKEIPTLQSSPHVLVAESYGGK

SEQ ID NO: 163224 - protein, 111 aa, Oryza sativa
  unsure (1)..(111): unsure at all Xaa locations
  Clone ID: PAT_MRT4530_62240C.1.pep
TEYRCSTLPSGDPKRISNSWNVCNLPKAKTIQGPLLVHGSSYSSMMYPNVEDYXDRVQGCHHLPSTSDKSVGYITNKGNPSGLCQGSAELMDIDFEALSPLAWWLGPFEGV

SEQ ID NO: 163225 - protein, 753 aa, Oryza sativa
  Clone ID: PAT_MRT4530_62241C.1.pep
MDVDVSTDSDDFEGGFDLEDMLSHVEPEVLAECTDPDSDKSKRGKIPSMVMWYLPIKDRLKRLYSNPTDAELMRWHQESRKIDGMIRYPADARQWKTFDAKHPEFAKDPRNVRLFDNTVENDTAPAARGGTYVYEITKKIKVVYGKGKKKTVKRKKADGDKDTASPFKKHSIFFKYLDYWKDLEIRHAIHAMHLEKNVFDSTIGTLLDIPSKTKDGLKSRNDLKVFDPLELGPLQTFAVETVCQLEMYFRPSYLDMMEHLIVHIVPHIIELGSLYLHQMWAYERYMSILKGYVRNRAHPEGSMIEGYTTEEAVECCMDYIKDANAIGIPVHRHEGRLSGRGIVGRKQFFDNDYKKEIWELDYGLNIQIPVLRCEWVKDTTGVSVDDYGDPSDERKTIVISGKQQIVGIDNIEDPNDYNQFDDVTLFTDLPMRIKKVETPSSSPPPSPPRHRRLLPEVVPLAVTVAAARTSPPSPRRRRQVVPATAGSSPKSPLSPSPSSPPPGSLPPRVSSPPSPPRHRRQYLPAAAAPAPPVQSPPDGKPVEPPIVRSKFSNACGTLVRTRCPINVKLWETVDDNIKTLLWNELQKYFVFPPGSQADWDTFVADHIIAEALALRKKMSELAKKNRYPHRLGSSGYAGHVDQWWEIEQRFSAAGKPLLVDPMVERSKNWVWVRSTAENPTAFPSLVVPIGRAGKTKEVAMGLAIPGRQFHNTAFPEDYARRHNPNRGRSSSRIFNSILIAGKDSCRSCTTVAS

SEQ ID NO: 163226 - protein, 1552 aa, Oryza sativa
  Clone ID: PAT_MRT4530_62242C.1.pep
MSYRVDPRTNVPQYPTYPVYEYPLSTMLVHVPHEAKEHALRENMTKIFCPCRHCKNQKLLVDPGEILGHIMEYGFTANYKVWTYHGEFANPEDDDEELSFEMNEAENFIIEDMSRERMIVDVSTDSDDFDGGFDLEDMLRHVEPEDRLKRLYSNPTDAELMRWHQESRKVDGMIRHPADARQWKTFDAKHPEFAKDPRNVRFALSTDGMNPFGDLSSSHSTWPVLLTMYNLPTWICQKRKYILLTILIQGPNQPGIDIDVFLEPLMEDMEELWKEGLRLWDEFKREHFNLRAIIFVTINDLPANFSLSGQIKGKTGCLICLEKTSYKYLTSSLKTVYMRHRRFLPQRHRYRKMARLFDNTVENDTAPVARGGTYVYEITKKIKVVYGKGKKKTVKRKKADGDNGTASPFKKHSIFFKYLDYWKDLEIRHAIDVMHLEKNVFDSTVGTLLDIPSKTKDGLKSRNDLKVFDPLELGPLQTFAVETVCQLEMYFPPSFLDMMEHLIVHIVPQIIELGPLYLHQMWAYECYMSILKGYVRNRAHPEESMIEGYTTEEAVECCMDYIKDANAIGIPVHRHEGRLSGRGTVGRKQFFDNDYKKVSATHNSVLQQLAIVEPFIERHLEEIKACFPGRSNDWISREHKRRFPLWLKDLNLPVGDSVEELTLQRLACGPSSIVNSWQGYDINGFTLSTTTKDMKSTSQNSGIRVEAIDTSGEKRSYYGTIQEIWELDYGLNIQIPVLRCEWVKDTIGVSVDDYGLTIVDHSKTGHKDDPWVLAERVAQVFYVKDPSDERKTIVISGKQQIVGIDNIEDPNDYNQFDDVPLFTDLPMRIKKVERTIDEANMSYVRADGVAKDLSPLAVAVAAARTSPPSPSPSPPAGHRRHRTELSPLAVAIAAARSSPPPSRPRYRWLLPEVAPPLAVADATARTSPPSPSPSPPPGRRRRRTDLSPLAVAIAAARSSPPPGASSEETWRTPSDPFPMEITQIAPRDDDPDYIPIEQAMVVRRRLKRKAGRNRTEQEVEMDTATSAPERTETSTSAGGSGKKRRGERSKNKLPKETYNVIALDQDGKPIEPPIVRSKFSNACGTLVRTRCPINVKLWETVDDNIKTLLWNELQKYFVFPPGSEADWDTFVADRTTAEALALRKKMSELAKKNRYPHRLGSSGYTSHVDQWREIEQRFAAAGKPLLVDPMVERSKNWVWARSTSQVSDEGDILFETPDIEEVTTNLQQIVEKERSGQFVPRRERDQLTAALGTAEHSGRVRGLSSKTSWKVRFPQDAPSYKKRDKYKEQLSDKIYAQVKEHFYSLAAENPIAFPRNSEKRKELAHVLSDSQKSVLAAQDEVQSWLSADVPETYEYGKPFLPTYLMNKLPWEMRVMHECMQFHEADRTGAKVGYVDPTRICKTQHTVELRQDCEQLVGKTPEEKEEYVKTLHKRKKLEVATYLAIAMLAHADKDVLMVPYQFTAHKYYRKRGGPVHIPSRKKLSVRTGWPIPEIPYIAQRFNHTTILNVAADLCRFIRRDVCNARGLFYDNQSELAMDDKFKPLREWEKEHMQ

SEQ ID NO: 163227 - protein, 938 aa, Oryza sativa
  unsure (1)..(938): unsure at all Xaa locations
  Clone ID: PAT_MRT4530_62243C.1.pep
MEYGFTANYKVWTYHGEFANPEDDDEELSFEMNEAENFIIEDMSRERMVVDVSTDSDDFDGGFDLEDMLRHVEPEVLAGRSRGLENWQALEKASKDLLYDETKGCDKDFTVLRSVLKLLRLKAKHGWSDTSFNDLMSLLRVLLPKPNFVPSNTYQAKKLICPLSLGVEKIHACKNHCILYRKEYAELECCPTCGTSQYKTGNGPVDSECTDLDSDKGPPEASVLKPTDAELMRWHQESRKIDGMIRHPADARQWKTFDAKHPEFAKDPRNVRFALSTDGMNPFGDLSSSHSTWPVLLTMYNLPTWICQKRKYILLTILIQGPNQPGIDIDVFLEPLMEDMEELWKEGLRLWDEFKREHFNLCAIIFVTINDLPANFSLSGQIKGKTGCLICLEKTSYKYLTSSLKTVYMRHRRFLPIGRAGKTKEVATGLAIPGRQFHNTAIPEDYARVQVAKVHSDHVSLELDIPAPEGIELLGDAVNQFILWHRRDIILSAAVPAAGSSTPSSSQAMTAAAPAPPSPPEPPSPRHPPSPPPLRSPPRQPTPPPSPSQQPPLLAPQPVQASPTSPAKQHAPPAPPSVQTSPPTPQSALVEQVHIPDGTTSEPKSNTLEPRRIIPKLISTYDPKEIDNDKEKFMFSAFRNSEKRKELAHVLSDSQKSVLAAQDEVQSWLFADVPETYEYGKPFLPTYLMNKLPWEMRVMHEWYMKASRKGLGFISVAVPEGAFMSGPNGIFFISFRDLYSLYKLDKMDVNLVAAFYLMQFHEANRTGAKVGYVDPTRICKTQHTVELRVDCEQLVGKTPEEKEEYVKTLHKRKKLEVATYLAIAMLAHADKDVLMVPYQFTDHYILFLVYPKDQFIISLDPAHYDKETFMEFLTILNLAHKYYRKRGGPVHIPSXKKLSVRTGWPCYKQPPGTNLCGYYVCEMLRVNGRSPKSHILHN

SEQ ID NO: 163228 - protein, 115 aa, Oryza sativa
  unsure (1)..(115): unsure at all Xaa locations
  Clone ID: PAT_MRT4530_62244C.1.pep
QRGGGGGGXGEVEEEEERRRQRRKVSNRLSARRSRARKQQRLEELRGESARLRAENRELAARLHAVARHGLAARCQNARLRAEAAALARRLLALQRLARGRHMMITASPPQFSRR

SEQ ID NO: 163229 - protein, 287 aa, Oryza sativa
  unsure (1)..(287): unsure at all Xaa locations
  Clone ID: PAT_MRT4530_62245C.1.pep
TLKSAYATDSDVLMIYNDKCRELMNSFWLVTLKHVPREQNVEANDLAQGASGYKPMMKDIEVEVAAITADDWRYDVFQYLQNPSQSASRKLRYKALKYTLLDDELYYRTIDGILLKCLSADQAKVVMGEVHEGICGTHQSAHKMKWLLRHTXVCFWPTMLEDCFRYYKGCQDCQKFGAIQRAPASAMNPIIKSWPFRGWGIDMIGQINPPSSKGHKFILVATDYFTKWVEAVPLKKVDSRXDTIQFVKEYIIYRFGIPQTITTDQGSIFVSDEFVQFANSMGIKLLN

SEQ ID NO: 163230 - protein, 1689 aa, Oryza sativa
  Clone ID: PAT_MRT4530_62246C.1.pep
MTKIGDSSPPKIGEGSSSGAAERVMANSSVVELPLLTRTNYHEWSLVMQVSLEALEQWDAVEAVSKDRGKDRRALATIIRAVPREMKAGLAVKKSAKEAWDVVKKMHAGDDRVKATSVQRLMKQFENMAFRDGENVGDFAMRINGLVASLRELGEEMEDSRVVKKVLRVVPKRLKQVAVAIEMLADIDTMEIEELVGRLQVAEDADAEDQAASSAEHAGQLLLTEEQWEARRRQRRGKEHAHGGVGEKGGGHDDDDDDGSSTSSGRGKKRYRGKCFDCGVRGHMARDCPKKKKERALLVDVDDEPTLLGRLLGINALSWPCLRFATARQWRMASGQVLAVERMQEHAMREGWRPVHVEEYVAHERVKPGRPGCHAYVRVKLAKWVRGRCVAVGAIGSAAFVAETPLFIFNLQPFLHGMEAPANVGVAMPPPKQVMAEPLPLTTPQRKSWPRAMREKSRPLSKLSPGHSQHVGSWASERPQTTTQRMAAWLPLGAMRPHKMLVPAAMAARSSTAAAALHSCSAAADALLHSASLLPRHLRRDRHRPAKEHALRENMTKIFCLCRHCKNQKLLVDPGEILGHIMEYGFTANYKVWTYHGEFANPEDDDEELSFEMSEAENFIIEDMSRERMVVDVSTDSDDFDGGFDLEDMLRHVEPEGKRGKIPSMVMWYLPIKDRLKRLYSNPTDAELMRWHQESRKIDGMIRHPADARQWKTFDAKHPEFAKDPRNVRFALSTDGMNPFVENDTAPVARGGTYVYEITKKIKVVYGKGKKKTVKRKKADGDNGTASPFKKHSIFFKYLDYWKDLEIRHAIDVMHLEKNVFDSTVGTLLDIPSPLQTFAVETVCQLEMYFPPSFLDMMEHLIVHIVPQIIELGPLYLHQMWAYERYMSILKGYVRNRAHPEGSMIEGYTTEEAVECCMDYIKDANAIGIPVHRHEGRLSGRGTVGRKQFFDNDYKKVSAAHNSVLQQLAIVEPFIERHLEEIKACFPGRSNDWISREHKRRFPLWLKDLNLPVGDSVEELTLQRLACGPSSIVNSWQGYDINGFTLSTTTKDMKSTTQNSGIRVEAIDTSGEKRSYYGTIQEIWELDYGLNIQIPVLRCEWVKDTIGVSVDDYGLTIVNHSKTSHKDDPWVLAERVAQVFYVKDPSDERKTIVISGKQQIVGIDNIEDPNDYNQFDDVPLFTDLPMRIKKVERTIDEANMSYVRADGVAKAAKISQVAVAVVPATAGSSPKSPRHRRLLPEVAPPLAVADATARTVALAVAVAAARWPSPPHGPLPPRRCHRRRQVVAAARSSPPSLGGSGKKRRGERSKNKLPKETYNVIALDQDGKPIEPPIVRSKFSNACGTLVRTRCPINVKLWETVDDNIKTLLWNELQKYFVFPPGSEADWDTFVADRTTAEALALRKKMSELAKKNRYPHRLGSSGYAGHVDQWREIEQRFAAAGKPLLVDPMVERSKNWVAKVHSDHVSLELDIPAPEGIELLGDAVNQFILWHRRDIILSAAVLAAGSLTPSSSQAMTAAAPAPPSPPEPPSPRHLPSPPPLRNSEKRKELAHVLSDSQKSVLAAQDEVQSWLSADVPKTYEYGKPFLPTYLMNKLPWEMRVMHECMQFHEADRTGAKVGYVDPTRICKTQHTVELRQDCEQLVGKTPEEKEEYVKTLHKRKKLEVATYLAIAMLAHADKDVLMVPYQFT

SEQ ID NO: 163231 - protein, 69 aa, Oryza sativa
  unsure (1)..(69): unsure at all Xaa locations
  Clone ID: PAT_MRT4530_62247C.1.pep
FFFXLIQVFYCMEYLAWSLNEQGSKLKRGKVKRKPNLRFDVHSGEQLLNLANDPRRDHGHDFTGDRRQS

SEQ ID NO: 163232 - protein, 1512 aa, Oryza sativa
  Clone ID: PAT_MRT4530_62248C.1.pep
MRHTLSLPPSRSHVATSCSRVATLRVLASSCPTADWLADRAARVHGWCRVGPWAEALAQTRDGRMGRAGMAHMLHAKEHALRENMTKIFCPCRHCKNQKLLVDPGEILGHIMEYGFTANYKVWTYHGEFANPEDDDEELSFEMNEAENFIIEDMSRERMIVDVSTDSDDFDGGFDLEDMLRHVEPEDRLKRLYSNPTDAELMRWHQESRKIDGMIRHPADARQWKTFDAKHPEFAKDPRNVRFALSTDGMNPFGDLSSSHSTWPVLLTMYNLPTWICQKRKYILLTILIQGPNQPGIDIDVFLEPLMEDMEELWKEGLRLWDEFKREHFNLRAIIFVTINDLPANFSLSGQIKGKTGCLICLEKTSYKYLTSSLKTVYMRHRRFLPQRHRYRKMARLFDNTVENDTAPVARGGTYVYEITKKIKVVYGKGKKKTVKRKKADGDNGTASPFKKHSIFFKYLDYWKDLEIRHAIDVMHLEKNVFDSTVGTLLDIPSPLQTFAVETVCQLEMYFPPSFLDMMEHLIVHIVPQIIELGPLYLHQMWAYERYMSILKGYVRNRAHPEGSMIEGYTTEEAVECCMDYIKDANAIGIPVHRHEGRLSGRGTVGRKQFFDNDYKKVSAAHNSVLQQLAIVEPFIERHLEEIKACFPGRSNDWISREHKRRFPLWLKDLNLPVGDSVEELTLQRLACGPSSIVNSWQGYDINGFTLSTTTKDMKSTSQNSGIRVEAIDTSGEKRSYYGTIQEIWELDYGLNIQIPVLRCEWVKDTIGVSVDDYGLTIVDHSKTGHKDDPWVLAERVAQVFYVKDPSDERKSIVISGKQQIVGIDNIEDPNDYNQFDDVPLFTDLPMRIKKVERTIDEANMSYVRADGVAKDLSPLAVAVAAARTSPPSPSPSPPAGRRRHRTELSPLAVAIAAARSSPPPSRPRYRRLLPEVAPPLAVADATARTSPPSPSPSPPPGRRRRRTDLSPLAVAIAAARSSPPPGASSEETWRTPSDPFPMEITQVAPRDDDPDYIPIEQAMVVRRRSKRKAGRNRTEQEVEMDTATSAPERTETSTSAGGSGKKRRGERSKNKLPKETYNVIALDQDGKPIEPPIVRSKFINACGTLVRTRCPINVKLWETVDDNIKTLLWNELQKYFVFPPGSEADWDTFVADRTTAEALALRKKMSELAKKNKYPHRLGSSGYAGHVDQWREIEQRFAAADIEEVTTNLQQIVEKERSGQFVPRRERDQLTAALGTAEHSGRVRGLSSKTSWKVGFPQDAPSYKKRDKYKEQLSDKIYAQVKEHFYSLAAENPTAFPRNSEKRKELAHVLSDSQKSVLAAQDEVQSWLSADVPETYDMQFHEADRTGAKVGYVDPTRICKTQHTVELRQDCEQLVGKTPEEKEEYVKTLHKRKKLEVATYLAIAMLAHADKDVLMVPYQFTAHKYYRKRGGPVHIPSQKKLSVRTGWPIPEIPYIAQRFNHTTILNVAADLCRFIRRDVCNARGLFYDNQSELAMDDKFKPLREWEKEHMQ

SEQ ID NO: 163233 - protein, 154 aa, Oryza sativa
  unsure (1)..(154): unsure at all Xaa locations
  Clone ID: PAT_MRT4530_62249C.1.pep
MKFQIILWFLVLLSIVVSMLVATTTMADHHCXVVYTPSQLCQPRIDYXDVYPLPRCRTMVKGQCIGGGAAGNVDEQVWRDCCRQLATINNNLCRCPVLSHKLVGMYKELGTAAHGQPMDEVFPGCRRDNMKCMVVASLLALCGVDIHIGIGGVC

SEQ ID NO: 163234 - protein, 299 aa, Oryza sativa
  Clone ID: PAT_MRT4530_6224C.1.pep
MADLISTSTLTSPVGRAARWSSASPRARPPRRHRRHLHQASSGRRCCYGRRGVVGAAQSTGGHIPAGSSSAAAYACRPPFTVDAPSTIHATIWQSSSGGRRRCGRGAVESLGLRRPPPRRHPRVSDIGIDSALTLSFRLAHLRLDHPFKRPATTTSTTDRHRARVYVIKLWVAAASPSRAAVSPPVPPEAQYNVSNIRSILFPHTIQQLGQAPLRVQYPGLYKLVCNVAYKAVAMMQRWKELLKGGGRGQVDNWRDKILANLARLRQLCDPPEFILRWWLMLELVFGWCFLCDRGVSFA

SEQ ID NO: 163235 - protein, 1241 aa, Oryza sativa
  Clone ID: PAT_MRT4530_62250C.1.pep
MEYGFTANYKVWTYHGEFANPEDDDEELSFEMNEAENFIIEDMSRERMVVDVSTDSDDFDGGFDLEDMLRHVEPEDRLKRLYSNPTDAELMIWHQESRKIDGMIRHPVDARQWKTFDAKHPEFAKDPRNDLEIRHAIDVMHLEKNVFDSTVGTLLDIPSKTKDGLKSRNDLKVFDPLELGPLQTFAVETVCQLEMYFAPSFLDMMEHLIVHIVPQIIELGPLYLHQMWAYERYMSILKGYVRNRAHPEGSMIEGYTTEEAVECCMDYIKDANAIGIPVHRHEGRLSGRGTVGRKQFFDNDYKKVSAAHNSVLQQLAIVEPFIERHLEEIKACFPGRSNDWISREHKRRFPLWLKDLNLPVGDSVEELTLQRLACGPSSIVNSWQGYDINGFTLSTTTKDMKSTAQNSGIRVEAIDTSGEKRSYYGTIQEIWELDYGLNIQIPVLRCEWVKDTIGVSVDDYGLTIVDHSKTGHKDDPWVLAERMAQVFYVKDPSDERKTIVISGKQQIVGIDNIEDPNDYNKLDDVPLFTDLPMRIKKVERTIDEANMSYVRADGVAKDLSPLAVAVAAARTSPPSPSPSPPPGRRRHRTELSPLAVAIAAARSSPPPSRPRYRRLLPEVAPPLAVADATARTSPPSPSPSPPPGRHRRRTDLSPLAVAIAAARSSPPPAIACVPEEPVRTRTRKGTPGARLPPLPRPEAGEITPAPSASRHCAPSRTDGKPVEPPIVRFKFSNACGTLVRTRCPINVKLWETVDDNIKTLLWNELQKYFVFPPGSEADWDTFVADRTIAEALALRKKMSELAKKNRYPHRLGSSGYAGHVDQWREIEQRFAAAGKPLLVDPMVERSKNWVWARSTGQVSDEGDILFETPDIEEVTTNLQQIVEKERSGQFVPWRERDQLTAALGTAEHSGRVRGLSSKASWKVGFPQDAPSYKKRDKYKEQLSDKIYAQVKEHFYSLAAENPTAFPSLVVPIGRAGKTKEVATGLAIPGRQFHNTAIPEDYARVQVAKDLQPHPQLPLLHHRRLLNHRHLDIRRHHHRLGHRLANLHHHPPLLNNRLSRPRNQFKPLPPPQLNSMLPRLRPQFKPLHLHPNLLWNSEKRKELAHILSDSQKSVLAAQDEVQSWLSADVPETYEYGKPFLPTYLMNKLPWEMRVMHECMQFHEADRTGAKVGYVDPTRICKTQHTVELRQDCEQLVGKTPEEKEEYVKTLHKRKKLEVATYLAIAMLAHADKDVLMVPYQFT

SEQ ID NO: 163236 - protein, 131 aa, Oryza sativa
  Clone ID: PAT_MRT4530_62251C.1.pep
MATILAVAAMATFQAPTTLPGPLAPTLPVRRNVVSFAGRRQGRALGRLAVVVAAGSPTPPELAQKVSESIKQAEETCAGDPEGGECAAAWDEVEELSAAASHARDRKKDSDPLEEYCKDNPETDECRTYED

SEQ ID NO: 163237 - protein, 48 aa, Oryza sativa
  Clone ID: PAT_MRT4530_62252C.1.pep
SYHFTQALLHKLCLFTLNNDLAWGLCRILPTTLILHKLGRGFYRGRIP

SEQ ID NO: 163238 - protein, 1178 aa, Oryza sativa
  Clone ID: PAT_MRT4530_62253C.1.pep
MEYGFTANYKVWTYHGEFANPEDDDEELSFEMNEAENFIIEDMSRERMVVDVSTDSDDFDGGFDLEDMLRHVEPEVLAGRSRGLENWQALEKASKDLLYDETKGCDKDFTVLRSVLELLRLKAKHGWSDTKCTDPDSDKGKRGKIPSMVMWYLPIKDRLKRLYSNPTDAELMRWHQESRKIDGMIRHPADARQWKTFDAKHPEFAKDPRNVRFALSTDGMNPFVENDTAPVARGGTYVYEITKKIKVVYGKGKKKTVKRKKADGDNGTASPFKKHSIFFTYLDYWKDLEIRHAIDVMHLEKNVFDSTVGTLLDIPSPLQTFAVETVCQLEMYFPPSFLDMMEHLIVHIVPQIIELGPLYLHQMWAYERYMSILKGYVRNRAHPEGSMIEGYTTEEAVECCMDYIKDANAIGIPVHRHEGRLSGRGTVGRKQFFDNDYKKVSAAHNSVLQQLAIVEPFIERHLEEIKACFPGRSNDWISREHKRRFPLWLKDLNLPVGDSVEELTLQRLACGPSSIVNSWQGYDINGFTLSTTTKDMKSTTQNSGIRVEAIDTSGEKRSYYGTIQEIWELDYGLNIQIPVLRCEWVKDTIGVSVDDYGLTIVDHSKTGHKDDPWVLAERVAQVFYVKDPSDERKTIVISGKQQIVGIDNIEDPNDYNQFDDVPLFTDLPMRIKKVERTIDEANMSYVRADGVAKDLSPLAVAVAAARTSPPSPSPSPPPGRRRHRTELSPLAVAIAAARSSPPPSRPRYRRLLPEVAPPLAVADATARTVALAIAVAAARSPSPPHGPLPPRRCHRRRQVVAAARSSPPSLGGSRKKRRGERSKNKLPKETYNVIALDQDGKPIEPPIVRSKFSNACGTLVRTRCPINVKLWETVDDNIKTLLWNELQKYFVFPPGSEKNLPPFTDYGHISQADWDTFVADRTTAEALALRKKMSELAKKNRYPHRLGSSGYAGHVDQWREIEQRFAAAGKPLLVDPMVERSKNWVAKVHSDHVSLELDIPAPEGIELLGDAVNQFILWHRRDIILSAAVLAAGSSTPSSSQAMTAAAPAPPSPPEPPSPRHPPSPPPLRNSEKRKELANVLSDSQKSVLAAQDEVQSWLSADVPETYEYGKPFLPTYLMNKLPWEMRDCEQLVGKTPEEKEEYVKTLHKRKKLEVATYLAIAMLAHADKDVLMVPYQF

SEQ ID NO: 163239 - protein, 975 aa, Oryza sativa
  Clone ID: PAT_MRT4530_62254C.1.pep
AKAHALRENMTKIFCPCRHCKNQKLLVDPGEILGHIMEYGFTANYKVWTYHGEFANPEDDDEELSFEINEAENFIIEDMSRERMDVDVSTDSDDFDGGFDLEDMLRHVEPEVLAGRSRGLENWQALEKASKDLLYDETKGCDKDFTVLRSVLELLRLKAKHGWSDTSFNDLKSLLRVLLPKPNFVPSNMYQAKKLICPLSLGVEKIHAYSDKGKRGKIPSMVTWYLPIKDRLKRLYSNPTDAELMRWPQESWKIDGMIRHPADACQWKTFDAKHPEFAKDPRNVRFALSTDGMNPFGDLSSSHSTWPVLLTMYNLPTWICQKRKYILLTILIQGPNQPGIDIDVFLKPLMEDMEELWKEGLRLWDEFKWEHFNLRAIIFVTINDLPANFSLSGQIKGKTGCLICLEKTSYKYLTSSLKTVYMRHRRFLPQRHRYRKMARLFDNTVENDTAPVARGGTYMYEITKKIKVVYGKGKKKTVKWKKADGDNGTASPFKKHSIFFKYLDYWKDLEIRHAIDVMHLEKNVFDSTVGTLLDIPSKTKDGLKSRNDLKVFDPLELGPLQTFAVETVCQLEMYFPPSFLDMMEHLIVHIVPQIIELGPLYLHQMWAYERYMSILKGYFFDNDYKKVSAAHNSVLQQLAIVEPFIERHLEEIKACFPGRSNDWVSREHKRRFPLGLKDLNLPVGDSVEELTLQRLACGPSSIVNSWQGYDIIGFTLKIWELDYGLNIQIPVLRCEWVKDTTGVSVDDYGLTIVDHSKIGHKDDPWVLAERVAQVFYVKDPSDERKTIVISGKQQIVGIDNIEDPNDYNQFDDVPLFTDLPMRIKKVERTIDEVNMSYVRADGVAKDLSPLAVAVAAARTSPPSPAPSPPPGLSPSLAVADAAARTSTPSRSLGGSGKKRRGERSKNKLPKETYNVIALDQDGKPVEPPIVRSKFSNACGTLADWDARGLFYDSQSELAMDDKFKPLREWEKEHMQ

SEQ ID NO: 163240 - protein, 725 aa, Oryza sativa
  Clone ID: PAT_MRT4530_62255C.1.pep
MDRSSWMYEMRRTQPIFIKEASKFIDQAKAHALRENMTKIFCPYHHCKNQKLLVEPGEILGHIMEYGFTTNYKVWTYHGEFADPEDDDEELSFEMNEAENFIIEDMSHERMDVDVSTDSDDFEGGFDLEDMLCHVEPEKTSYKYLTSSLKTVYMQHRRFLPQRHRYRKMARLFDNTVENDTAPEAQSGTYVYEITKKIKVVYGKGKKKTVKRKKGDGDKDTTLPFKKHSIFFRYLDYWKDLEIQHAIDVMHLKKNVFDSTIGTLLDIPRVRVPPGFSSNIRKLVSMKDLTISGYNAHDCHRLLTVFLPIAIRAVKPVHTKVVITKLCYFFNQISQKVFDPLELGPLQTFAVEIVCQFEMYFPPSYLDMMEHLIVHIVPQIIELGPLYLHHMWAYERYMSILKGYVHNRAHPEGSMIEGYTTEEAVECCMDYIKDANAIGIPVHRHEGRLSGRGTVGRKQFFDNDYKKVSAAHNSVLKQLAIIEPFIERHLEEIKACFPGRSNDWESREHKRRFPLWFKDLNLPVGNSVEELTLQRLACGPSSIVNSWQGYDINGFTLYTTTKDMKSTTQNSGIRVEAIDTSGEKKSYYGTIQEIWELDYGLNIQILVLRCEWVKDTIGVSVDDYGLTIVDHSKTGHKDDPWVLAERVAQVFYVKDPSDERKTIVISGKQQIVGIDNIEDPNNYNQFDDVPLFTDLPMRIKKVERTIDEANMSYVQADGVAKVIKS

SEQ ID NO: 163241 - protein, 314 aa, Oryza sativa
  Clone ID: PAT_MRT4530_62256C.1.pep
MASGGEEKKSRILVVGGTGYIGRHVVLASARLGHPTTALVRDLSPSDPAKSQLLQSFRDAGVTLLHGDLYDHASLLSAVRDADVVISTLGALQIADQTKLIAAIKEGGGGNVRRFLPSEFGLDPDHTGAVEPARSIFTGKAAVRRAVEAAGVPYTYVVSNYFAGYALPTIGQNLPPARPVDSVVILGDGATKVVFVEEGDIGTYTVLAAVDPRAENKTVNIRPAKNAVSHEELVALWEKKTGKKLERVYVPEDAVLKQIQESEIPLNIVLSIAHAGYIRGETTTPLDPATAVEATQLFPDVQYTTVDDYLNRLL

SEQ ID NO: 163242 - protein, 458 aa, Oryza sativa
  Clone ID: PAT_MRT4530_62257C.1.pep
MSELAKKNRYPHRLGSSGYAGHVDQWRETEQRFAAAGKPLLVDPMVERSKNWVWARSTGQVSDEGDILFETPDIEQVTTNLQQIVEKERAGQFVPRRERDQLTVALGTAEHSGRVRGLSSKPSWKIGFPHDAPSYKKRDKYKEQLSYKIYAQVKEHFYSLVAKNPTAFPRLFPDGQQPTQSTQQTTNAPSSVGSVETTPFPMDGITGPTPCSLVVPIGRARKTKEVATGLAIPGCQLHNTAIPEDYARVQVAKYAIHEADRTGSPVGYIDPTRICKRQHTVELREDYEQIGWQDPSRKGRICEAIAQQEEARSSNILSNSNVGARRQRCLNGPLRVDHTSTTAKEADPVHIPSQKQLPIMTGWPRYKQPPGTNLCGYYVCAMLRVNGRYKTTSNQIPEIPYIAQQINNGTTWNVGADLCRFLRRDVCNARGLFYDNKNELAMNDKFKPLREWEKEHMQ

SEQ ID NO: 163243 - protein, 53 aa, Oryza sativa
  Clone ID: PAT_MRT4530_62258C.1.pep
NSFGRESIKLLGYISDISQITLMVLNTLLNSGSKFGTFMVSNGQFQIGLHFSR

SEQ ID NO: 163244 - protein, 1397 aa, Oryza sativa
  Clone ID: PAT_MRT4530_62259C.1.pep
MGLSSAAAGEGPQLCVFDLRRGQQEGQELDKILFFHPTDCPILLQLSVIGLCEGIITFARFAVLLHPLLTRIPLLFVLLLGSSRRIFSPDDDCEVIESEKHSHVFYQAEADIWMVLVVEKNKDIESTWRCGALQGILKEVHSLFTMFHGPIRTLLDRQPSAELARGHLRTFFTDYLSDFNAGKKIQLPTFRDCLKERGTVQMLTISREVALEVQSLTTVLGSCLGNVMCQSLVLFEDLLVSTTLPPDDTLNLYTYAILRLTPRALLSNATSWSYLRKGTSVHAGPTSSSSNGTASVERPLQREKLYKGKDGFVAAGSTTSEVRGAVAWVPILWFQQAEDRMHLCVYQHKNITILLLIPASSLINGDDGIAHVKRHLLENASQNIVTLELKLSRGWGGENAYHVGGYRYLLVDPDRKVSRASPPGKVTTLSKDSLLSLNRLREEIDLEKSRAKRSDSCHDKDFEVCIRAKNNAWVIAKVTRGRELYMALEKAGETLLYASTAIEKFSNRGKRRIRRGRCEGRWHASPSPEGFAGRGEREVARQGTSGSKCSLWLSAIVRHMFTLYDFKLAKLVEMESALEDKSKNVKVHAEGYDDAGMTRFGRDGSEKNSLEEEDPDAADMDWEEGIVFAAEHDECYSHELGETVTVEFTDLPSSTEKKTARRLTAEEKELAELVHRVHLLCLLARGRVIDKACNDPLIQASILSVLPQHVLRNSVDTPILKANELRSLVSWFHNTFSVIAQSDDKGSFKSNLAFALQSYVGTAEEETWSPFIVTPKYCSVISIVVCPFRNMGMGTHLYAAEIVLGPLVLRFSMGKIMMERFLDVTMEGGWSQCTWSDHDYLDSFLAGEDAELSFFFVDHLTANLYRTVEWQISFPSRFVANLDVAGLKPDTKSMGTSNQDEPRLCTKALPSSSFVAGHNEYNNLSPVLSQNNTEGSINTTPKQVKVQGCRKSLSKKLSKCKANQRDSSASLSKDSSSSSQYPSTSSNAEVPRRKGDLEFELQLEMALLASAAKSQDNKLATQLNQSTDSLLSSTPPLKKLRKSEEASSNSSVVWSRNRAPLFWAEVFCGGEASSGRWVHVDVANDIIDGEQKVEAASAVCRKPLRYVVAFAGNGAKDVTRRSCVQTLQSRHGWLREGLQVRENELPAKVVTRPKRTFNSQSIQSNSNSNEDGLKPTMELYGKWQLEPLQLPHAVNGIVPKNERGQVDVWSEKCLPPGTVHLRLPRIFQVAKRLGIDFAPAMVGFDYRNTRCLPVFDGIVVCSEFKNTILEAYAEQEERRQAEERKQEEAQALIRWYQLLCSVVTTQRLKDSYKAPSSEHGPEGPSQDVSQQKGTRKSRSSETKTRSSRLQADRPFDSPFPVHDHEHEYPEEDQSFDEETFVRTKRCPCGFSIQVEEL

SEQ ID NO: 163245 - protein, 52 aa, Oryza sativa
  Clone ID: PAT_MRT4530_6225C.1.pep
ASRRLECLHCTKLSSVGGIGDCNRLLPEEQYTVRKPSEHCRRSASCSLRSAQ

SEQ ID NO: 163246 - protein, 185 aa, Oryza sativa
  Clone ID: PAT_MRT4530_62260C.1.pep
GGGGGEEGGGSPRGGGGGAAGHPGWGRVLKPWRHPEADTLYVEEVDVGEEQPRTICSGLVNYLPIDQLQDSNVIVLANLKPRNMRGIKSNGMLMAASDASHENVELLTPPEGSVPGERVWFGTEDGKDRQSEAASPNQVQHKQIWESVQPHLRTSENCTAFLGEHPMRTSAGVVFCKTLQGARVS

SEQ ID NO: 163247 - protein, 324 aa, Oryza sativa
  Clone ID: PAT_MRT4530_62261C.1.pep
SLTTVLGSCLGNVMCQSLVLFEDLLVSTTLPPDDTLNLYTYAILRLTPRALLSNATSWSYLRKGTSVHAGPTSSSSNGTASVERYRSRSRDTSPGGQNQMHHYFRPLQREKLYKGKDGFVAAGSTTSKVRGAVAWVPILWFQQAEDRMHLCVYQHKNITILLLIPASSLINGDDGIAHVKRHLLENASQNIVTLELKLSRGWGGENAYHVGGYRYLLVDPDRKVSRASPPGKVTTLSKDSLLSLNRLREEIDLEKSRAKRSDSCHDKDFEVCIRAKNNAWVIAKVTRGRELYMALEKAGETLLYASTAIEKFSNRYCEGAFSTD

SEQ ID NO: 163248 - protein, 294 aa, Oryza sativa
  Clone ID: PAT_MRT4530_62262C.1.pep
MAPPNDAGDGDDDKPEMPVVLITGCANGGIGYEYCKAFASLGCRVVATDVPDRVPDLAGLDADHLPLDVTSDESVEGAVARVLAEHGRVDVLVNNAGIGCTGPLAELRGEAVRRAMDVNFLGQLRMVRAVAPHMASRRSGRVVNVGSVVGTAATPWAGPYCASKAAVHAATDALRVELRPFGVHVVKVVPGAVRSGLGHANTAQLAGGQAEWRLYREFAAAIAERARASQAGGATDGGVFAAHVARRVMSARPPREIVYGNMTLLFAALAAAPLWARDAFFAKRFGLDKMLPPR

SEQ ID NO: 163249 - protein, 488 aa, Oryza sativa
  Clone ID: PAT_MRT4530_62263C.1.pep
MVKTSANPNAKGKAAASSSGLPSPKTTPRGVRPKAFKKKAKADPEMQKVAAAEAAATAETASAPPLKPAEVSPAAAVAKENGGQRMSRKEKTKMKEGDQMKEDKKGRIKGKEKKDDKARERKGEAGFIFMCSAKTKPECFQNGVFGLPKGKIDVVEKIQPGAKLFLYDFDLKLLYGIYKAKTKGGLDLVRGAFHGKFPAQVKFKVDKDCLPLPESSFKHAIKENYNSKGKFTQELSLKQVHRLLELFKPISLPQSSIQYVKERHRRLDVFEGRLPHYVEGRRLPRHVEEMHHLRHVEERRLPYDHEERRLPYDHEERRRPRYVEDIRHPQFLKERHAITDSLHDPFRSRHVTHLPELQHAPPTYYHHVAHTFDERYHQPQVDIVYERSAPRAIVEATDREAFLARDYRVPEEIVARSDHVDELYRSYRLATRAMDLHQGPSYVTAAYENPGPAYSESIHQMPVSSTRPNVPGAPVSSLYSFAGAPAYR

SEQ ID NO: 163250 - protein, 176 aa, Oryza sativa
  unsure (1)..(176): unsure at all Xaa locations
  Clone ID: PAT_MRT4530_62264C.1.pep
XGXNXKGXXXPVTQLDXPSLRGKXGFXXGGXFRKXXPPAXXICXGXWGLNLFYXQGGWFXXLXAYXXVPXXVSLSXFVGXEKXGXWXIXFLGXLXGXXWXIXQNRGXXMVXFXMGXXLXRFFFXXXXPXXFFGGFFXKKKKKKKKKKKKKKKKKKKKKKKKKKKKKKKKKKKKKKK

SEQ ID NO: 163251 - protein, 529 aa, Oryza sativa
  Clone ID: PAT_MRT4530_62265C.1.pep
MVADKWALEKAQALQDLEEEFNQQTAKILTCYQLPKHLRLDLHEQHRNDYMVPDDLRLKFVNAVFEGNPRMLDHEEKLKAQARKEADKFWTEAAGAANKAQALQDMKEWYMQLLVNHAFDIEGIPERIKEAYIREIKLDDEELMFKNHVEKKFGICNHETRLRVRAWEESQQFRIKTMADYWAAKKLHALQDLEKAHIQRFMNILDKIDIPDYVQQAYFQKYKVPDDLRLRYINHVEIKFRRMPDDEEEPPKGYISEDYNKLQGFSSVMTYLSTSGWVSQEQHCNDYKVPDNLRVKFITAVFKGNSRILDHKGELKVQARKEAEKFWIEEAATEKKTQALQDMEERFKQQFIKLGYARKGIPEHIQEYYLTDCKLHEDTLLKFRNDVEEKFEMRNHEMQLKIRAWEKTQQFRIEMMADKRAAKKTKALQDMEERYIQDFMNIVDKLDVPEYFQQAYFQKFKVPDDIRLRYINDIEEEFRMLGDKEGYKVHIWDSFKKLKSLITCHLLCGRAQLKTRILGKNLISNKKKQ

SEQ ID NO: 163252 - protein, 418 aa, Oryza sativa
  Clone ID: PAT_MRT4530_62266C.1.pep
MSFKSIDRLIRRNSKTKLSRNIVDGIYDQKEEQYVQSLRELLLANNQLPEKFDDYHVLLRFLKMRGFNIVKAKEMFLNMLKWREECAVDAIAKDFKFEEYDAVKRCYPHGFHGVDRFGRPLYIERIGLVDLNKLMQVSSTDRYVKYHISEQEKTLSLRYPACSLVAKKHIGSTTAIFDVKGLGMNNFSKSGRDLFIEIQKIDSNYYPETLNQLYIINAGAGFRALWKVLKACMEARTLAKIQVLGTNYLSTILEAVDPSNLPDFLGGTCTCSATGGCLLQDKGPWTDQEISQASKGVFGKGQKSFDEISTTVACENFPGHQEPSVGKLHPISGWKRTLGMLLKDNQVGDTNENIQQNKVNEQISEKIQELENCSAQTQETLHALLQKQNELANHIEQLRKLLREAANADNKANVLILK

SEQ ID NO: 163253 - protein, 52 aa, Oryza sativa
  Clone ID: PAT_MRT4530_62267C.1.pep
FRFSFWLGFGCHFYASVANVLCFLNYGFDMQIFFFFSFVVDCYTVVALLCCI

SEQ ID NO: 163254 - protein, 128 aa, Oryza sativa
  Clone ID: PAT_MRT4530_62268C.1.pep
GWGRYAPPMGLWGYNSGFFFIRAPIPFFELLDKGAGPLFCGPQSWGPAVFHEGLFFPSPPGFEGFPISQRTLGFFPFLARQVFFQTVGEDVYFREFKPGIGPLNFPPYKLGRLKTGIWFFVQGKPKAP

SEQ ID NO: 163255 - protein, 54 aa, Oryza sativa
  Clone ID: PAT_MRT4530_62269C.1.pep
ALKLRVCANVLGLVKAKVGAVAPDEPCYSLLDSLVNLDTAICLCTDVKANDLDT

SEQ ID NO: 163256 - protein, 519 aa, Oryza sativa
  unsure (1)..(519): unsure at all Xaa locations
  Clone ID: PAT_MRT4530_6226C.1.pep
MDRPYPPLLPLALLALLFLCLLHGERAAAADDDLTSGTGDGSELWGYVQVRPKAHLFWWYYKSPQRASSPGKPWPTILWLQGGPLKNANRCMSASSSSGQGASGVGLGNFLDVGPLDLNLKPRGSTCLQRADLIFVDRCRQLPLGPRPPPPRGPTCPRNCRRPRRGQPRXNPVGVGYRYADGDARGVTTDWQAATDATELLRALAAKEIPTLQSSPLFLVAESYGGKYAATLGVSLARAIRAGDLKLNLGGVALGDSWISPEDFTLAYTPLLLEVSRLDDNAGDEASKMAATVKEQITAGQLADSQQSWIDLLGFIDKKSASVDMYNFLLDSGMDPVSADLPAASSSSPSSSSAQLMKYSTYLSSQAADSGSNTIEGIMNGVIKEKLKIIPNNLKWQELSDPVYNALVNDFMKPRINEIDELLSYGINVTVYNGQLDVICSTIGAEAWVKKLKWDGLKNFLSLPRQPLKCGSSKGTKAFVRSYKNLHFYWILGAGHFVPADQPCIALSMISSITQSPAS

SEQ ID NO: 163257 - protein, 44 aa, Oryza sativa
  Clone ID: PAT_MRT4530_62270C.1.pep
KHTVTEYWITRIAVVPGFQHQAHTHHLVGTSASIQQGTSAQIAA

SEQ ID NO: 163258 - protein, 286 aa, Oryza sativa
  Clone ID: PAT_MRT4530_62271C.1.pep
MALMVPELLLVVATSEGALASIELACNLLDSIEFDVLVDIAHGVPFNTTGGGEQPLYMGGGCGGGGGGWRGASRSFGVPMDSTGGGEGSFSVDALAYEPFTFGVPMDTSGGGVEHTGGDGAATNVAADHKGRKAGIDYWANTLASAFATDGPLNAAHREITRLITLHGVAAHLLIRCLELHDFPHGDEAAWQRWWEHHDAFVPRAHDALLRLSSATSASAAAEDFLRLRSALSPGRNDWPSEAKQLVRDARRDIGEARDAVILMRDDAVREFFETWMILKRSQASR

SEQ ID NO: 163259 - protein, 315 aa, Oryza sativa
  Clone ID: PAT_MRT4530_62272C.1.pep
MAARSGPPAAAVDPEAVLSHSFPEVSFAYDERDVALYALGVGACGADAIDEKELHLVYHRDGQPHIKALPTFASLFPFKNSNGLGIVDVPGLNFDASLLLHGQHYIEIYKPIHSRANVVNKTKIAGLHDKGKATILEIETTTHVKDSGEVLCMNRSTIYLRGAGGFSDPSRPYSYASYPTNQVSRISIPNSAPSAVYEDQTQQSQALLYRLSGDYNPLHSDPMVAQVAGFTRPILHGLSSLGFAIRAVIKSFCNGDPTAVKSIFGRFLLHVYPGETLVTEMWLQGQRVLYQTKVKERNRAVLSGYVLLKHIPSSL

SEQ ID NO: 163260 - protein, 187 aa, Oryza sativa
  Clone ID: PAT_MRT4530_62273C.1.pep
MALGGVSMAIIAMALGGGGGGGGGSVKGRDMAGSGWAADACCTAATSSTRRSRRPMRASASSRRRRTPFEHVVGSWRDSHRAMAVSAASIRRASWADMQPRLVPEAHLDVLVEDKCAKNQLNREKVQFQQRTGSRSYIAHAYVVQRGLALYSAFAALVLHCIGIAICHSVVAYLYSAKQGQQEVAKL

SEQ ID NO: 163261 - protein, 80 aa, Oryza sativa
  unsure (1)..(80): unsure at all Xaa locations
  Clone ID: PAT_MRT4530_62274C.1.pep
YLEIIVEVVLEIINFQVMSVGDSMSRESICGDGPGVGLVVRRCPWXQISCGILRLELMHVVGEDSIWHTMEVLCAYCLRF

SEQ ID NO: 163262 - protein, 341 aa, Oryza sativa
  Clone ID: PAT_MRT4530_62275C.1.pep
IKELGLRLIELRSVMIDQEIDFANVVCFIDAASEDLITQEKALSSRFLNKIKCEVSQLEQLSANRLKEKNLRIKTKIRELLKCTHLTGNEVEIDLEKEVLEELKMQKEMLKVEVERRSDIVIRAEIWRKSVDQLEALQKGSKNTNKMELMRCELLAKRTEGIKNILVEMVQTWEEKYDSPFSYDGDHLLTILNADAKPSSSEAEGMQKQKAEGQVPAQDLKSLLTPHPKLRRTPRVPVPLEEHVPLQLHVVAPLLLVPPAGAPPPMAQAAQAVQELPAPLPLPDVPVQAGSPPTMISQFNRSRQSLLTSTMLKALQVMKRPALSTFQVTMMIAMTVTTYLE

SEQ ID NO: 163263 - protein, 109 aa, Oryza sativa
  unsure (1)..(109): unsure at all Xaa locations
  Clone ID: PAT_MRT4530_62276C.1.pep
MEAADTAIARWLSRHDPTTCSTACAASATRPMRALAASSAASRRSPPCSRRRPPIRSPPCPSPSXPPPPPPPPPKAMAMMAMDTPPKAMAMGIEARPRRRRTTAWWAAA

SEQ ID NO: 163264 - protein, 886 aa, Oryza sativa
  Clone ID: PAT_MRT4530_62277C.1.pep
MVMWYLPIKDRLKRLYSNPTDAELMRWHQESRKIYGMIRHPADARQWKTFDAKHPEFAKDPRNVRFALSTDGMNPFGDLSSSHSTWPVLLTMYNLPTWICQKRKYILLTILIQGPNQPGIDIDVFLEPLMEDMEELWKEGLRLWDEFKREHFNLRAIIFVTINDLPANFSLSGQIKGKTGCLICLEKTSYKYLTSSLKTVYMRHRRFLPQRHRYRKMARLFDNTMENDTAPVARGGTYVYEITKKIKVVYGKGKKKTVKRKKADGDNGTASPFKKHSIFFKYLDYWKDLEIRHAIDVMHLEKNVFDSTVGTLLDIPSKTKDGLKSRNDLVDLSIRHDLHPVVLPNGKTEILPACYSLTLEEKKAFCKCLQGVRVPTGFASNIRKLVSMKDLSISGYNAHDCHRLLTVFLPIAIRAVKPVHTKVVITKLCYFFNRISQKVFDPLELGPLQTFAVETVCQLEMYFPPSFLDMMEHLIVHIIPRIIELGPLYLHQMWAYERYMSILKGYVRNRAHPEGSMIEGYTTEEAVECCMDYIKDANAIGIPVHRHEGRLSGRGTVGRKQFFDNDYKKVSAAHNSVPQQLAIVEPFIERHLEEIKACFPGRSNDWISREHKRRFPLWLKDLNLPVGDSVEELTLQRLACGPSSIVNSWQGYDINGFTLSTTTKDMKSTAQNSGLRVEAIDTSGEKRSYYGTIQEIWELYYGLNIQIPVLRCEWVKDTIGVSVDDYGLMIVDHSKPGHKDDPWVLAERVAQVFYVKDPSDERKTIVISGKQQIVGIDNIEDPNDYNQFDDVPLFTDLPMRIKKVERTIDEANMSYVRADGVAKIPEIPYIAQRFNHTTILNVAADLCRFIRRDVCNARGLFYDNQSELAMDDKFKPLREWEKEHMQ

SEQ ID NO: 163265 - protein, 1103 aa, Oryza sativa
  Clone ID: PAT_MRT4530_62278C.1.pep
MEYGFTANYKVWTYHGEFTNPEDDDEELSFEMNEAENFIIEDMSRERMDVDVSTDSDDFDGGFDLEDMLRHVEPEVLAVENDTAPVARGGTYVYEITKKIKVVYGKGKKKTVKRKKVDGNNGTASPFKKHSIFFKYLDYWKDLEIRHAIDVMYLEKNVFDCTVGTLLDIPSKTKDGLKSRNDLKVFDPLELGPLQTFAVETVCQLEMYFPPSFLDMMEHLIVHIVPQIIELGPLYLHKMWAYERYMSILKGYVRNRAHPEGSMIEGYTTEEAVECCMDYIKDANAIGILVHRHEGRSNDWISREHKRRFPLWLKDLNLPVGDSVEELTLQRLACGPSSIVNSWQGYDINGFTLSTTTKDMKSTTQNSGIRVEAIDTSGEKRSYYGTIQEIWELDYGLNIQIPVLRCEWVKDTTGVSVDDYGLTIVDHSKTGHKDDPWVLAERVAQVFYVKDPSDERKTIVISGKQQIIDIDNIKDPNDYNLFDDVPLFTDLPMRIKKVERTIDEANMSYVRADGVAKDLYPLAVAVAAARTSPPSPSSPSPPHGPLPPCRRRRRRTDLSPLAVAVAAARSSPPPSRPRYRRLLPEVAPPLAVADAAARTSTPSPSPSLSLETWRTPSDPFPMEITQVAPCDDDPDYIPIEQAMVVRRRSKRKAGRNRTEKEVEMDTATMGSPSTTGSAVQVQQCLWHSSGTLVRMRCPINVKLWETVDDNIKTLLWNELQKYFVFPPGSEDDWDTFVADHTTAEALALRKKMSELAKKNRYPHRLGSSGYAGHIDQWREIEQRFATAGKPLLVDPMVERSKNWVWARSTGQVSDEGDILFETPDIEEVTTNLQQIVEKERSGQFVPRRERDQLTAALGTAEHSGRVRGLSSKTSWKVGFPQDAPSYKKRDKYKEQLSDKIYAQVKEHFYSLAAENPTAFPRNSEKRKELAHVLSDSQKSVLEAQDEVQSWLSADVPETYEYGKPFLPTYLMNKLPWEMRVMHECMQFHEADRTGAKVGYVDPTRICKTQHTVELREDCEQLVGKTPEEKEEYVKTLHKRKKLEVATYLAIAMLAHADEDVLMIPEIPYIAQRFNDTTILNVAADLCRFIHRDVCNARGLFYDN

SEQ ID NO: 163266 - protein, 64 aa, Oryza sativa
  Clone ID: PAT_MRT4530_62279C.1.pep
QLSRVHPRYLLTWSFFCFKVGFFQEGSFGSSITSPFLRMALLLGYVMGFFPYNCSSLIKFMCFL

SEQ ID NO: 163267 - protein, 143 aa, Oryza sativa
  Clone ID: PAT_MRT4530_6227C.1.pep
MAVAAAAGPWWIGSMDRGKRAAHHVVQTWRRRGTHVTASWQPRGRRDRMAPIYRPVDRTADAARGRRARARLKPAQRPWRAAARGGDRPAKRLGGGASAKQRGREGERGGGAAPTTIDDDERRMVMATARRAPGPPKGSKGMS

SEQ ID NO: 163268 - protein, 1911 aa, Oryza sativa
  unsure (1)..(1911): unsure at all Xaa locations
  Clone ID: PAT_MRT4530_62280C.1.pep
MADKTLREFAAPSVDNVAIGPQINMGDVDFGLKSSLITMAQASPFSGKPNEDPTLICSSSWRSIAQLLQWTHSHVPRSLAAAAGGAFFSKTVRGAVDLIEKMVSNMGWSEERLQTRQRGMHTVKETELLTAKLDLLMKHLDDHDKRPQGTVKALDSHVTCEVCGGTGHSGNNCPEIHEEAKYMGNNNNGYRPQGGQGWNEPRPYYQGGTNGIAKEVPSNDSADKEIQPEKAVPQEYCDTRLLPFPQRSRKPSVDEQFAHFVEVIQKIHINVPLLDAMQVPTYARYLKDILNNKRLLPTTEFGQALYDLGASVSVMPKDVFDKLNFTVLAPTPMRLQLADSSVRYPVRIAEDVPVKIRDFFIPVDFVVLDMDTGKETALILGRPFLSTARANIDVGTGSIRFHINGKEEKFYFQLRTEQFSMVRIKYRPNPQNIQVVEVEPPKTDSLVKFMQNFLEKETTMPRNRYWKTPMDRSSWMYEMRRMQPVFIKEASKFIDQAKAHALRENMTKIFCPCRHCKNQKLLVDPDEILGHIMEYGFTANYKVWTYHGEFADPEDDNEELSFEMNKAENFIIEDMSRERMDVDVSTDSDDFEGGFDLDDMLRHVEPKVLAGRSRGLENWQALEKASKDLLYDETKGCDKDFTVLRSVLELLRLKTKHGWLDTSFNDLMSLLLVLLPKPNFVPSNTYQAKKLICPLSLGVEKIHACKNHCILYRKEYANLESCPMCGTSRYKMGNGPIDSECTDPDSDKGKRGKIPSMVMWYLPIKDRQKRLYSNPTDAELMRWHQESRKIDGMIRHPADARQWKKFDAKHPEFAKDPRNVRFALSIDGMNSFGDLSNSHNTWPVLLTMYNLPTWICQKRKYILLTILIQGPNQPGIDIDIFLEPLMEDMEELSKEGLRLWDEFKREHFNLGKTGCLICLEKTSYKYLTSSLKTVYMRHRRFLPQRHRYRKMARLFDNIVENDTAPEARSGTYVYEITKKIKVVYGKGKKKTVKRKKADGDKDTALPFKKHSIFFRYLDYWKDLEIRHAIDVMHLEKNVFDSTIGTLLDIPSKTKDGLKSHNDLVDLAIRHDLLPVVLPNGKTEIPPACYSLTLEEKKAFCKCLQGVRVPTGFASNIRKLVSMKDLTISGYNAHDCHRLLMVFLPIAIRAVKPVHTKVVITKLCYFFNRISQKMWAFERYMSILKGYVLNRAHPEGSMIEGYTTEEAVECCMDYIKDANAIGIPVHRHEWRLSGRGTVGRKQFFDNEYKMVSAAHNNVLQQLAIDEPFIERHLEEMKACFPGXLTLQRLACGPSSIVNSWQXPVLRCEWVKDTTGVSVDDYGLTIVDHSKTGHEDDPWVLAERVAQVFYVKDPSDERKTIVISGKQQIVGIDNIEDPNDYNQFDDVPLFTDLPMRIKKVERTIDEANMSWKMSNDKVPSNAPIAPQEGNAPQKSGSNKQPDASSEETWRTPSDPFPMEITQVAPRDDDPYYIPMEQADGKPVEPPIVRSKFSNTCGTLVRTRFPINVKLWETVDDNIKTLLWNELQKYFVYPPGSELISTYDPKEIDKDKEKFMFSAFRNSEKRKKLAHVMSDSQKSVLAAQDEVQSWLSADVPETYEYGKPFLPTYLMNKLPWEMRVIHEWYIKASRKGLGFISVAVPEGAFMSGPNGIFFISFQDLYALYKLDKMDVNLVAVFCLMQFHEADRTGAKVGYVDPTRICKTQHIVELREDCEQLVGKTPKEKEEYVKTLHKRKKLEVATYLAIAMLAHADKDDLMVPYAFTDHYILFLVYPKDQLIISLDPAHYDKETFMEFLTILNLAHKYYRKRGGPVHITSQKQLSVRTGWLCYKQPPGTNLCGYYVCKMLRVNGRYKTTSNRIPKIPYIAQQFNDNTILNMAADLCRFIHRDVCNARGLFYDNQSELAMDDKFKPLRE

SEQ ID NO: 163269 - protein, 216 aa, Oryza sativa
  unsure (1)..(216): unsure at all Xaa locations
  Clone ID: PAT_MRT4530_62281C.1.pep
KPRIRRQRHRLLLVVILVIILIIVGGGSQGHRSHSRQRRRRPPRRRIRPPTDLRAPLRPHRCRRPSPPPDRIPRVVAAYARCRRQYSGGEDAAVEPPPPPNCRCRHRPLPAPLPLDLXRGGAPPPPPPPATGSGGGEERHCCWDAGGPPAPPLPLDPAEGRAPAPLSAASPPAGREGVAARHGRALPGPHGEGEEVGRCSTLSPVAARWGKGGATA

SEQ ID NO: 163270 - protein, 1030 aa, Oryza sativa
  Clone ID: PAT_MRT4530_62282C.1.pep
MPPPTTTTAAAADTTSLSASHSPITVVQPLPRQCRQPATVLSPPTSRCCHRRHEIHTIATVAGAPCSRAVATADVTASSAVPPPPRACPAPDPPSGGGDPPLATIAILTGLRATASIAAWRRSHAPGRAATSPSCATRATVAAATSSPPPARLFPRRPPSPGPPPPPLRPATKRHPAGSGRAGADPDGLLPSPPGQLPGPPSACWAKAPPPPSPRPRGFAGTRSGGGEAEKEGGRRKKTAAASPLVSPAKAHALRENMTKIFCPCRHCKNQKLLVDPGEILGHIMEYGFTANYKVWTYHGEFANPEDDDEELSFEINEAENFIIEDMSRERMDVDVSTDSDDFDGGFDLEDMLRHVEPEVLAGRSRGLENWQALEKASKDLLYDETKGCDKDFTVLRSVLELLRLKAKHGWSDTSFNDLKSLLRVLLPKPNFVPSNMYQAKKLICPLSLGVEKIHAYSDKGKRGKIPSMVTWYLPIKDRLKRLYSNPTDAELMRWPQESWKIDGMIRHPADACQWKTFDAKHPEFAKDPRNVRFALSTDGMNPFVENDTAPVARGGTYMYEITKKIKVVYGKGKKKTVKWKKADGDNGTASPFKKHSIFFKYLDYWKDLEIRHAIDVMHLEKNVFDSTVGTLLDIPMLPNGKTEIPPACYSLTLEEKKAFCKCLQGKVFDPLELGPLQTFAVETVCQLEMYFPPSFLDMMEHLIVHIVPQIIELGPLYLHQMWAYERYMSILKGYIPVLRCEWVKDTTGVSVDDYGLTIVDHSKIGHKDDPWVLAERVAQVFYVKDPSDERKTIVISGKQQIVGIDNIEDPNDYNQFDDVPLFTDLPMRIKKVERTIDEVNMSYVRADGVAKVAVAAARTSPPSPSPSPPPSRPRRQVVPATAGSSPKSPCPSPSPMPPPGPLPPRRRRRRRTDLSPLAVAIAAARSSPSLAVADAAARTSTPSLSLGGSGKKRRGERSKNKLPKETYNVIALDQDGKPVEPPIVRSKFSNACGTLADWDARGLFYDSQSELAMDDKFKPLREWEKEHMQ

SEQ ID NO: 163271 - protein, 70 aa, Oryza sativa
  Clone ID: PAT_MRT4530_62283C.1.pep
HIHHLSPKKISLTVTDYLSLFAPNARLSNRHTPKYRTQSASYTRHFLYQLIRRTLRLNLTMSLYRLHRAM

SEQ ID NO: 163272 - protein, 334 aa, Oryza sativa
  Clone ID: PAT_MRT4530_62284C.1.pep
MDNSSDSQRRKRCAACYREFNKKEHLVEHMRTSLHSAHDPRCGVCGKHCRSLDALRDHLTGALPKPECAAAFASRGCPLCLHVVLPPTAAAHSCPAAAPPLGGVLALGCKMVGAGSDGSLDVCARVCVVDEQERVVLDTFVKPHIPVTHYRYDTTGIRPEHLRDAMTPKQAARRVQELLLNGEPAWKARSSRGRARILVGHGLDHDLESLGMDYPEYLKRDTARYPALMKTSNSRLSNSLKYLTLAYLGYHIQIAGRHHHPYDDCVAALRLYRRMRGARPHTCRDAGVGPHAPPPTPAEAFPAWRQRELERMSPEELLQLSTSDYYCWCLDATD

SEQ ID NO: 163273 - protein, 812 aa, Oryza sativa
  Clone ID: PAT_MRT4530_62285C.1.pep
MEYGFTANYKVWTYHGEFADPEDDDEELSFEMNEAENFIIEDMSRERMGVDVSTDSDDFEGGFDLEDMLRLVEPEVVAGRSRGLENWQALEKALKDLLYDETKECDKDFTVLRSVLELLRLKAKHGWSDTSFNDLMSLLRVFLPKPNFVPSNTYQTKKLICPLSLGVEKIHACKNHCILYHKEYADLESCPTCGTSRYKTGNGPVDTECTDPDSDKGKRRKIPSMVMWYLPIKDRLKRLYSNPIGAELMRCRKTDGPNQPRIDIDVFLEPLIEDMEELWKEGLRLWDEFKREHFNLCVIIFVTINDLPANFSLSGQIKGKTGCLICLEKTSYKYLTSSLKTVYMRHRRFLPQRHRYRKMARLFDNTVENDTAPEARSGTYVYEITKKIKVVYGKGKKKTVKMKKADGDKDTALPFKKHSIFFRYLDYWKDLEIRHAIDVMHLEKNVFDSTIGTLLDIPSKTKDGLKSRNDLVDLAIRHDLHPVVLPNGKTEIPPACYPLTFEEKKAFCKCLQGVRVPTGFSSNIRKLVSMKDLTISGYNAHDFHRLLTVLLPIAIRAVKPVYTKKVFDPLELGPLQTFVVETVCQLEMYFPASYLDLMEHLIVHIVPQIIELGPLYLHQMWAYERYMSILKGYVCNRAHPEGSMIEGYTTEEAVECCMDYIKDANAIGIPVHRHEGRLSGRGTVGRKQFFDNDYKKVSTAHNSILQQLAIVEPFIERHLEEIKACFTGRFDDWVSREHKRRFPLWFKDLNLPVGDSVEELTLQRLACGSSSIVNSYQGYDINGFTLYTTTKDMKSTAENSGICVEAIDTTGE

SEQ ID NO: 163274 - protein, 85 aa, Oryza sativa
  Clone ID: PAT_MRT4530_62286C.1.pep
SLTSQKTSVKIHHLEGANTFNKPMANWEYGTAGTLLLGRFHHSVQIGQHKERSALQNRIHRSQQNGTRFFQIFQSLMEEEGTFNR

SEQ ID NO: 163275 - protein, 646 aa, Oryza sativa
  Clone ID: PAT_MRT4530_62287C.1.pep
PSARRSTHICIATAKKRRDGDGGVGRRRRRRGAAALLREVATARFARQVVLGRWFMVFACLLILSASGATYIFGIYSKVLKSSLGYDQRTLNTLSFFKDLGANVGVISGLINEVTPPWVVLAMGAAMNLAGYLMIYLAIDGRTARPPVWLMCIYICVGANSQSFANTGALVTCVKNFPESRGIVLGLLKGFVGLSGAIFTQLYVAIYGDDAKSLVLLIAWLPAAISILFVHTVRIMPYLPSRRRRADGELEASAATSNDAFFCFLYISIALATYLLTMIVVQNQTNFSHTAYVVSATALLLVLFLPLVVVIKQEYQIKKELDDSLREPPTVTIEKPAAAAMQMSAITTKPKTETPSSSSPAPAPPSCCLGSCLKHMFNPPAQGEDYTILQALVSVDMLVLFLATICGVGGTLTAIDNMGQIGQSLGYPAKSIKTFISLISIWNYAGRVTSGFASEMFLARYRFPRPLMLTAVLLLACVGHLLIAFGVAQSLYAASVIIGFCFGAQWPLLFAIISEVFGLKYYSTLYNFGSVASPVGAYVLNVRVAGYLYDVEAARQHGGSLAGGDKTCLGVQCFRKAFLIITAATVAGALISLVLVWRTRNFYKGDIYAKFRENTATDEATTNGNSADTAAEKRSTLVNDEDSKKG

SEQ ID NO: 163276 - protein, 1469 aa, Oryza sativa
  Clone ID: PAT_MRT4530_62288C.1.pep
MVASTCQIDGGSRITDRVYSKSKVFAEANAVRPALAHSALLRVSVTPRDMAKEHALRENMTKIFCPCRHCKNQKLLVDPGEILGHIMEYGFTANYKVWTYHGEFANPEDDDEELSFEMNEAENFIIEDMSRERMVVDVSTDSDDFDGGFDLEDMLRHVEPEDRLKRLYSNPTDAELMIWHQESRKIDGMIRHPVDARQWKTFDAKHPEFAKDPRNVRFALSTDGMNPFGDLSSSHSTWPVLLTMYNLPTWICQKRKYILLTILIQGPNQPGIDIDVFLEPLMEDMEELWKEGLRLWDEFKREHFNLRAIIFVTINDLPANFSLSGQIKGKTGCLICLEKTSYKYLTSSLKTVYMRHRRFLPQRHRYHKMARLFDNTVENDTAPVARGGTYVYEITKKIKVVYGKGKKKTVKRKKADGDNGTASPFKKHSIFFTYLDYWKDLEIRHAIDVMHLEKNVFDSTVGTLLDIPSKTKDGLKSRNDLKVFDPLELGPLQTFAVETVCQLEMYFPPSFLDMMEHLIVHIVPQIIELGPLYLHQMWAYERYMSILKGYVRNRAHPEGSMIEGYTTEEAVECCMDYIKDANAIGIPVHRHEGRLSGRGTVGRKQFFDNDYKKVSAAHNSVLQQLAIVEPFIERHLEEIKACFPGRSNDWISREHKRRFPLWLKDLNLPVGDSVEELTLQRLACGPSSIVNSWQGYDINGFTLSTTTKDMKSTTQNSGIRVEAIDTSGEKRSYYGTIQEIWELDYGLNIQIPVLRCKWVKDTIGVSVDDYGLTIVDHSKTGHKDDPWVLAERVAQVFYVKDPSDERKTIVISGKQQIVGIDNIEDPNDYNQFDDVPLFTDLPMRIKKVERTIDEANMSYVRADGVAKDLSPLAVAVAAARTSPPSPSPSPPPGRRRHRTELSPLAVAIAAARSSPPPSRPRYRRLLPEVAPPLAVADATARTVALAVAVAAASNKQPGASSEETWRTPSDPFPMEITQVAPRDDDPDYIPIEQAMVVRRRSKRKAGRNRTEQEVEMDTATSAPELDDNIKTLLWNELQKYFVFPPGSEKNLPPFTDYGHISQADWDTFVADRTTAEALALRKKMSELAKKNRYPHRLGSSGYAGHVDQWREIEQRFAAAGKPLLVDPMVERSKNWVWARSTGQVSDEGDILFETPDIEEVTTNLQQIVEKERSGQFVPRRERDQLTAALGTAEHSGRVRGLSSKTSWKVGFPQDAPSYKKRDKYKEQLSDKIYAQVKEHFYSLAAENPTAFPRNSEKRKELANVLSDSQKSVLAAQDEVQSWLSADVPETYEYGKPFLPTYLMNKLPWEMRVMHECMQFHEADRTGAKVGYVDPTRICKTQHTVELRQDCEQLVGKTPEEKEEYVKTLHKRKKLEVATYLAIAMLAHADKDVLMVPYQFTAHKYYRKRGGPVHIPSQKKLSVRTGWPIPEIPYIAQRFNHTTILNVAADLCRFIRCDVCNARGLFYDNQ

SEQ ID NO: 163277 - protein, 1605 aa, Oryza sativa
  Clone ID: PAT_MRT4530_62289C.1.pep
MEYGFTANYKVWTYHGEFANPEDDDEELSFEMNEAENFIIEDMSRERMVVDVSTDSDDFDGGFDIEDMLRHVEPEVLAGRSRGLENWQALEKASKDLLYDETKGCDKDFTVLRSVLELLRLKAKHGWSDTNPDSDKGKRGKIPSMVMWYLPIKDRLKRLYSNPTDAELMRWHQESRKIDGMIRHPADARQWKTFDAKHPEFAKDPRNVRFALSTDGMNPFGDLSSSHSTWPVLLTMYNLPTWICQKRKYILLTILIQGPNQPGIDIDVFLEPLMEDMEELWKEGLQLWDEFKREHFNLRAIIFVTINDLPANFSLSGQIKGKTGCLICLEKTSYKYLTSSLKTVYMRHRRFLPQRHRYRKMARLFDNTVENDTAPVARGGTYVYEITKKIKVVYGKGKKKTVKRKKADGDNGTASPFKKHSIFFKYLDYWKDLEIRHAIDVMHLEKNVFDSTVGTLLDIPSKTKDGLKSRNDLKVFDPLELGPLQTFAVETVCQLEMYFPPSFLDMMEHLIVHIVPQIIELGPLYLHQMWAYERYMSILKGYVRNRAHPEGSMIEGYTTEEAVECCMDYIKDANAIGIPVHRHEGRLSGRGTVGRKQFFDNDYKKVSAAHNSVLQQLAIVEPFIERHLEEIKACFPGRSNDWISREHKRRFPLWLKDLNLPVGDSVEELTLQRLACGPSSIVNSWQGYDINGFTLSTTTKDMKSTAQNSGIRVEAIDTSGEKRSYYGTIQEIWELDYGLNILIPVLRCEWVKDTIGVSVDDYGLTIVDHSKTGHKDDPWVLAERVAQVFYVKDPSDERKTIVISGKQQIVGIDNIEDPNDYNQFDDVPLFTDLPMRIKKVERTINEANMSYVQADGVAKAAKISQVAVAVVPATAGSSPKSPRPTPSPPPPSGPLPPRLCRRRRQDLSPLAVAVATARTSPPSPSPSPPPSRRRHRTELSPLAVAIAAARSSPPPSRPRYRRLLPEVAPPLAVADATARTSPTPPSPSPPHGPLPPRRCHRLRQFVPAVARNKQPDASSEETWRTPSDPFPMEITQVAPRDDDPDYIPIEQAMVVRRRSKRKAGRNRTEQEVEMDTATSAPERTETSTSADGSGKKRRGERSKNKLPKESYNVIALDQDGKPVEPPIVRSKFSNACGTLVRTRCPINVKFWETVDDNIKTLLWNELQKYFVFPPGSEADWDTFVADHTTAEALALRKKMSELAKKSRYPHRLGSSGYAGHVDQWREIEQRFAVAGKPLLVDPMVERSKNWVWARSTGQVSDKGDILFETPDIEEVTTNLQQIVEKERSGQFVPRRERDQLTAALGTVEHSGRVRGLSSKTSWKVGFPQDAPSYKKRDKYKEQLSDKIYTQVKEHFYSLAAENPTAFPRNSEKRKELAHVLSDSQKSVLAAQDEVQSWLSADVPKTYEYGKPFLPTYLMNKLPWEMRVMHECMQFHEADRTGAKVGYVDPTRICKTQHTVELREDCEQLVGKTPEEKEEYVKTLHKRKKLEVATYLAIAMLAHADKDVLMVPYQFTAHKYYRKRGGPVHIPSQKKLSVRTGWPIPEIPYIAQRFNDTTILNVAADLCRFIRRDVCNARGLFYDNQSELAMDDKFKPLREWEKEHMQ

SEQ ID NO: 163278 - protein, 102 aa, Oryza sativa
  unsure (1)..(102): unsure at all Xaa locations
  Clone ID: PAT_MRT4530_6228C.1.pep
IGYAPPRXHKAASDVRDEFVSVTEKLMDELAQCYNVLPQLDINNTIDHRPEGGEKWFLENEKTVTQFCRKLAAERPLKDIRDEYNYPKKKGIKDECSRLLEG

SEQ ID NO: 163279 - protein, 84 aa, Oryza sativa
  Clone ID: PAT_MRT4530_62290C.1.pep
SYLCYSHSRIGAIKGKKRDLEQNCTKKKEECLLVRFFIYTYVDYVSLLAYSPPRDELPPPPPDPAMSSKAASTSGMSGRSCGES

SEQ ID NO: 163280 - protein, 86 aa, Oryza sativa
  Clone ID: PAT_MRT4530_62291C.1.pep
RATAGTTWRRRWQRRGGRGPCGGDGDLAAATATARGERSWQWRRRRRGAGRLRGGAGGSGDDLAAGTTWRRRWQRRGGADHRMRAA

SEQ ID NO: 163281 - protein, 54 aa, Oryza sativa
  Clone ID: PAT_MRT4530_62292C.1.pep
MNGMSKDTSSSYALNMASWDTIPAFEHCADRNCTPKIRCTGGTSEFRVAVIVLY

SEQ ID NO: 163282 - protein, 152 aa, Oryza sativa
  unsure (1)..(152): unsure at all Xaa locations
  Clone ID: PAT_MRT4530_62293C.1.pep
LATAGTTWRXATTWRRRWQRRGGRGPCGGDGHLAAATATARATVLAVASATARGGATSGRSRRWRGXLWGGAGGGGDDGDGDLGNFGAQIIACGRLKGPHGKXIFPCGRHKPAACEKDLSMRAVKPAACEKDLSMRAVKPAACEKDLSMRAV

SEQ ID NO: 163283 - protein, 42 aa, Oryza sativa
  Clone ID: PAT_MRT4530_62294C.1.pep
VNDMPYRVCFVCILSLLKPLCNFSVKHVNVHVIRFSVLYNMN

SEQ ID NO: 163284 - protein, 514 aa, Oryza sativa
  Clone ID: PAT_MRT4530_62295C.1.pep
MANVDASQWLMLLLAFLVALFILLSLRKCGGRSRVPPGPLAVPVLGNLLWLSHSSADLEPLLRRLIAVYGPVVSLRVGSHLSIFVADRRVAHAALVERGAALADRPEVTRALLGENGNTISRGNYGPTWRLLRRNLVAETLHPSRARAAFAPARSWARRALVDGLVGGGAVLADAFRHAMFCLLVLMCFGEWLDEAAVRAIGDAQHGWLLHYATKMKVFAFCPAVTKHIFRGRIQTSLALRRRQKELFMPLISARRERKNQLAERAVPEKETTTFEHSYVDTLLDIKLPEDGGDRALTDDEMVRLCSEFLDAGTDTMSTTLQWIMAELVKNPSIQSKLHDEIKSKTSDDHDEITEEDTQKMPYLKAVILEGLRKHPPGHFALPHKAAEDMEVGGYLIPKGATVNFMVAEMGRDEKEWENPMEFMPERFLPGGDGEGVDVTGSKGIRMMPFGVGRRICAGLNTAMLHLEYFVANMVREFEWREIAGEEVDFAEKLEFTTVMAKPLRAQLVRRRMN

SEQ ID NO: 163285 - protein, 1291 aa, Oryza sativa
  Clone ID: PAT_MRT4530_62296C.1.pep
MEYGFTANYKVWTYHGEFANPEDDDEELSFEMNEAENFIIEDMSRERMVVDVSTDSDDFDGGFDLEDMLRHVEPEVLAGRSRGLENWQALEKASKDLLYDETKGCDKDFTVLRSVLELLRLKAKHGWSDTKCTDPDSDKGKRGKIPSMVMWYLPIKDRLKRLYSNPTDAELMRWHQESRKIDGMIRHPADARQWKTFDAKHPEFAKDPRNVRFALSTDGMNPFVENDTAPVARGGTYVYEITKKIKVVYGKGKKKTVKRKKADGDNDTASPFKKHSIFFKYLDYWKDLEIRHAIDVMHLEKNVFDSTVGTLLDIPSPLQTFAVETVCQLEMYFPPSFLDMMEHLIVHIVPQIIELGPLYLHQMWAYERYMSILKGYVRNRAHPEGSMIEGYTTEEAVECCMDYIKDANAIGIPVHRHEGRLSGRGTVGRKQFFDNDYKKVSAAHNSVLQQLAIVEPFIERHLEEIKACFPGRSNDWISREHKRRFPLWLKDLNLPVGDSVEELTLQRLACGPSSIVNSWQGYDINGFTLSTTTKDMKSTTQNSGIRVEAIDTSGEKRSYYGTIQEIWELDYGLNIQIPVLRCEWVKDTIGVSVDDYGLTIVDHSKTGHKDDPWVLAERVAQVFYVKDPSDERKTIVISGKQQIVGIDNIEDPNDYNQFDDVPLFTDLPMRIKKVERTIDEANMSYVRADGSAGSQNFLSPGSRETLAARLPKFPKSPSPSSPPPPAPPQSRPAPRRRRQDLSPLAVAVAAARTSPPSPLPSPPPGRRRHRTELSPLAVAIAAARSSPPPSRPRYRRLLPEVAPPLAVADATARTSPPSPSPSPPHGPLPPRRCHRRRQVVAAARSSPPSLGGSGKKRRGERSKNKLPKETYNVIALDQDGKPIEPPIVRSKFSNACGTLVRTRCPINVKLWETVDDNIKTLLWNELQKYFVFPPGSEADWDTFVADRTTAEALALRKKMSELAKKNRYPHRLGSSGYAGHVDQWREIEQRFAAAACSPGSALSSNLSTYTPICSAFRNSEKRKELAHVLSDSQKSVLAAQDEVQSWLSADVPETYEYDKPFLPTYLMNKLPWEMRVMHECMQFHEADRTGAKVGYVDPTRICKTQHTVELRQDCEQLVGKTPEEKEEYVKTLHKRKKLEVATYLAIAMLAHADKDVLMVPYQFTDHYILFLVYPKDQLIISLDPAHYDKETFMEFLTILNLAHKYYRKRGGPVHIPSQKKLSVRTGWPIPEIPYIAQRFNDTTILNVAADLCRFILRDVCNARGLFYDNQSELTMDDKFKPLREWEKEHMQ

SEQ ID NO: 163286 - protein, 392 aa, Oryza sativa
  Clone ID: PAT_MRT4530_62297C.1.pep
MTNEQRVVECGGGVNEVRRCAGRTHAVSAGRNAAARPSRACRDRGIPRRGGTASLTCFYLVILPPILYKAGRKPSRIEDSQPDRQINTAPDGFKPPNRPVGPFNVCQNSCAYIGLGSANPHRILLGRVYQRRSLIWHFVGCKSKGRKKLVDMTCKCTVILITMIFDMACKCIVILITMMYTMSTTLPWIMAELVKNPSIQAKLYEEIKATVSDDHDEITEEDTQKMPYLKAVILEGLRKHPLGHFALPHKAAEDMDVGGYLIPKGATVNFMVAEMGRDEREWENPMQFMPERFLPGGDGEGVDMTGSKRIRMMPFGVGRRMCAGINTAMLHLEYFVANMVREFEWKAVVGDKVDFAEKLSSPPSWRSHSARSWCSGASIKRAFNQVFSTRYK

SEQ ID NO: 163287 - protein, 444 aa, Oryza sativa
  Clone ID: PAT_MRT4530_62298C.1.pep
MGSKSYPTVSDEYLAAVGKAKRKLRGLIAEKNCAPLMLRLAWHSAGTFDVSSRTGGPFGTMKNPGEQSHAANAGLDIAVRLLDPIKDQLPILSYADFYQLAGVVAVEVTGGPEVPFHPGRQDKPEPPPEGRLPDATQGSDHLRQVFSAQMGLSDKDIVALSGGHTLGRCHKERSGFEGAWTSNPLIFDNSYFTELVSGEKEGLLQLPSDKALMADPAFRPLVEKYAADEDAFFADYAEAHLKLSELGIPAAARVLDPAINTRCPPPHAVVMRMRSRSRRSIAASVSPPGDPSIRDPISLPSKEPPACASASFSLLFGHSPRSPPGPLTSADLMEASGDGLKVAYQGCPGAYSEAAAKKAYPSCHTVPCEYFETAFQAVENWVADRAVLPLENSLGGSIHRNYDLLLRHRLHIVGEVRLAVRHCLLAKSWCEDPKFEKCHEPSSK

SEQ ID NO: 163288 - protein, 108 aa, Oryza sativa
  Clone ID: PAT_MRT4530_62299C.1.pep
MLMRDKCPENKHWVHRSTMPSFYLEILILLNHSTGMEEKEKYENMLTFPGVCPKRNSTSWTSKVQMRIKTQTSHSIPQKREFRYFRKLLPSKQVLSNIFSSQSQGTKR

SEQ ID NO: 163289 - protein, 96 aa, Oryza sativa
  Clone ID: PAT_MRT4530_6229C.1.pep
SRSGGSSAQRLRCTCSGGAAAPRCSGGSSAGPRLLGLVVAACSVAPRRSGSPVAWDLHDGEVARRKLGEEQQKPPAHPSLLLCDVGLSPILEFFFG

SEQ ID NO: 163290 - protein, 245 aa, Oryza sativa
  Clone ID: PAT_MRT4530_622C.1.pep
LPGFEGVSNPGAVDYGLRRFDHVVGNVPELAPVAAYISGFTGFHEFAEFTAEDVGTAESGLNSVVLANNAETVLLPLNEPVHGTKRRSQIQTYLDHHGGPGVQHIALASDDVLGTLREMRARSAMGGFEFLAPPPPNYYDGVRRRAGDVLSEEQINECQELGVLVDRDDQGVLLQIFTKPVGDRPTFFLEMIQRIGCMEKDESGQEYQKGGCGGFGKGNFSELFKSIEEYEKSLEAKQAPTVQGS

SEQ ID NO: 163291 - protein, 112 aa, Oryza sativa
  Clone ID: PAT_MRT4530_62300C.1.pep
VGLVRQKMKYRGGLFMRMSTYPSHGPIHFRAPSKILWRTIRGMIPHKTKRGEAALARLKTYEGVPPPDDKTKRLVIPDALKVLRVQPGHKYWLLGELSKEGGWNYHDPIREL

SEQ ID NO: 163292 - protein, 130 aa, Oryza sativa
  unsure (1)..(130): unsure at all Xaa locations
  Clone ID: PAT_MRT4530_62301C.1.pep
SISXHVXGNDXDVLXHLXXGXGLQGXXHSSYPQRTXTXSXXXGHRXXHQXXCFXXHGXRYHGQXRPCXEXXPPGGXXXXGXXXXATXAXEGAPXEXRGSSXNXYSPYSCSNAXSXWXRFTKCFTYXXXXX

SEQ ID NO: 163293 - protein, 59 aa, Oryza sativa
  Clone ID: PAT_MRT4530_62302C.1.pep
LRSSSELRKCPRISHLFIATQNLSHFPSFLHFYFFDYFCQGCYHSDRDVRQVLMNVLSL

SEQ ID NO: 163294 - protein, 546 aa, Oryza sativa
  Clone ID: PAT_MRT4530_62303C.1.pep
MGSGEEEREARSEAAFTDSADGSSSSSDAASADEWPVTLAAPPRKTAACGRVPGAEVVDSSKPHAQKRRAPSSEMEMMKERFAKLLLGEDMSGSGKGVCTALAIANAITNLCATIFGQLWRLEPLPPEKKAMWRREMGWLLCVSDHIVELVPTWQSFPDGTRLEVMTSRPRSDLYINLPALRKLDHMLIEILDSFRDPEFWYVEQGICAPDCDGSASFRAAFHRRDEKWWLPVPRVPPGGLRDKARKQLQHKRDCANQILKAALAINSNALAEMEVPESYLESLPKNGRATLGDIIYRYITSDHFSPECLLDCLDLSTEYQALEIANRVEASVYVWRRRIAAKPASVLGRATSGRSSWGMVKDMIIDTEKRELLAERAEGLLICLKQRFPGLTQTSLDMSKIQYNRDVGKSILESYSRVLESLASNIVARIDDLLNIDELNRHAEHFPQGDADCRIACNKAAVPPYQVPASGTPFVTAYATPSFSPAQLASPSKKERSPLGAGRRSYSNRGFGAKKALAIDLVNPEVMGVIISGGKMIDVSTTTEL

SEQ ID NO: 163295 - protein, 61 aa, Oryza sativa
  unsure (1)..(61): unsure at all Xaa locations
  Clone ID: PAT_MRT4530_62304C.1.pep
FXFLNSIKYADSSFSVVFNIHRFIKLFFKKKSRVMEELARSRSWQMQQGTEQEGFSYGAKD

SEQ ID NO: 163296 - protein, 329 aa, Oryza sativa
  unsure (1)..(329): unsure at all Xaa locations
  Clone ID: PAT_MRT4530_62305C.1.pep
CPRPIPPPPPTPPPPASTSPPPPPPRTPPPPCDLPPRRRPRPPPPPPMSPTTPRPTPPPASTSPPPPPPRTPPPPCDLPPRRRPRPPPPPPKSPTTPRPTPPPPVSTPXSPPPPPRTLPSPLRPNPSPXSPPRPTPTQPRSTPARSTPPPLAFASPPPPXPPRSTQPPRXLPPAHLPPPPPPRAXPPPPRPTPRCRRHARHFFLSSFFPFFSDGDYHCRRDSSSNGSSAAAVSPPYSPTSASPGGRRPMGRPQGHQIWPPAGQIQRGAWGRALPEAWASRVAPPVSASLAATATRRSASSSPPPPPPRRPPAKKLPVAAASTMQWSTDH

SEQ ID NO: 163297 - protein, 247 aa, Oryza sativa
  Clone ID: PAT_MRT4530_62306C.1.pep
MAVEAVLEASRSSSEEEAEVIVTHGGGGGGGGGGGQVEGWGKRKRSRRRRPQLPPSEEEYLALCLLMLARGRRDGDDVAASASAAAAAVEHRCSVCGKAFASYQALGGHKASHRKPPPPAMVDDDEVVVETKPAAIATPSSSASGVSGGGGGRAHECNVCGKAFPTGQALGGHKRCHYDGTIGSAAGAGASKPAAKTTVAVAASRGFDLNLPALPDVAAAADQRCAAEDDEVLSPLAFKKPRLMIPA

SEQ ID NO: 163298 - protein, 155 aa, Oryza sativa
  Clone ID: PAT_MRT4530_62307C.1.pep
MPLLLTEQRSSSPASFPTSPAVNSGDSVQAPKTKGVEDNRPRDYQKAHQAANTAQHGLGDGELVWQRRSGYGCRWRYTSGLDLFKEKACIDLRWHKTDLGEKACAEAHQRRKKRGMAWAAGVGEEDGDLPPWFTTCLFLRDSWSMGAGEDDGEMA

SEQ ID NO: 163299 - protein, 117 aa, Oryza sativa
  unsure (1)..(117): unsure at all Xaa locations
  Clone ID: PAT_MRT4530_62308C.1.pep
GFPSRAGGRRRGPLVARGSAAGGAEQRRKRRGGRRRRRKVAGEEGRRRARSCSXLWLLMRPGGIADTGARRWSSSREVSPCAGDVKMQRVRVLEDGHELGFSQHMPLDGVHQLVLDH

SEQ ID NO: 163300 - protein, 945 aa, Oryza sativa
  Clone ID: PAT_MRT4530_62309C.1.pep
MARLFDNTVENDTAPVARGGTYVYEITKKIKVVYGKGKKKTVKRKKADGDNGTASPFKKHSIFFKYLDYWKDLEIRHAIDVMHLEKNVFDSTVGTLLDIPSKTKDGLKSRNDLKVFDPLELGPLQTFAVETVCQLEMYFPPSFLDMMEHLIVHIVPQIIELGPLYLHQMWAYERYMSILKGYVRNRAHPEESMIEGYTTEEAVECCMDYIKDANAIDIPVHRHEGRLSGRGTIGRKQFFDNDYKKVSAAHNSVLQQLAIVEPFIERHLEEIKACFPGRSNDWISREHKRRFPLWLKDLNLPVGDSVEELTLQRLACGPSSIVNSWQGYDINGFTLSTTTKDMKSTTQNSGIRVEAINTSGEKRSYYGTIQEIWELDYGLNIQIPVLRCEWVKDTIGVSVDDYGLTIVDHSKTGHKDDPWVLAERVAQVFYVKDPSDERKTIVISGKQQIVGIDNIEDPNDYNYPHRKIFFAFPMRIKKVERTIDEANMSYVRADGVAKDLSPLAVAVAAARSPSPPHGTLPPRRCHRRRQVVPAAKSSPPPSRPRYRRLLPEVAPPLAVADATARTSPPSPSPSPPPGRRRRRTDLSPLAVAIADASGSGKKRRGERSKNKLPKETYNVIALDQDGKPIEPPIVRSKFSNACGTLVRTRCPINVKLWETVDDNIKTLLWNELQKYFVFPPGSEADWDTFVADRTTAEALALRKKMSELAKKNIYPHRLGSSGYAGHVDQWREIEQRFAAAVNQFILWHRRDIILSAAVLAAGSSTPSSSQAMTAAAPAPPSPPEPPSPRHPPSPPPLRNSEKRKELAHVLSDSQKSVLAAQDEVQSWLSADVPETYEYGKPFLPTYLMNKLPWEMRVMHECMQFHEADRTGAKVGYVDPTRICKTQHTVELRQDCEQLVGKTPEEKEEYVKTLHKRKKLEVATYLAIAMLAHADKDVLMVPYQFT

SEQ ID NO: 163301 - protein, 526 aa, Oryza sativa
  Clone ID: PAT_MRT4530_6230C.1.pep
MTTTSRALALVLLSSCCLLVAVDAAYAKKPNLSKNDFLSCLAAGIPARQLYAKGSPSYGSVLTSTIRNLRYLSSKTCNPLYIVTPTDVKHIQVAVSCGRRHNVRIRVRSGGHDYEGLSYRSEIPEPFAIVDLVNMRNVTVDGKARTAWVESGAQIGELYYGISKASPTLAFPAGVCPTIGVGGHFSGGGFGMLLRKFGLASDNVLDVKVVDANGKVQDRKSMGEDYLWAVRGGGGSSFGIVVSWKLRLLPVPATVTVIQMPKMVNEGAVDLLTKWQSLAPTFPEDLMIRVMAQAQKAVFEGLYLGTCDALLPLVTSRFPELGVNRSHCNEMSWVQSIAFIHLGKNATVKDILNRTSSIRAFGKYKSDYVTQPLSKATWDTIYKDWFSKPGSGIMIMDPYGATISKPGEADTPFPHRKGMLYNIQYITFWFGEGAPAEAPIKWIRDFYAFMEPYVTKNPRQAYVNYRDLDLGVNAVEAGANVSCYQVGKVWGEKYFKGNFERLARTKAKVDPTDFFRNEQSIPPLLA

SEQ ID NO: 163302 - protein, 1347 aa, Oryza sativa
  Clone ID: PAT_MRT4530_62310C.1.pep
MEYGFTANYKVWTYHGEFANPEDDDEELSFEMNEAENFIIEDMSRERMIVDVSTDSDDFDGGFDLEDMLRHVEPEGKRGKIPSMVMWYLPIKDRLKRLYSNPTDAELMRWHQESRKIDGMIRHPADARQWKTFDAKHPEFAKDPRNVRFALSTDGMNPFGDLSSSHSTWPVLLTMYNLPTWICQKRKYILLTILIQGPNQPGIDIDVFLEPLMEDMEELWKEGLQLWDEFKREHFNLRAIIFVTINDLPANFSLSGQIKGKTGCLICLEKTSYKYLTSSLKTVYMRHRRFLPQRHRYRKMARLFDNTVENDTAPVARGGTYVYEITKKIKVVYGKGKKKTVKRKKADGDNGTASPFKKHSIFFKYLDYWKDLEIRHAIDVMHLEKNVFDSTVGTLLDIPSPLQTFAVETVCQLEMYFPPSFLDMMEHLIVHIVPQIIELGPLYLHQMWAYERYMSILKGYVRNRAHPEGSMIEGYTTEEAVECCMDYIKDANAIGIPVHRHEGRLSGRGTVGRKQFFDNDYKKVSAAHNSVLQQLAIVEPFIERHLEEIKACFPGRSNDWISREHKRRFPLWLKDLNLPVGDSVEELTLQRLACGPSSIVNSWQGYDINGFTLSTTTKDMKSTSQNSGIRVEAIDTSGEKRSYYGTIQEIWELDYGLNIQIHVLRCEWVKDTIGVSVDDYGLTIVDHSKTGHKDDPWVLAERVAQVFYVKDPSDERKTIVISGKQQIVGIDNIEDPNDYNQFDDVPLFTDLPMRIKKVERTIDEANMSERGEPKFSKSRLPRNPSRQAAKISQVAIAVVPATAGSSPKSPRPTPPPPPPSGPLPPRRCRRRRQDLSPLAVAVAAARTSPPSPSPSPPAGRRRHRTELSPLAVAIAAARSSPPPSRPRYRRLLPEVAPPLAVADATARTSPPSPSPSPPPGRRRRRTDLSPLAVAIAAARSSPPPGGSGKKRRGERSKNKLPKETYNVIALDQDGKPIEPPIVRSKFSNACGTLVRTRCPINVKLWETVDDNIKTLLWNELQKYFVFPPGSEADWDTFVADRTTAEALALRKKMSELAKKNKYPHRLGSSGYAGHVDQWREIEQRFAAAGKPLLVDPMVERSKNWVAKVHSDHVSLELDIPAPEGIELLGDAVNQFILWHRRDIFLSAAVLAAGSSTPSSSQAMTAAAPAPPSPPEPPSPRHPPSPPPLRNSEKRKELAHVLSDSQKSVSHVLSDSQKSVLAAQDEVQSWLSADVPETYEYGKPFLPTYLMNKLPWEMRVMHECMQFHEADRTGAKVGYVDPTRICKTQHTVELRQDCEQLVGKTPEEKEEYVKTLHKRKKLEVATYLAIAMLAHADKDVLMVPYQFT

SEQ ID NO: 163303 - protein, 168 aa, Oryza sativa
  unsure (1)..(168): unsure at all Xaa locations
  Clone ID: PAT_MRT4530_62311C.1.pep
MLPSDGGDDLAAATTWRRRWQRRGGRGPCGGDGDLAAATAXRGQRSWQWRRRRRGAGRLXGGAGGSGDDLAAGTTCRRLWQRRGGRIPCGEDGNLAARTRTTRGERSWRRRRQRRGGRGPGGGDGNGEGGEVRTAAAATAWGGATLGRSRRWRGRRRRRLGKFWQPGG

SEQ ID NO: 163304 - protein, 75 aa, Oryza sativa
  unsure (1)..(75): unsure at all Xaa locations
  Clone ID: PAT_MRT4530_62312C.1.pep
AQHRLVEGGGRRGRRRQRLAAARSXXXXXSLFRRFRSTGAGAEMQMPIDRSISCTSSSLVLLPGLPSLSSPLEGF

SEQ ID NO: 163305 - protein, 1221 aa, Oryza sativa
  Clone ID: PAT_MRT4530_62313C.1.pep
MEVAVREIATYWFDNQRARIISRTPMEVAVREIATYWFENQRASRIISRIPMEVRAPELSVDNRVVFLLEFVPGEIRDSAFVSPDSIWRHRRGLAVPIPEVDIRRLVLSYVGLYVVASVVPSMAKEHALRENMTKIFCPCRHCKNQKLLVDPGEILGHIMEYGFTANYKVWTYHGEFANPEDDDEELSFEMNEAENFIIEDMSRERMIVDVSTDSDDFDGGFDLEDMLRHVEPEGKRGKIPSMVMWYLPIKDRLKRLYSNPTDAELMRWHQESRKIDGMIRHPADARQWKTFDAKHPEFAKDPRNVRFALSTDGMNPFVENDTAPVARGGTYVYEITKKIKVVYGKGKKKTVKRKKADGDNGTASPFKKHSIFFKYLDYWKDLEIRHAIDVMHLEKNVFDSTVGTLLDIPSPLQTFAVETVCQLEMYFPPSFLDMMEHLIVHIVPQIIELGPLYLHQMWAYERYMSILKGYVRNRAHPEGSMIEGYTTEEAVECCMDYIKDANAIGIPVHRHEGRLSGRGTVGRKQFFDNDYKKVSAAHNSVLQQLAIVEPFIERHLEEIKACFPGRSNDWISREHKRRFPLWLKDLNLPVGDSVEELTLQRLACGPSSIVNSWQGYDINGFTLSTTTKDMKSTSQNSGIRVEAIDTSGEKRSYYGTIQEIWELDYGLNIQIPVLRCEWVKDTIGVSVDDYGLTIVDHSKTGHKDDPWVLAERVAQVFYVKDPSDERKTIVISGKQQIVGIDNIEDPNDYNQFDDVPLFTDLPMRIKKVERTIDEANMSYVRADGVAKDLSPLAFAVAAARTSPPSPSPSPPPGRRRHRTELSPLAVAIAAARSSPPPSRPRYRRLLPEVAPPLAVADATARTVALAVAVAVAAARSPSPPHGPLPPRRCHRRRQVVAAARSSPPSLGGSGKKRRGERSKNKLPKETYNVIALDQDGKPIEPPIVRSKFSNACGTLVRTRCPINVKLWETVDDNIKTLLWNELQKYFVFPPGSEADWDTFVADRTTAEALALRKKMSELAKKNRYPHRLGSSGYAGHVDQWREIEQRFAAAACSPGSALSSNLSTYTPICSAFRNSEKRKELAHVLSDSQKSVLAAQDEVQSWLSADVPETYEYGKPFLPTYLMNKLPWEMRVMHECMQFHEADRTGAKVGYVDPTRICKTQHTVELRQDCEQLVGKTPEEKEEYVKTLHKRKKLEVATYLAIAMLAHADKDVLMVPYQFT

SEQ ID NO: 163306 - protein, 1191 aa, Oryza sativa
  Clone ID: PAT_MRT4530_62314C.1.pep
MEYGFTANYKVWTYHGEFANPEDDDEELSFEMNEAENFIIEDMSRERMVVDVSTDSDDFDSGFDLKDMLRHVEPDVLAGRSRGLENWQALEKASKDLLYDETKGCDKDFTVLRSVLELLRLKAKHGWSDTKCTDLDSDKGKRGKIPSMVMWYLPIKDRVKRLYSNPTDAELMRWHQESRKIDGMIRHPADARQWKTFDAKHPEFAKDPRNVRFALSTDGMNPFVENDNAPVARGGTYMYEITKKIKVVYGKGKKKTVKRKKADGDNGTASPFKKHSIFFKYLDYWKNLEIRHAIDVMHLEKNVFDSTVGTLLDIPSKTKDGLKSRNDLKVFDPLELGPLQTFAVETVCQLEMYFPPSFLDMMEHLIVHIVPQIIELGPLYLHQMWAYERYMSILKGYVRNRAHPEGSMIEGYTTEEAVECCMDYIKDANAIGIPVHRHEGRLSGRGTIGRKQFFDNDYKNVSAAHNSVLQQLAIVEPFIERHLEEIKACFPGQSNDWISREHKRRFPLWLKDLNLPVGDSVEELTLQRLACGPSSIVNSWQGYDINGFTLSTTTKDMKSTAQNSGIRVEAIDTSGEKRSYYGTIQEIWELDYGLNIQIPVLRCEWVKDTIGVSVDDYGLTIVDHSKTGHKDDPWVLAERVAQDLSPLAVAVAAARTSPPSPSPSPPPGRRRRRTELSPLAVAIAAARSSPPPSHPRYRRLLPEVAPPLAVADATARTSPPSPSPSPPPGRRRRRTDLSPLAVAIAAARSSPPSLGGSGKKRRGERSKNKLPKETYNVIALDQYGKPVEPPIVRSKFSNACGTLVRTRCPINVKLWETVDDNIKTLLWNELQKYFVFPPGSEADWDTFVADHTTAEALALRKKMSELVKKNRYPHRLGSSGYAGHVDQWREIEQRFAAAGKPLLVDPMVERSKNWVWAHSTGQVSDEGDILFETPNIEEEHFYSLAAENPTAFPRNSEKRKELAHVLSDSQKSVLAAQDEVQSWLSADVPETYEYGKPFLPTYLMNKLPWEMRVMHECMQFHEADRTGAKVGYVDPTRICKTQHTVELREDCEQLVGKTPEEKEEYVKTLHKRKKLEVATYLAIAMMAHADKDVLMVPYQFTAHKYYRKRGGPVHIPSQKKLSVRTGWPIPEIPYIAQRFNDTTILNVAADLCRFIRRDVCNARGLFYDNQSELAMDDKFKPLREWEKEHMQ

SEQ ID NO: 163307 - protein, 484 aa, Oryza sativa
  unsure (1)..(484): unsure at all Xaa locations
  Clone ID: PAT_MRT4530_62315C.1.pep
MDLDKSTSTTASLKKWQDDGALPGHGTMQRETGGLDRDTMARRIGQVMISAPVTASNIPVPLCEKGPAEREAAINALPLTDVIGPLADHQAAASLKEGIAKEASDVAASTTSGSNVPKKGRKFSSVLGTRRKAPNPSXEIFRRVARAKVAQDGSGTXEVTPSGPADGLVPARGLPADVLTWGELQAEMERILQLLAHDLAEACEDLLKMRKLVAGNERQRQGLEHRMSELENNLSEIRGSLRISYTGLHQLARECGVTTTIQACCQDLRGDVQRHVDIKDVQQHGQPEMPVIVPALALEPEKKNLTQSFPCWADLESALADRDRRIQYWRTKLEVAELEKTMVEVKKDLAMEALRGREVWFNSYLRSCCTAMAGVCRKLRVPRGNPEESAARYISWLNRTCTQLEGIGKRIDEALKQECHRSSRYARGHVLDCIRDHRPQLHLEFLHEGFSRSRRTPAEIDDQAQSMAPLAEKVFQSMDWRWPS

SEQ ID NO: 163308 - protein, 33 aa, Oryza sativa
  unsure (1)..(33): unsure at all Xaa locations
  Clone ID: PAT_MRT4530_62316C.1.pep
LAESVXSALLVGRMMVAXTNRPIELTRLRGLIN

SEQ ID NO: 163309 - protein, 115 aa, Oryza sativa
  Clone ID: PAT_MRT4530_62317C.1.pep
RELHDAGVGHDALGGTRARAFSDLRWRAISDLRHPALIPIVGISLGTQEQSSLSLTHKNGWRLKMNSGVSATNAAEPIAPVSWLYYSLKVHTALTKYEPTQPVLYPRGRSAHAPT

SEQ ID NO: 163310 - protein, 54 aa, Oryza sativa
  Clone ID: PAT_MRT4530_62318C.1.pep
KLFFFQGNLFLSFISSFLSFSLQRWLVFEPLGSVHCIMYYYDPTLSSLISSPNA

SEQ ID NO: 163311 - protein, 133 aa, Oryza sativa
  Clone ID: PAT_MRT4530_62319C.1.pep
MAVAGTTWRPAATTWRWRGGRGPCGGDGDGKGVEVLAAATAVARDGATSGRSRRWRGRLGGGDGDGEGAQIIACGQLKSPHGKMIFPCRRLKPAACENYLSMRAVKPAACEKDISVRAVKPAACEKDISIRLA

SEQ ID NO: 163312 - protein, 69 aa, Oryza sativa
  Clone ID: PAT_MRT4530_6231C.1.pep
MQKLPAVKLWGGGFQFQYRQFQSGGMDAGGISNHPHRGTQGLAGGACVMDTGECVSIQAQLDVDLAKLN

SEQ ID NO: 163313 - protein, 138 aa, Oryza sativa
  unsure (1)..(138): unsure at all Xaa locations
  Clone ID: PAT_MRT4530_62320C.1.pep
GVIGLDLVSIHSSCANGSWQSGRVPSGAVVDLQSAQASPRCAATAWGGQTLGRSRRWRGRXDGDLGNFGAQIIACGRLKGPHGKXIFPCGRHKPAACEKDLSMRAVKPAACEKDLSMRAVKPAACEKDLSMRAVKPAA

SEQ ID NO: 163314 - protein, 638 aa, Oryza sativa
  Clone ID: PAT_MRT4530_62321C.1.pep
MEHVVGASEATMRSLLTKLGGLLSQEYALIRGVRGDIQYIRDELTSMQAFIRDLSGTPEGKGDEHDHRMKDWMKQIRDVTYDIEDCIDDFAHRLSHDPGGDYLCGFVVSRVYEILTWWPRRDIASNIAELKMLAQQIGERRTRYGVENPQKRSGDENKSELVGVEAYMKELTKWVTNETYQDGVLSVLGFGGVGKTTIATALYRQLGDQFDRRAMVTVSQSSDVEAILRSILEQVMPQSKDGQELQGGHASQKKLLHQAVISYLHPLMPKALRRRSSSNSNSDNSKIREGKLTRLPRALTLDRQYDHDPQDGNDAAAGSSETVVTTPATKGTATSDEKPTSVIATIRGAFRPWDRRRHPPQDDKGGSTSGSGKEAINIQTMNKPGEKNIQTMKRDGLSKLLQEHLNQKRYFLLIDDVWSATTWEQIRKHLPTDNLSYRIIVTTRFQAVATACKRKESDRIHKVDVLRGKKPEKLFNEVESESRISKDGERKEIDDGEQKEREGQQKEIDGEQKDIVRPRRIWEMCSGLPLAIVTMAGHVACNSDKDETHWLNVCKSLVPESGRDMTQEGVTRILGHCYNDMPAELRTCSLYLSIFPKGNKISRKRLTRRWIAEGFVSEKQGQSVEDVAEACFCWKYSH

SEQ ID NO: 163315 - protein, 49 aa, Oryza sativa
  unsure (1)..(49): unsure at all Xaa locations
  Clone ID: PAT_MRT4530_62322C.1.pep
ASVQRLMKQFENMAFRDGENVGDFAMRINGLVASXLRELGEEMEDSRVV

SEQ ID NO: 163316 - protein, 503 aa, Oryza sativa
  Clone ID: PAT_MRT4530_62323C.1.pep
MAASASSSSPLHIVMFPWLAFGHMIPFLELAKRLARRGLAVTFVSTPRNAARLGAIPPALSAHLRVVPLDLPAVDGLPEGAESTADAPPEKVGLLKKAFDGLAAPFAGFVAEACAAGHGESTPTAAGFSRKPDWIILDFAQNWVWPIAEEHKIPCAMFSIFPAAMVAFVGPRQENLAHPRTKTEHFMVQPPWIPFPSNVAYRRRHGAEWIAAVFRPNASGVSDADRFWEMEHACCRLIIHRSCPEAEPRLFPLLTELFAKPSVPAGLLMPPPPPAAGVDDDDDDVSMDDQHIAMAMRWLDEQPERSVIYVALGSEAPLTVGHVRELALGLELAGVRFLWALRAPPSASSVNRDKCAADADLLLPDGFRSRVAAARGGLVCARWVPQLRILAHRATGGFLTHCGWSSIFESLRFALPLVMLPLFADQGLGVQALPAREIGVEVACNDDGSFRRDAIAAAVRQVMVEEKGKALSRKAEELRDVLGDEGRQEMYLDELVGYLQRYK

SEQ ID NO: 163317 - protein, 379 aa, Oryza sativa
  Clone ID: PAT_MRT4530_62324C.1.pep
PPGCQNFPLHRVATAKSSPPPPDCPQDLPLHRQVLRRLLPEVVPLAVAVSPPPGPLPGPSPSPAPSLPRHRRLLPEVVPLAIAVAAARTSPPSPRRCRQVLPATAGSSPKSSPSPSPSPPIGPLPPRRVAAAKSSPPPPAPPQVVPLSATAVAAGNTSPPPPHRLLQSQVPRNTCGTLVRTRCPINVKLWETVDDNIKTLLWNELQKYFVYPPRSEADWDTFVADHTTVEALALRKKMSELAKKNRYPHRLGSSGYAGHVDQWRETEQRFTAASKPLLVDPMAERGKNWEHFYSLAAENPTAFPSLIVPIGRAGKTKEVATGLAIPGRQFHNTAIPEDYARVHVAKRHNPDRGHSSSRIFNSILIAGKESFRSCTTVTS

SEQ ID NO: 163318 - protein, 69 aa, Oryza sativa
  Clone ID: PAT_MRT4530_62325C.1.pep
PQLAAERLALGDNFYCSGNIVLIAEILNTINNAVAHNSTVGLQVCMFDCLFWSATGPLCWDPTPAIDLA

SEQ ID NO: 163319 - protein, 284 aa, Oryza sativa
  Clone ID: PAT_MRT4530_62326C.1.pep
MASMKYDLSLLDYKMRFSLWQVKMRAVLAQTSDLDEALESFGKKKTTEWTAEEKRKYRKAPSLIQLHLSNDILQKEIVADLVSMEVQFDDEDLALQNREKMKGMVQSDASSSEGEALQGYFPYLSAKCAATREARLDRRRGVVEGVARCGQKIAKAAEDTTTEDVKGARWESPFGAAPLSLSPGRRCRIPFCRRAATAISLPLDLVEGRDPPPGRRTAVASPHAADLSPPHPLLPSRRRRHLPSHQIWRRGGRRRWATVSPPTTDRPPTHRRRSIPSHRARRFS

SEQ ID NO: 163320 - protein, 297 aa, Oryza sativa
  Clone ID: PAT_MRT4530_62327C.1.pep
SLATLLVVIRSNSSSSSSSSSLVALIQKSWISGNGQSGFHSTRLILLAALPPCHAGSVAAGAAPPRSSPPCTPSPPASVPGGTTPPPPPPPRPWRRRRRRHRRRPPPAPAPARSGPAPAPAGQCRLPPPPPPPAASDSPPLPPHAPAAASACAASASIRHWCSSSSAAGLCTPRFAWIDASFPATSSRRRRAAPQPTPRATPAPSWAAPPSPPRRRRCSRRGRGTRAACRGWRRPRVAAPRPRAAPASSPQASSSAGDIPTRGSPRAGRGVCGGGDGARARGRPGRGGWRPPRAPPR

SEQ ID NO: 163321 - protein, 120 aa, Oryza sativa
  Clone ID: PAT_MRT4530_62328C.1.pep
SQVASCVCTAQECCNSSIIYCWNSCTSSMEAPLRRLRIHPQAEIHLRWEFQVHSFGPKQLRVIPSHLLVHTLFALVPLLVLVLIDFSNDRLKEARVCVFPRICIILHRYRVCQRFVFCAK

SEQ ID NO: 163322 - protein, 115 aa, Oryza sativa
  Clone ID: PAT_MRT4530_62329C.1.pep
RQPSTHPLSRLREIFNPDSHFGTQQQCSQHLHAQGLPTVHLGSGLHHVQVPFTWNLSPLRTSKFSFEYLLLPHKICTDGRSARARAPGFARRSRGSKLTYACMRRHSSSIVTYSS

SEQ ID NO: 163323 - protein, 63 aa, Oryza sativa
  Clone ID: PAT_MRT4530_6232C.1.pep
KLQKLVPTTEWSGCPKVNWHGILGVFPCSCIVSSTHQQRVLYIVASVLNYFGKVFKGFYVLSL

SEQ ID NO: 163324 - protein, 94 aa, Oryza sativa
  Clone ID: PAT_MRT4530_62330C.1.pep
MATGGSHGGVNRCWRSRWRKSALEAADGEREAEAMLPAAVLEVAVSENRCCPAAAPSSLAPRNQALSDGISSKTQDPRLLLALPTTRVRVYFFY

SEQ ID NO: 163325 - protein, 64 aa, Oryza sativa
  unsure (1)..(64): unsure at all Xaa locations
  Clone ID: PAT_MRT4530_62331C.1.pep
TPSWNGSPTPXVKXICDFGYSKSALLTFEAESTVGTPAYIAPEVLSRKXYDGKVANVWSCGXTL

SEQ ID NO: 163326 - protein, 143 aa, Oryza sativa
  unsure (1)..(143): unsure at all Xaa locations
  Clone ID: PAT_MRT4530_62332C.1.pep
MEDGVSTYTVDEALISMGFGKFQAFVLAYSGMAKISEAMEMMLLSFVGQSVQAEWELSAQAESLITSVVFVGMLVGAYSWGIVSDNYGRRQGWVXFTALVTGGAGLLSAFAPNYLSLIVLRFMVGVGLGGGPVLSSWFLEFIP

SEQ ID NO: 163327 - protein, 72 aa, Oryza sativa
  Clone ID: PAT_MRT4530_62333C.1.pep
AKIPSSFWALDKWQDWQGRYNINMKFVLSQKLLRKHTDVAVSFSDKTQEICFLPLFQQSADNMYSTRHVRAL

SEQ ID NO: 163328 - protein, 380 aa, Oryza sativa
  Clone ID: PAT_MRT4530_62334C.1.pep
LSTSQATEPSAAPATLSQTRRAPAARRCRRRRRCPTTTDWSSHTVPRCSCYPGSSRSSLPSPCPGTLASGRALPSRCSTRSTRTPAPTWRYRHGGSTRPSGASRSARHFENEKGEEIIVIVPWDEWWAMALKDSSNPQIALLPLHPDVRARFNESAAWDYARSMVGKPYGYHNMIFSWIDTIGDNYPPPLDANLGLDLREIIDYPPPLDANLVMAVMSMWTRLQPLYAANMWNEALNKRLGTEGLDLHGIIVETERRGMSFDQLLTIPEQDEWVYSDGKSTTSLVFILAREKDAGIFTPYTKSIQVTEFTIRDAYMLKIFEDNQARLPSWCNTESDKLPFCQILGEYRMELPEYNTIEPYAKMNENCPSLPPTYKRPARC

SEQ ID NO: 163329 - protein, 377 aa, Oryza sativa
  Clone ID: PAT_MRT4530_62335C.1.pep
MARLSTAAWPFLAAVAAALLCSVDAVIVEGLQVGFYNQTCPSAEEAVRDVVTSEIGLDRTIAAGIIRIFFHDCFVTGCDASILLDETPSGDVPEKESSANGFTLHGLRTLDVAKSTVESMCPRTVSCADILAFAARDAAVAAGIPFYEVAAGRMDGLRSNMDDLPGNMPTPSHQVPRMSELFVKRGLSQEDLVVLSGAHSIGGAHCFMFSNRIYGFSQGADIDPALEPAFAEKLRKVCPPRKDGDDPEQSPKVSFDGRTSEKLDNVYYSELLASRGLMTSDDALIKDPETKTTVDLFAGDNAVWQEKFAAAMQKLGAVDVLVGEGKGQIRKQCRLVNKPSKQSKPTSTRQSMPALRPKRKKPRLGLGNFIPGFHGFF

SEQ ID NO: 163330 - protein, 469 aa, Oryza sativa
  Clone ID: PAT_MRT4530_62337C.1.pep
MELGRPGCPVDRLPDSPRHEREAARCLLGTGANPKENLTTFSKEDNDLWKRHLLNLVIQVVVAGYVISTSSWTDRRLQAAVVLMFLCGCLRYTGRTFCLILARPRSLRAASLHYLKFVLQEVEKGRVEEEAKKYVKERFESTLDGKSSSKIIHTEAENIGYTESEVISVDTPRDDVKCILAAKDIPSMLKEFYDNPNRRRAYEIVGTQKKYPTSSLLLDYCALPHIISFPPYYLAGHCPVCNSSRCLRCHHKWISECSNTCGVELLDSTLTHISITEDLKELVLDKLLEFGKVKEDWNFASSRGQLTLQKRIDRCKSEDLEQTSMTKLQDSIGRDVDFPTAVLIWHIATDICYYSEDSTTEVNKKKKSTPSLYMTELLVKLGKKFIANRINRLKQACQVAAELFSIGNEAERWKLISEIWLEMLYYVAPRCGGAFHYEHLSTGGEFITHVLLLMRFLGPFLPIPTASAP

SEQ ID NO: 163331 - protein, 195 aa, Oryza sativa
  unsure (1)..(195): unsure at all Xaa locations
  Clone ID: PAT_MRT4530_62338C.1.pep
YIPDAFVILHEVMHQLERPQXGVNFKIDFEKTYDRVIXHYLYEVLQRKNFNDTFVKWIKNINEGGNVGMNINGEAGPFFKTYSGLRQGDPLSPILFDLVGDALXAILEEACKNGVLEGIVPNLVERGLTHLQHADDTIVFTRATRDNVLVVKFLLFYFXEMSGMKINYQKSEVYHEELGPDLPICIDNLLNCKVG

SEQ ID NO: 163332 - protein, 88 aa, Oryza sativa
  Clone ID: PAT_MRT4530_62339C.1.pep
RSRGRHAPARNGPRAPAAKAAKATTPRSPSPGSRGRACSTARARRTGGRSRTGSRALPPAAARRRRRARTASRGTASSRWPATTSARA

SEQ ID NO: 163333 - protein, 224 aa, Oryza sativa
  Clone ID: PAT_MRT4530_6233C.1.pep
MASSSSLYLLAALLALASWQAIAFDPSPLQDFCVADMKSPVRVNGFPCKNPMEVNSDDFFNAAKFDMPRSTMNKVGSNVTNLNVLNFPGLNTLGISLARIDYAPLGVNPPHIHPRATELLTVLEGTLYVGFVTSNPNRLFSKVVHKGDTFVFPKAMIHFQMNLDHNKPAVAQSSLNSQNPGVITIASAVFGSKPPISDDVLTKAFQVEKKVIDWLKSQFWESNY

SEQ ID NO: 163334 - protein, 1493 aa, Oryza sativa
  Clone ID: PAT_MRT4530_62340C.1.pep
MTPAMRIEPVRSWRWRASRRTPPPGGSSSCTGCRGGCLARLVRLSAVARLSAGARLARLVRLSTAARLSAAARLARLVRLSASSTIVRLSAAARLARLVRLSAASRLSATARLVRASAAARLPLRLVRHRPPVRAIRADRPRPPSVAPPYPGEILGHIMEYGFTANYKVWTYHGEFANPEDDDEELSFEMNEAENFIIEDMSRERMIVDVSTDSDDFDGGFDLEDMLRHVEPEVLAGRSRGLENWQALEKASKDLLYDETKGYDKDFTVLRSVLELLRLKAKHGWSDTKCTDPDSDKGKRGKIPSMVMWYLPIKDRLKRLYSNPTDAELMRWHQESRKIDGMIRHPADARQWKTFDAKHPEFAKDPRNVRFALSTDGMNPFVENDTAPVARGGTYVYEITKKIKVVYGKGKKKTVKRKKADGENGTASPFKKHSIFFKYLDYWKDLEIRHAIDVMHLEKNVFDSTVGTLLDIPSPLQTFAVETVCQLEMYFPPSFLDMMEHLIVHIVPQIIELGPLYLHQMWAYERYMSILKGYVRNRAHPEGSMIEGYTTEEAVECCMDYIKDANAIGIPVHRHEGRLSGRGTVGRKQFFDNDYKKVSAAHNSVLQQLAIVEPFIERHLEEIKACFPGRSNDWISREHKRRFPLWLKDLNLPVGDSVEELTLQRLACGPSSIVNSWQGYDINGFTLSTTTKDMKSTSQNSGIRVEAIDTSGEKRSYYGTIQEIWELDYGLNIQIPVLRCEWVKDTIGVSVDDYGLTIVDHSKTGHKDDPWVLAERVAQVFYVKDPSDERKTIVISGKQQIVGIDNIEDPNDYNQFDDVPLFTDLPMRIKKVERTIDEANMSYVRADGVAKAAKISQVAIAVVPATAGSSPKSPRPTPPPPPPSGPLPPRRCRRRRQDLSPLAVAVAAARTSPPSPSPSPPAGRRRHRTELSPLAVAIAAARSSPPPSRPRYRRLLPEVAPPLAVADATARTSPPSPSPSPPPGRRRRRTDLSPLAVAIAAARSSPPPGASSEETWRTPSDPFPMEITQVAPRDDDPDYIPIEQAMVVRRRSKRKAGRNRTEQEVEMDTATSAPERTETSTSAGGSGKKRRGERSKNKLPKETYNVIALDQDGKPIEPPIVRSKFSNACGTLVRTRCPINVKLWETVDDNIKTLLWNELQKYFVFPPGSEADWDTFVADRTTAEALALRKKMSELAKKNKYPHRLGSSGYAGHVDQWREIEQRFAAAGKPLLVDPMVERSKNWVWARSTGSVQTSTFPVDSITGPTPCSLVVPIGRAGKTKEVATGLAIPGRQFHNTAIPEDYARVQVAKRIPTLEPRRIIPKLISTYDPKEIDKDKEKFMFSAFRNSEKRKELAHVLSDSQKSVLAAQDEVQSWLSADVPETYEYGKPFLPTYLMNKLPWEMRVMHECMQFHEADRTGAKVGYVDPTRICKTQHTVELRQDCEQLVGKTPEEKEEYVKTLHKRKKLEVATYLAIAMLAHADKDVLMVPYQFT

SEQ ID NO: 163335 - protein, 1307 aa, Oryza sativa
  Clone ID: PAT_MRT4530_62341C.1.pep
MEYGFTANYKVWTYHGEFANPEDDDEELSFEMNEAENFIIEDMSRERMVVDVSTDSDDFDGGFDLEDMLRHVEPEVLAGRSRGLENWQALEKASKDLLYDETKGCDKDFTVLRSVLELLRLKAKHGWSDTKCTDPDSDKGKRGKIPSMVMWYLPIKDRLKRLYSNPTDAELMRWHQESRKIDGMIRHPADARQWKTFDAKHPEFAKDPRNVRFALSTDGMNPFVENDTAPVARGGTYVYEITKKIKVVYGKGKKKTVKRKKADGDNGTASPFKKHSIFFTYLDYWKDLEIRHAIDVMHLEKNVFDSTVGTLLDIPSPLQTFAVETVCQLEMYFPPSFLDMMEHLIVHIVPQIIELGPLYLHQMWAYERYMSILKGYVRNRAHPEGSMIEGYTTEEAVECCMDYIKDANAIGIPVHRHEGRLSGRGTVGRKQFFDNDYKKVSAAHNSVLQQLAIVEPFIERHLEEIKACFPGRSNDWISREHKRRFPLWLKDLNLPVGDSVEELTLQRLACGPSSIVNSWQGYDINGFTLSTTTKDMKSTTQNSGIRVEAIDTSGEKRSYYGTIQEIWELDYGLNIQIPVLRCEWVKDTIGVSVDDYGLTIVDHSKTGHKDDPWVLAERVAQVFYVKDPSDERKTIVISGKQQIVGIDNIEDPNDYNQFDDVPLFTDLPMRIKKVERTIDEANMSYVRADGVAKDLSPLAVAVAAARTSPPSPSPSPPPGRRRHRTELSPLAVAIAAARSSPPPSRPRYRRLLPEVAPPLAVADATARTVALAIAVAAARSPSPPHGPLPPRRCHRRRQVVAAARSSPPSLGGSRKKRRGERSKNKLPKETYNVIALDQDGKPIEPPIVRSKFSNACGTLVRTRCPINVKLWETVDDNIKTLLWNELQKYFVFPPGSEKNLPPFTDYGHISQADWDTFVADRTTAEALALRKKMSELAKKNRYPHRLGSSGYAGHVDQWREIEQRFAAAGKPLLVDPMVERSKNWVAKVHSDHVSLELDIPAPEGIELLGDAVNQFILWHRRDIILSAAVLAAGSSTPSSSQAMTAAAPAPPSPPEPPSPRHPPSPPPLRNSEKRKELANVLSDSQKSVLAAQDEVQSWLSADVPETYEYGKPFLPTYLMNKLPWEMRVMHECMQFHEADRTRAKVGYVDPTRICKTQHTVELRQDCEQLVGKTPEEKEEYVKTLHKRKKLEVATYLAIAMLAHADKDVLMIPEIPYIAQRFNDTTILNVAADLCRFILRDVCNARGLFYDNQSELTMDDKFKPLRDSHDDHGCCHHCEDEAPIVTMMSATVVLITPLVLALFPPSIE

SEQ ID NO: 163336 - protein, 54 aa, Oryza sativa
  Clone ID: PAT_MRT4530_62342C.1.pep
MTGKYEASHGLVAWFPRPPTRPTRRAKSPCQRTAPQKIHGALGYDAFAGAICGP

SEQ ID NO: 163337 - protein, 3330 aa, Oryza sativa
  Clone ID: PAT_MRT4530_62343C.1.pep
MEYGFTANYKVWTYHGEFANPEDDDEELSFEMNEAENFIIEDMSRERMVVDVSTDSDDFDGGFDLEDMLRHVEPEVLAGRSRGLENWQALEKASKDLLYDETKGCDKDFTVLRSVLELLRLKAKHGWSDTKCTDPDSDKGKRGKIPSMVMWYLPIKDRLKRLYSNPTDAELMRWHQESWKIDGMIRHPADARQWKTFDAKHPEFAKDPRNVRFALSTDGMNPFVENDTAPVARGGTYVYEITKKIKVVYGKGKKKTVKRKKADGDNGTASPFKKHSIFFKYLDYWKDLEIRHAIDVMHLEKNVFDSTVGTLLDIPSPLQTFAVETVCQLEMYFPPSFLDMMEHLIVHIVPQIIELGPLYLHQMWAYERYMSILKGYVRNRAHPEGSMIEGYTTEEAVECCMDYIKDANAIGIPVHRHEGRLSRRGTVGRKQFFDNDYKKVSAAYNSVLQQLAIVEPFIERHLEEIKACFPGRSNDWISREHKRRFPLWLKDLNLPVGDSVEELTLQRLACGPSSIVNSWQGYDINGFTLSTTTKDMKSTTQNSGIRVEAIDTSGEKRSYYGTIQEIWELDYGLNIQIPVLRCEWVKDTIGVSVDDYGLTIVDHSKTGHKDDPWVLAERVAQVFYVKDPSDERKTIVISGKQQIVGIDNIEDPNDYNQFDDVPLFTDLPMRIKKVERTIDEANMSYVRADGVAKDLSPLAVAVAAARTSPPSPSPSPPPGRRRHRTELSPLAVAIAAARSSPPPSRPRYRQAPPRSRPAPRRRRRHCQDLSPLAVAVAAARSPSPPHGPLPPRRCHRCRQVVAAARSSPPSLGGSGKKRRGERSKNKLTKETYNVIALDQDGKPIEPPIVRSKFSNACGTLVRTRCPINVKLWETVDDNIKTLLWNELQKYFVFPPGSEVRGRDYALKKMGDRWRQWKSDLNRDYVQKNLPPFTDYGHISQADWDTFVADRTTAEALALRKKMSELAKKNKYPHRLGSSGYAGHVDQWREIEQRFAAAGKPLLVDPMVERSKNWVWARSTGQVSDEGDILFETPDIEEVTTNLQQIVEKERSGQFVPRRERDQLTAALGTAEHSGRVRGLSSKTSWKVGFPQDAPSYKKRDKYKEQLSDKIYAQVKEHFYSLAAENPTAFPRLFPDSQQPTQSAQQTTNVPSSVGSVQTSTFPVDSITGPTPCSLVVPIGRAGKTKEVATGLAIPGRQFHNTAIPEDYARVQVAKVHSDHVSLELDIPAPEGIELLGDAVNQFILWHRRDIILSAAVLAAGSSTPSSSQAMTAAAPAPPSPPKPPSPRHPPSPPPLRSPPRQPTPPPSPSQQPPLPTPQPVQASPTSPTKQHAPPAPPSVQTSPPTPQSALVEEVHIPDGTTSEPKSNTLEPRRIIPKLISTYDPKEIDKDKEKFMFSAFRNSEKRKELAHVLSDSQKSVLAAQDEVQSWLSADVPETYEYGKPFLPTYLMNKLPWEMRVMHEWYMKASRKGLGFISVAVPEGAFMSGPNGIFFISFQDLYALYKLDKMDVNLVAAFCLMQFHEADRTGAKVGYVDPTRICKTQHTVELRQDCEQLVGKTPEEKEEYVKTLHKRKKLEVATYLAIAMLAHADKDVLMVPYQFTDHYILFLVYPKDQLIISLDPAHYDKETFMEFLTILNLAHKYYRKRGGPVHIPSQKKLSVRTGWPCYKQPPGTNLCGYYVCEMLRVNGRYKTTSNRIPEIPYIAQRFNHTTILNVAADLCRFIRRDVCNARGVTPESASFADTGYDPPPKKWKGICQVGPSFEAISCNRKFIGARWYIDDEILSSISDNEVLSPRDVEGHGTHTASTAGGNIIHNVSFLGLAAGTVRGGAPRARLAIYKACWSGYGCSGATVLKAMDDAVYDGVDVLSLSIGGTKEDVGTLHVVANGISVVYAGGNDGPIAQTVENQSPWLVTVAATTIDRSLPVVITLGNGEKLVAQSFVLLETASQFSEIQKYTDEECNANNIMNSTVKGKIAFCFMGEMLNNKQQTSYPDVTTAVAAKGGRAPDIAAPGVSILAAAQIPYYKGVSYHFDSGTSMACPHVAGIIAVLKSIHPKWSPAALKSAIMTTDYSIPLAGVHQRSGEQVSGTSAFDVLHREKAAIRHCDFTMADFADALRPDKFTGVHFKRWQIRVTLWLTAMKCFWVSTGKPEGVLTAEQQKQFEEATTLFVGCILSVLGDRLVEVYMHMTDAKELWDALNTKFGATDASNDLYIMEQFHDYKMADNRSVVEQAHEIQTMAKSFGTALKHKRQEYSVEGLIASLDVEEKAREKDAASKGDGGQSSANVVHKAQNKSKGKYKAQQTTNFKKQKKNNNNPNQDERTCFVCGQVGHLARKCPQRKGMKAPAGQTSKSANVTIGNTGDGSGYGNLPTVFSVNQSTNWWVDTGANVARGSTVLMGNGSHASVHGVGTVDLKFTSGKIVQLKNVQHVPSIDRNLVSGSRLTRDGFKLVFESNKVVVSKHGYFIGKGYECGGLFRFSLSDFCNKSVNHICGSVDDEANVWHSRLCHINFGLMSRLSSMCLIPKFSIVKGSKCHSCVQSKQPRKPHKAAEERNLAPLELLHSDLCEMNGVLTKGGKRYFMTFIDDATRFCYVYLLKKKDEALDYFKIYKAEVENQLDRKIKRLRSDRGGEFFSNEFDLFCEEHGIIHERTPPYSPESNGIAERKNCTLTDLVNAMLDTAGLPKAWWGEVLLTSNHVLNRVPNRNKDKTPYEIWIGRKPSLSYLRTWGCLAKVNVPITKKRKLGPKTVDCVFLGYAHHSIAYRFLIVKSEVLDMHVGIIMESRDATFFESFFPMKDTHSGSNQPSEIIPSSIIPPEQTEHTHELVSEEDVSEAPRRSKRQRTAKSFGDDFTVYLVDDTPKSISEAYASPDADYWKEAVRSEMDSIIANGTWEVTEQPYGCKPVGCKWVFKKKLRPDGTIEKYKARLVAKGYTQKEGEDFFDTYSPVARLTTIRVLLSLAASHGLLVHQMDVKTAFLNGELDEEIYMDQPDGFVVEGFGVNYAYPCVYYRHGGGQGVILCLYVDDILIFGTNLEVINEVKSFLSQNFDMKDLGVADVILNIKLIRGENGITLLQSHYVEKILNRFGYIDSKPFPTPYDPSLLLRKNKRIARNQLEYSQIIGSLMYLASATRPDISFAVSKLSRFTSNPGDDHWRALERVMRYLKGTVELGLHYTGYPAVLEGYSDSNWISDVDEIKATSGYVFTLGGGAVSWRSCKQTILTRSTMEAELTALDTATVEAEWLRDLLMDLPVVEKPVPAILMNCDNQTTCEKTIEVCQEIKKLRSYNVGLHPNSEKPGRSLHEGTITKCDRQCIEGDGFETHVSYTMVVTQSM

SEQ ID NO: 163338 - protein, 60 aa, Oryza sativa
  Clone ID: PAT_MRT4530_62344C.1.pep
MADIGSPGRFVVRQIIGILCGFMNEPLSGCVLCQQFDVMAPYTQVTNGQWRNLDPLGHGS

SEQ ID NO: 163339 - protein, 48 aa, Oryza sativa
  Clone ID: PAT_MRT4530_62345C.1.pep
GGVLNTRILISPESHWACERERPWFNPQQKGPVTGPYVCETHPYLGSR

SEQ ID NO: 163340 - protein, 1410 aa, Oryza sativa
  Clone ID: PAT_MRT4530_62346C.1.pep
MEYGFTTNYKVWTYHGEFANPEDDDEELSFEMNEAENFIIEDMSRERMVVDVSTDSDDFDECTDPDSDKGKRGKIPSMVMWYLPIKDRLKRLYSNPTDAELMRWHQESRKIDGMIRHPADARQWKTFDAKHPEFAKDPRNVRFALSTDGMNPFGDLSSSHSTWPVLLTMYNLPTWICQKRKYILLTILIQGPNQPGIDIDVFLEPLMEDMEELWKEGLRLWDEFKREHFNLRAIIFVTINDLPVNFSLSGQIKGKTGCLICLEKTSYKYLTSSLKTVYMRHRRFLPQRHRYRKMARLFDNTVENDNAPVARGGTYMYEITKKIKVVYGKGKKKTVKRKKADGDNGTASPFKKHSIFFKYLDYWKNLEIRHAIDVMHLEKNVFDSTVGTLLDIPSKTKDGLKSRNDLKVFDPLELGPLQTFAVETVCQLEMYFPPSFLDMMEHLIIHIVPQIIELGPLYLHQMWAYERYMSILKGYVRNRTHPEGSMIEGYTTEEAVECCMDYIKDANAIGIPVHRHEGRLSGRGTVGRKQFFNNDYKKVSAAHNSVLQQLAIVEPFIERHLEEIKACFPGRSNDWISREHKRRFPLWLKDLNLPVGDSVEELTLQRLACGPSSIVNSWQGYDINGFTLSTTTKDMKSTAQNSGIRVEAIDTSGEKRSYYGTIQEIWELDYGLNIQIPVLYCEWVKDTIGVSVDDYGLTIVDHSKTGHKDDPWVLAERVAQVFYVKDPSDERKTIVISGKQQIVGIDNIEDPNDYNQFDDVPLFTDLPMRIKKVERTIDEANISESGEPKFSKSRLPRNPSRQAAKISQVAVAVVPATAGSSPKSPCPTPSPPPPSGPLPLAVAVAAARTSPPSPSPSPSPPPGHRRHRTKRSPLAVAIAAARSSPPPSRPRYRRLLPEVAPPLAVAEATARTSPPSPSPSPPLGRRRRRTDLSPLAVAIAAARSSPPPDGSPTPLETWKSDLNRDYVQKNLPPFTDYGHISQADWDTFVADHTTAEALALRKKMSELAKKNKYPHRLGSSGYAGHVDQWQEIEQRFAAAGKPLLVDPMVERSKNWVWARSTGQVSDEGDILFETPDIEEVTTNLQQIVEKERSGQFVPRRERDQLTAALGTAEHSGRVRGLSSKTSWKVGFPQDAPSYKKRDKYKEQLSDKIYAQVKEHFYSLAAENPTAFPRNSEKRKELAHVLSDSQKSVLAAQDEVQSWLSADVPETYEYGKPFLPTYLMNKLPWEMRVMHECMQFHEADRTGAKVGYVDPTRICKTQHTVELREDCEQLVGKTPEEKEEYVKTLHKRKKLEVATYLAIAMLAHADKDVLMVPYQFTAHKYYRKRGGPVHIPSQKKLSVRTGWPIPEIPYIAQRFNDTTILNVAADLCRFIRRDVYNARGLFYDNQSELAMDDKFKPLREWEKEHMQ

SEQ ID NO: 163341 - protein, 1138 aa, Oryza sativa
  unsure (1)..(1138): unsure at all Xaa locations
  Clone ID: PAT_MRT4530_62347C.1.pep
MDRQWMYADRRSKEFIDGVHYFLRVAETNKQKSFKCCPCNKCKNQKEYSASRTIHFHLFESGFMPSYNCWTSHGEQGVEMEEDEVEDDNILDFAQYARFEGNQTGEEDRDADYNDVADDLGQMLQDAKEDCESEKGAHKLDKMLYPGCEXGHKKLDTTLEFLQWKAKNGVSDKAFGNLLKLVKNILPEGNKLPETTYEAKNIVCPLGLEVQKIHACPNDCILYRGEEYENLEACPVCKALRYKIRRDDPGEVDGQLTKKRIPAKVMWYFPIIPWLRRLFRNKGNARMMRWHAEERQQDGMLRHPADGSQWRNIDRKFKDFGKDARNIRFGLSTDGMNPFGEMSSGHSTWPVTMCIYNLPPWLCMKRKYIMMPIIIQGPKQPGNDIDVFLRPLVEDLRLLXKKEGVPVWDEDKQEEFNLRALLFVTINDWPTHSNLSGQSNKGYKACTHCMDETESTYLKHCRKVVYMGHRRFLAANHPVRKKGKHFEHKADHRTKAKHRSGKTMFAMVKDLKVVFGKGPGSQPIESEDGHAAMWKKNSIFWELPYSEFLDVRNAIDVMHLTKNLCVNLLDFLGVYGKSKDTLEARNDLKHMEQRGDLHPEPKEKGSHYLSPASYTLSKAEKESMFQCLESIKVPSGYSTNIKRVISTKEKKFTNLKSHDCHMLMTQLLPVIIRGILPDNVRATITKLCSFMNTILQKVIDPDRLEALQNDVVQCLVSFELIFPPSFFNIMTHLLCHLVKEIGILGPVFLHNMFPFERYMGVLKKYVRNRAHLEASIAKGYGTEEVIEFCVEFIEDLRLIGVPESRHEGRLQGKRTLGRKAIMTVDNNLFRKAHFTVLQESSLVAPYIEEHLALVRARNIGKSDAWITRHHIDTFPAWLRQHLMGNETINQQLAFLARGPVTTGNNPTGVPYVRVLFLVPGGKIKSMNQNSVVRIDAMGHDGTTGTYYGAIKEIWELDYGPLKVPLFRCQWVRLTGGGITIDDSGMTTVDLNKVGYSDEPFVLANDVTQVFYVKDMSSKGKKGKGPDEPKRHVVLPGKRKIVGVKDKTDEDYDQFDGQPRPAAATPPGRATPPRRPTAAATHCRHAAAPLLPRPPERANISSMNRWLITMTNRYCTIQSQREAASTGTKKRGTRIQTST

SEQ ID NO: 163342 - protein, 938 aa, Oryza sativa
  unsure (1)..(938): unsure at all Xaa locations
  Clone ID: PAT_MRT4530_62348C.1.pep
MSNDKVPSNAPITPQEGNAHQKSGSNKQPDASSEETWRTPSDPFPMEITQVVPRDDDPDYIPMEQADRKPVEPLIVRSKFSNTCGTLVRTRCPINVKLWETVDDNIKTLLWNELQKYFVYPPGSEVRRRDYALKKMGDRWRQWKSDLNRDYVQKNLPPFTEYGHISEADWDTFVKDHTTDEALALSKKMSDLAKKNKYPHRLGSSGYAGHVNQWRETEQRFAAAGKPLLVDPMAERSKNSVLARSTGQVSDEGDILFETLDIEQVTTNLQQIVEKERAGQFVPRRERDQLTATLGTAEHSERVRGLSSKTSWKIGFPQDAPSYKKRDKYKEQLSDKIYAQVKEHFYSLAAKNPTAFPSLVVPIGRAGKTKEVATGLAIPRHQFHNTAIPEDYARVQVAKVHSDHISLELDIPAPKGIELLGDAVNQFILWHRRDIILTAAVPAVGSSTPSSSQARTAAAPAPPSPPEPPSPRDPASPPSLRSPPRQPTPPPSPSLQPAFPAPQPVQASPTSPAKQHAPPAPPSVQASPPTPQSALVEQVHIPEGTTSEPKSNPFEPRRIIPKLISTYDPKEIDKDKEKFMFLAFRNSEKRKELAHVMSDSQKSVLAAQDEVQSWLSAGVPETYEYGKPFLPTYLMNKLPWEMRVMHEWYIKASRKGLGFISVAVPEGAFMSGPNGIFFISFRDLYALYKLDKMDVNHVAAFCLMQFHEADRTGAKVGYIDPTRICKTQHIVELREDCEQLVGKTPQEKGEYVKTLHKRKKLEVATYLAIAMLAHADEDVLMVPYAFTDHYILFLVYPKDQLIISLDPAHYDKETFMEFLTILNLAHKYYRKRGRPVHIPSXKQLSARTGWLCYKQPPGTNLCGYYVCEMLRVNGRXPEIPYIVQRFNDTTILNVAADLCRFILRDVCNARGLFYDNQSELTMDDKFKPLREWEKEHMQ

SEQ ID NO: 163343 - protein, 1191 aa, Oryza sativa
  Clone ID: PAT_MRT4530_62349C.1.pep
MEYGFTANYKVWTYHGEFANPEDDDEELSFEMNETENFIIEDMSRERMDVDVSTDSDDFDGGFDLEDMLRHVEPEVLAGRSRVLENWQALEKASKDLLYDETKGCDKDFIVLRSVLELLRLKAKHGWSDTSFNDLMSLLRVLLPKPNFVPSNTYQAKKLICPLSLGVEKIHACKNHYILYRKEYADLECCPTCGTSRYKMGNGPVDSECTDPDSDKGKRGKIPSMVMWYLPIKDRLKRLYSNPTDAELMRWHQECRKIDGMIRHPADARQWKTFDAKHPEFAKDPRNVRFALSTDGMNPFGDLSSSHSTWPVLLTMYNLPTWICQKRKYILLTILIQGPNQPGIDIDVFLEPLMEDMEELWKEGLRLWDEFKREHFILRAIIFVTINDLPANFSLSGQIKGKTGCLICLEKTSYKYLTSSLKTVYMRHRRFLPQRHRYRKMARLFDNTVENDTAPVARGGTYVYEITKKIKVVYGKGKKKTVKRKKADGDNGTTSPFKKHSIFFKYLDYWKDLEIRHAIDVMHLEKNVFDSTIGTLLDIPSKTKDGLKSRNDLVELSIWHDLHPVVLPNGKTEIPPACYSLTLEEKKAFCKCLQGVRVPTGFASNIRKLVSMKDLTISGYNAHDCHRLLTVFLPIAIRAVKPVHTKKVFDPLELGPLQTFAVETMWAYERYMSILKGYIRNRAHPEGSMIEGYTTEEAVECCMDYIKDANAIGIPVHRHDGRLSGRGTVGRKQFFDNDYKKVSATHNSVLQQLAIVEPFIERHLEEIKACFPGRSNDWVSREHKRRFPLWFKDLNLPVGDSVEELTLQRLACGPSSIVNSWQGYDINGFTLSTTTKDMKSTAQNSGIRVEAIDTSGEKRSYYGTIQEIWELDYGLNIQIPVLHCEWVKDTTGVSVDDYGLTIVDHSKTGHKDDPWVLAERMAQVFYVKDPSDERKTIVISGKQQIVGIDNIEDPNDYNYPHGKIFFACGRLNSPHGKIFFAFPMRIKKVERTIDEVNMSERGEPKFSKSRLPRNPSRQAGQNFPSRRRRRPRHRRLLPKIPPPPRRRRRRRQDLNPLAVAVAAARTSAPLAVAVAAARTFCPPRRRRRRRQVAVATARNSPPSPLPSPPPGRPRRQVVPAAKSSPLPPAPPRSCPAPRRRRRHCQDLSPLAVAVAAARSPSTPDGPLPPPPSHPPPQVVPAARREWEKKTW

SEQ ID NO: 163344 - protein, 285 aa, Oryza sativa
  unsure (1)..(285): unsure at all Xaa locations
  Clone ID: PAT_MRT4530_6234C.1.pep
MPKGAKKRAKLKKKQQGDHPAGSDDGGNNNNNKNNAAENGSNDSSRRRDAASDGNHHLPSRPNVPHVDVSEDSMESSEEMVTPRAAASEADEEERKAATSEVPVEVVEAGEEVMVDALPPEAAAGAQEQQGKAEALVVVQEPEVKREELVAKVHPMHDPEPQGEEVLIVEAAAVSAVQEPEVKRDEVVVMETAAPPAVQESETKSGGVLVKDVVEVSRSLGAADTTEXWPGDLQWLWLQQGSGQHGGIAVGYLMRSLVRRDRXGWNLEAKKTVDAKLFKADGNCN

SEQ ID NO: 163345 - protein, 413 aa, Oryza sativa
  Clone ID: PAT_MRT4530_62350C.1.pep
MPNLGVNSMFECLESIKVPSGYSTNIKRIISTKEKKFTNLKSHDCHVLMTQLLPVIIRGFLPDNVRSTITKLCAFMNAILQKVIDPDRLEALQNNMVQCLVSFELIFPPSFFNIMTHLLCHLVKEIGILGPVYLHNMFPFERYMGVLKKYVQFIEDLRPIGIPESRHEGRLRGKGTLRRKAIMMVDNNLFRKAHFTVLQQSSLVAPYIKEHLALVRARNIGKSDAWITRHHIDTFPVWLRQHLMGNETINQQLAFLARGPSGSIATFQGYEINGYTFYTRNQDIKSTNQNSAVRIDAMGHDGTTDTYYGAIEDIWELVYGPLKDMSSKGKKGKGPDEPKCHVVLPGKRKIIGVEDKTDEDYDQFDGQPPFTVTVDPSILLSNEDTPYSRSDHKEGTIVRRKYVRSTVTADVLP

SEQ ID NO: 163346 - protein, 2215 aa, Oryza sativa
  Clone ID: PAT_MRT4530_62351C.1.pep
MSYRVDPRTNVPQYPTYPVYEYPLSTMLVHVPHEDIRFWRKLSKRFNLLMDRSSWMYEMRRTQPIFIKEASKFIDQAKEHALRENMTKIFCPCRHCKNQKLLVDPGEILGHIMEYGFTANYKVWTYHGEFANPEDDDEELSFEMNEAENFIIEDMSRERMIVDVSTDSDDFDGGFDLEDMLRHVEPEVLAGRSRGLENWQALEKASKDLLYDETKGCDKDFTVLRSVLELLRLKAKHGWSDTSFNDLMSLLRVLLPKPNFVPSNTYQAKKLICPLSLGVEKIHACKNHCILYRKEYAELECCPTCGTSRYKTGNGPVDSECTDPDSDKGKRGKIPSMVMWYLPIKDRLKRLYSNPTDAELMRWHQESRKIDGMIRHPADARQWKTFDAKHPEFAKDPRNVRFALSTDGMNPFGDLSSSHSTWPVLLTMYNLPTWICQKRKYILLTILIQGPNQPGIDIDVFLEPLMEDMEELWKEGLRLWDEFKREHFNLRAIIFVTINDLPANFSLSGQIKGKTGCLICLEKTSYKYLTSSLKTVYMRHRRFLPQRHRYRKMARLFDNTVENDTAPVARGGTYVYEITKKIKVVYGKGKKKTVKRKKADGDNGTASPFKKHSIFFKYLDYWKDLEIRHAIDVMHLEKNVFDSTVGTLLDIPSKTKDGLKSRNDLVDLSIRHDLHPVLLPNGKTEIPPACYSLTLDEKKAFCKCLQGVRVPTGFASNIRKLVSIKDLSISGYNAHDCHRLLTVFLPIAIRAVKPVHTKVVITKLCYFFNRISQKVFDPLELGPLQTFAVETVCQLEMYFPPSFLDMMEHLIVHIVPQIIELGPLYLHQMWAYERYMSILKGYVRNRAHPEGSMIEGYTTEEAVECCMDYIKDANAIGIPVHRHEGRLSGRGTVGRKQFFDNDYKKVSAAHNSVLQQLAIVEPFIERHLEEIKACFPGRSNDWISREHKRRFPLWLKDLNLPVGDSVEELTLQRLACGPSSIVNSWQGYDINGFTLSTTTKDMKSTSQNSGIRVEAIDTSGEKRSYYGTIQEIWELDYGLNIQIPVLRCEWVKDTIGVSVDDYGLTIVDHSKTGHKDDPWVLAERVAQVFYVKDPSDERKTIVISGKQQIVGIDNIEDPNDYNQFDDVPLFTDLPMRIKKVERTIDEANMSYVRADGVAKDLSPLAVAVAAARTSPPSPSPSPPAGRRRHRTELSPLAVAIAAARSSPPPSRPRYRRLLPEVAPPLAVADATARTSPPSPSPSPPPGRRRRRTDLSPLAVAIAAARSSPPPGASSEETWRTPSDPFPMEITQVAPRDDDPDYIPIEQAMVVRRRSKRKAGRNRTEQEVEMDTATSAPERTETSTSAGGSGKKRRGERSKNKLPKETYNVIALDQDGKPIEPPIVRSKFSNACGTLVRTRCPINVKLWETVDDNIKTLLWNELQKYFVFPPGSEADWDTFVADRTTAEALALRKKMSELAKKNKYPHRLGSSGYAGHVDQWREIEQRFAAAGKPLLVDPMVERSKNWVWARSTGQVSDEGDILFETPDIEEVTTNLQQIVEKERSGQFVPRRERDQLTAALGTAEHSGRVRGLSSKTSWKVGFPQDAPSYKKRDKYKEQLSDKIYAQVKEHFYSLAAENPTAFPRLFPDSQQPTQSAQQTTNVPSSVGSVQTSTFPVDSITGPTPCSLVVPIGRAGKTKEVATGLAIPGRQFHSTAIPEDYARVQVAKVHSDHVSLELDIPAPEGIELLGDAVNQFILWHRRDIILSAAVLAAGSSTPSSSQAMTAAAPAPPSPPEPPSPRHPPSPPPPRSPPRQPTPPPSPSQQPPLPTPQPVQASPTSPTKQHAPPAPPSVQTSPPTPQSALVEQVHIPDGTTSEPKSNTLEPRRIIPKLISTYDPKEIDKDKEKFMFSAFRNSEKRKELAHVLSDSQKSVLAAQDEVQSWLSADVPETYEYGKPFLPTYLMNKLPWEMRVMHEWYMKASRKGLGFISVAVPEGAFMSGPNGIFFISFQDLYALYKLDKMDVNLVAAFCLMQFHEADRTGAKVGYVDPTRICKTQHTVELRQDCEQLVGKTPEEKEEYVKTLHKRKKLEVATYLAIAMLAHADKDVLMVPYQFTAHKYYRKRGGPVHIPSRKKLSVRTGWPCYKQPPGTNLCGYYVCEMLRVNGRYKTTSNRIPEIPYIAQRFNHTTILNVAADLCRFIRRDVCNARGLFYDNQSELAMDDKFKPLREWEKEHMQ

SEQ ID NO: 163347 - protein, 984 aa, Oryza sativa
  unsure (1)..(984): unsure at all Xaa locations
  Clone ID: PAT_MRT4530_62352C.1.pep
LHLGAXAKSGNEKPIQRKDQHYYTENLRIRYKELIPVLKERDNEDFSMSDMLEHIFMARRYQCMHKELPCREPGTKVSVRLMKFRMDAKVPKRWIGNRCTLTGGPKSLLTACIIFLRVAEANKQKGLICCPCNKCKNQKEYSASRTIHFHLFESGFMPSYNCWTSHGEQGVEMEEDEVEDDNIPDFAQYAGFEGNQTGEEDIDADYNDVADDLGQMLQDAKKDCESEKGAHKLDKMLEDHRTSLYPGCEQGHNKLDTTLEFLQWKAKNGISDKAFGDLLKLVKNILPEGNKLPETTYEAKKIVCPLGLEVQKIHACPNDCILYHGEEYDSLEACPVCKALRYKIRGDDPGEVDGQLTKKRIPAKVMWYFPIIPRLRRLFRNKGNARMMRWHAEERQQDGMLRHPADANHPVQKKGKHFEHTVDHRTKPKHRSGKTVFAMVKDLKVVFGKGPGSQPIESEDGHAAMWKKNSIFWELPNWEFLDIRHAIDVMHLTKNLCVNLLGFLGVYGKSKDTLEARNNLKHMEQRGDLHPEPEEKGSHYLSPASYTLGKAEKESMFQCLEGIKVPSGYSTNIKRIIRMKEKKFTNLKSHDYHVLMTQLLPVIIRGILPDNVRATIKKLCSFMNAISQKVIDPDRLEALQNDVVQCLVSFELIFPPSFFNIMTHLLCHLVNEIGILGPVFLHNMFPFERYMGVLKKYVRNRARPEASIAKGYGTEEVIEFYVEFIEDLRPIGVPESRHEGRLQGKGTLGRKAIMTTRSRQAPPPASTRATKKAKVDTTKNKEPPYGCSQEELDAYVAGEVKRQLKPRSPEKKIPIDPSVKNFFKGMSTANKEALKQSDYDRTLRKAYYRKSKPVPQLGEQPHQVVEPLVTGEDFGITDFISDTGLTMAQLVGGAPIPKAEVAYKFELGKPLVRPEQLQSLPTQMYKFHEWYIEISANGREMFGAKIRNPDFLQGEDVLWIHFKDVFDLYHRDALDVSLLSAWIL

SEQ ID NO: 163348 - protein, 50 aa, Oryza sativa
  unsure (1)..(50): unsure at all Xaa locations
  Clone ID: PAT_MRT4530_62353C.1.pep
DMCSKFSFGLEHGLXXXXXXXXXXXXXXXXYCLLVLGYLQEHVCSSLLSF

SEQ ID NO: 163349 - protein, 533 aa, Oryza sativa
  Clone ID: PAT_MRT4530_62354C.1.pep
MEEDEMEDENIPDWAQYAGFEGNRTGEVDGDVDDNDAADDLGQMLQDVKKDCESENVSDKTFGDLLKLVKNILLEGNKLPETTYEAKKIVCPLGLEFQKIHACPNDCILYRGEEYENLEACPVCKALRYKIRRDDPGEVDRQPTKKIIPAKVMWYFPILPWLRRLFRNKGHARMMRWYAEERQQDGMLRHPADGVFGKSKDTLKARNDLKHMEQRDDLHLEPKKKGSHYLSPASYTLSKAEREIIIRGILPDNVRATITKLCAFMNAISHKIIDLDRLEALQNDVMQCLVSFELIFPPSFFNIMTHLLCHLVKEICILGPVYLHNMFLFERYMGVLKKYVHNHARPEASIAKGYGTQEVIEFCIEFIKDLCPIGVPESRHDGRLRGKGTLGRKAIMTCQWVRLTSGGVTIDVSGMTTVDLNKVGYSDEPFVLANDVTQVFYVKDMSSKGKKGKGPDEPKRHVVLLGKRKIVGVEDKTVEDYDQFEGQPPFAMTVDPSILLSNEDIPYSRSDHKEGTVVRRKYVRLTVTADVLP

SEQ ID NO: 163350 - protein, 1152 aa, Oryza sativa
  unsure (1)..(1152): unsure at all Xaa locations
  Clone ID: PAT_MRT4530_62355C.1.pep
MHLTNNLCVNLLGFLGVYGKSKDTLEARNDLKHMEQRGDLHPEPKEKGSHYLSLASYTLSKAEKESTFECLESIKVPSGYSTNIKRIISTKEKKFTNLKSHDCHVLMTQLLPVVIRGILPDNVRAIITKLCAFMNAISQKVIDPHRLEALQNDVRYMGVLKKYVRNRARPEASIAKGYGTEEVIEFCVEFIEDLRPIGIPESRHEGRLRGKGTLGKKAIMTLDNNLFRKAHFTVLQQSSLVALYIEEHLALVCTKNIGKSDAWITRHHIDTFSTWLRQHLMGNETINQQLAFLARGPSGSIATFQVYEINGYTFYTRAQDMKSTNQNSAVRIDAMGHDGTTGTYYGAIEDIWELDYGPLKVPLFRCQWVRLTGGGVTIDDSGMTTVDLNKVGYSDEPFVLANDVTQVFYVKDMSSKEKKGKVTDEPKRHVVLPGKRKIVGLEDKTDEDYDQFDGQPXFTMTIDPSILLSNEDTPYSRSDHKEXTIYWNEEGNVERDAEGNDAEEANGSQPSAGQKRARGQRGAAKKIEGRHIITEVDEDGRPSAPAEAARNFVRHSGWVVRDNVPVSTVYWRRTRARGDDDSFVPDSEKEMLWTTLLETFTLPAGTDNLVKXWTLKKMAEQFXSFKGDLYKKYILKGLTPNFDVFPKLRDHWDEFVAYKTGQQGQEMMARNKENAAKKKYHHHLGSGGYSVAKPKWEEMEASLLEGGIEPATAKWPDRSKFWYYAHGGTLNPVDGSLVFSDQICEAASRLTDAVVASSQGTFRPDREKDELSRMRSKRDTEAKIADLEYRVLSYELSMQEEVARKVDERMAAHRSQDPQPYIHPVMVSTSGNRSSCASTGQVASGMAIPTDPSGTYHCRPIPAGYSRVEVELVEAAYEDLELDYPGGDGETHLRDTSHAIILWRKRYIILPGRQAASCAPSPPAPPSPPAPSPPVPPPPPPPPCPPAPPKTRSCQAPPPARTRATKKAKVDATKNKEPPYDCSQEELDAYAAGXVKRQLKPRSTEKKIPIDPSVKNFFKGMSKTNKEALQISDYDRTLQRAYHKKSKPVPQLGEQPNQEVEPLVTGEDFGITDFIADTSLSVDQLVGGAPIPKAEVAYKFELGKPLVKPEQLESLPTQMYKFHERYMEMSSNSREMFGARIRNPDFLQGDGV

SEQ ID NO: 163351 - protein, 61 aa, Oryza sativa
  Clone ID: PAT_MRT4530_62356C.1.pep
MALPASSSGLFRFISPRRRPQSTDIAAAATWGVFAGTAAIYLVQPFDWIKKTFFEKPEPEA

SEQ ID NO: 163352 - protein, 655 aa, Oryza sativa
  Clone ID: PAT_MRT4530_62357C.1.pep
MEEDEVEDDNIPDFAQYTGFDGNQSGEEDRDADDNDVADDLGQMLQDAKEDCESEKGAHKLDKMLEDHRTSLYPGCDDKTFGDLLKLVKNILPEGNKLPETTYEAKKIVCPLGLEVQKIHACPNDCILYRGEEYENLEACHVCKALRYKIRRDDLGEVDRQLTKKRIPAKVMWYFPIIPRLRRSFRNKGNVRMMRWHAEERQQDGMLRHPADGPKQPGNDIDVFLGPLVENLKLLWKKEGVPMWDEDKQEEFNLRALLFVTINDWPALSNLSGQSNKGYKACTHCMDETESTYLKHCVYGKSKDTLEARNDLKHMEQRGNLHPEPKDKGSHYLSPASYTLSKAEKEIMFECLKSIKLCHLVKEIGILGAVYLHNMFPFERYMGVLKKYVRNRARPEASIAKGYVTEEVIEFCVEFIEDLRPIGVPESRHEGRLRGKGTLGRKAIMTVDNYLFRKAHFTVLQQSSLVAPYIKEHLALVRARNINMKSTNQNSAVRIDAMGHDGTTGTYYGAIEDIWELDYGPLKVPQFRCQWVRLTGEGVTIDDSGMTTVDLNNVGYSDEPFVLANDVTQVFYVKDMSSKGKKGKWPDEPKRHVVLPGKRKIVGIEDKTDEDYDQFDGQPPFTMTIDSSILLSNEDTPYSCSDHKEGTIMRRKFCH

SEQ ID NO: 163353 - protein, 70 aa, Oryza sativa
  Clone ID: PAT_MRT4530_62358C.1.pep
TGERAHDEGECSLPCVMTSELKGVAYSSKGYQYSHRYDKYSPVWVGIFVTQKQTSSNLFHHIKPFIPTHL

SEQ ID NO: 163354 - protein, 993 aa, Oryza sativa
  Clone ID: PAT_MRT4530_62359C.1.pep
MAKAANTIAARKAEKGIEGMGGHHRRDGWEPSCPLSRSAEKARVYPKSNFFSKMDRQWMYADRRSKEFIDGVHYFLRVAEANRQKGFTCFSCNKCKNQKEYSASRTIHFHLFESGFMPNYNCWTSHGEQGVEMEEDEVEDDNIPDFAQYAGFEGNQTGEEERDADGNNVADDLGQMLQDAKEDCESEKGAHKLDKMLEDHITSLYPGCEQGHKKLDTTLEFLQWKAKNGVSDKAFGNLLKLVKNILPEGNKLPKTTYEAKKIVCPLALEVQKIHACPNDCILYRGEEYENLEACPVCKALRYKIRRDDPGEVDGQLTKKRIPAKVMWYFPIIPRLRRLFRNKGNARMMRWHAEERQQDGMLRHPADGPKQPGNDIDVYLRPLVEDLKLLWKKEGVPVWDEDKQEEFNLRALLFITINDWPALSNLSGQSNKGYKACTHCMDETESTYLKHCRKVVYMGYRRFLAANHPVRKKGKHFEHKEDHCTKPKHRSGKTVFAMVKDLKVVFGKGPGVYGKSKDTLEARNDLKHMEQRGDLHPEPKEKGSHYLSPASYTLSKAEKKSMFECLESIKVPSGYSTNIKRIISTKEKKFTNLKSHDCHVLMTQLLPVVIRGILPDNVRATITKLCAFMNAISQKVIDPDRLKALQNDVVQCLVSFELIFPPSFFNIMTHLLCHLVKEIGILGPLYLHNMFPFERYMGVLKKYVRNRASPEASIAKGYGTEEVIEFCVEFIEDLRPIGVPESRHEGRLRGKGTLGRKAIMTVDNNLFRKAHFTVLQQSSLVAPYIEEHLALVRARNIGKSDAWITRHHIDTFSTWLRQHLMGNETINQQLAFLARRPSGSIATFQGYEINGYTFYTRAQDMKSTNQNSAVRIDAMGHDGTTGTYYSAIEDIWELDYGPLKVPLFRCQWVRLAGGGVTIDDGGMTTVDLNKVGYSDEPFVLANDVTQVFYVKDMSSKGKKGKGPDEPKRHVVLPGKRKIVGVEDKTDEDYDQFDG

SEQ ID NO: 163355 - protein, 426 aa, Oryza sativa
  Clone ID: PAT_MRT4530_6235C.1.pep
MARGLFACFGRGGEEAEEEAGKRPALRRRRTVNLRSLSLEDLSRTLAKTNLHAFTLDELKAATKNFSTSNFLGEGGFGPVYKGFVDGELRPGALESQHVAVKYLDSDGVQGHREWLAEVVYLGMLSHPHLVKLVGFCNQDDHRMLVYEYMPRGSLENHLFKNLLASLPWSTRLKIAVGAAKGLAFLHEAETPVIYRDFKASNILLDKDYTAKLSDFGLAKEGPQGDATHVTTRVMGTHGYAAPEYILTGHLTARSDVYSFGVVLLELLTGRRSVDKRRRGREQNLVDWARPYLRRADRLHRIMDPSLELQYSARAAHAAAKVAHQCLQSVPKSRPCMRDVVDALEPLLAVDDDVPMGPFVFTVGGEEAAAAAAGSSAAGDAGDDEPARGSRRGKKHVTSAVHAESPLRDGRYASRVKRPESPPSVI

SEQ ID NO: 163356 - protein, 663 aa, Oryza sativa
  Clone ID: PAT_MRT4530_62360C.1.pep
MEEDEVEDDNIPDFTQYAGFEGNQTSEDERDADGNDVADDLSQMLQDVKEDCESEKGAHKLDKMLEDHRTDKAFGDLLKLVKKILPEGNKLPETTYEVKKIVCPLGLEVQKIHACPNDCILYRGEDVSPKKNDWPALSNLFGQSNKGYKACTHCMDETESTYLKHCQKVVYMGHRGFLVANHPVRKKGKNFEHTADHRTKPKHRSGKTVFAMVKDLKVVFGKGPGSQPIESEDGVYGKSKDTLEARNDLKHMEQCDNLHLEPNEKGSHYLNPASYTLSKAEKDNMFECFESIKLLLVVIRGILPDNVRATITKLCAFMNAISQKAIDPDRLEAPQNDVVQCLVSFELIFPPSFFNIMTHLLCHLVKEIGILGPVYLHNMFPFERYMGVLKKYVRNRARPEASIAKGYGTEEVIEFCVEFIEDICPIGVPESRHEGRLRGKGTLGRKAIMTVDNNLFCKAHFMVLQQSSLVASYIEEHLALVRARNISQDMKSTNQNSVVRIDAMGHDGTTGTYYGAIEYIWELDYGPLKVPLFRCQWVRLTGGGVTIDDSGMTTVDLNKVGYSDEPFVPANDVTHVFYIKDMSSKGKKGKGPDEPKRHVVLPGKRKIVRVEDKTDEDYDQFDGQPPFTVTIDPSILLSNEDTPYSRSDHKEGTIVRRMYVRSE

SEQ ID NO: 163357 - protein, 439 aa, Oryza sativa
  Clone ID: PAT_MRT4530_62361C.1.pep
MVTRRCGKRTIYFGSYPIGNSWTSFTNIKRIISTKEKKFTNLKSHDCHVWMTQLLPVIIWGILPDNVRATITKQCAFMNAISQKASIAKGYGTEEVIEFCVEFIEDLRPIGVPESRHEGRLWGKGTLGRNAAMTVDNNLFRKAHFTVLQQSSLVAPYIEEHLALVPARNIGKSDAWIIRHHIDTLPVWLRQHLMGNETISQQLAYLARGPSGLIATFQGYEINGYTFYTRNQDIKSTNQNSAVRIDAMGHDGTTDTYYGAIEDIWELVYGPLKDMSSKGKKGKGPDEPKCHVVLPGKRKIIRVEDKTDEDYDQFDGQPPFTVTVDPSILLSNEDTPYSRSDHKEGTICAKHDQGTNLCGYYVCEYAHFLSTQIYTTQELDCIHMRDNLPHKDSITAIQEQLMRFINEEVLNPEGEFYYDGSTIYNVGLSSFDITPASKS

SEQ ID NO: 163358 - protein, 94 aa, Oryza sativa
  Clone ID: PAT_MRT4530_62362C.1.pep
MGSTRVDEVSTSSPAAAGADGVGDCLDRLGESGVMCSRGRRRRRHGVEHTTATLEAQNLPVHIQLYQFIETHPGSSWSGTVAAVMADAISPREY

SEQ ID NO: 163359 - protein, 80 aa, Oryza sativa
  Clone ID: PAT_MRT4530_62363C.1.pep
MAMHEPSRPPPSPSTATIRSGGTQAERCVRGWESERTIDLRQQEDGMAKLQYDAQDGGGGDGELATVVAALRVYRTDSGV

SEQ ID NO: 163360 - protein, 101 aa, Oryza sativa
  unsure (1)..(101): unsure at all Xaa locations
  Clone ID: PAT_MRT4530_62364C.1.pep
MDEDNDTVAVDGNGRXSGGERRLRRRHCFRPRCRIICFRSMMKRCLAHGERGGRRGNVYDSEAVTTATLISIFGSVAGSGSYRGRSELLPGWNMYWSTSFA

SEQ ID NO: 163361 - protein, 101 aa, Oryza sativa
  unsure (1)..(101): unsure at all Xaa locations
  Clone ID: PAT_MRT4530_62365C.1.pep
FPAASSHRPHARPATPPRAVCRRSPSPSRHHRVRPPAVTNPHPSDYYAVHNSSLPPVTCGPXPYSRAIPHPYIXXALXRIFRSTRPFLQIRAKSXFPFLGS

SEQ ID NO: 163362 - protein, 173 aa, Oryza sativa
  Clone ID: PAT_MRT4530_62366C.1.pep
GLRRRADSSELAKALLPAVLTKLMAAKEKHLEVLVGLASQICNALPAVCAPLMLGSDPNLLTPALVQMLVDTLNAREKPIPECPRMRRAIVELAISIVEMCPPKAAIFREKGMVEALSKVERTPSRVENYWLCDEGLVLERGLPMPDLVAKAKRLIDSASAVLQEMSVANVHE

SEQ ID NO: 163363 - protein, 670 aa, Oryza sativa
  unsure (1)..(670): unsure at all Xaa locations
  Clone ID: PAT_MRT4530_62367C.1.pep
LRRPLADNMPIGLQVNLGDGYSDLKTSLITMAQASSLCGKPDELASVHLQQLLEICSTYTMKGVSPDAIRLRLFPFSLLGRAKQWFYVSXQRVDMWNKCSTTFLSKFFLIEALERLQEYDAVCPRHGMDEWLIXQSFYNGLTPSSLAHLDTAAGGAFFSKTVRDAINLIEKMVSNMGWREERLQTRQRGMHTVKXTEMLAAKLDLLMKXLDDPEKNKPQGTVKALDSHITCEVCXNAGHSGTNYPGTHEESMFMNNNGYRPQVGQGWYXLYPFYQGGDNNVNFNNQPSLXYLVFAQAKTIDALSKKLAANDKLAALFPANESGRILGQPKPSLENVKAITTRGGKSTRDPPYSNIAGTRRNDKEAFPSNTIRNKKTAQQEKVAPQDYCDTNLLPFAHFVETIQKIHVKVPLLDAMQVPMYAHYLKDILSNKRPLPNTEMVKLMEQCSNAILHRLLEKKKDLGCPAITCTIGIQHFDQALCDLXASVSVMPNKIFDWLNFTVLAPTLMRLQQADSSVHYPSGIAVDVPVKIWNFFIPVDFVVLNMDSDKETPLILGRPFLSTXEANIDVGAGSIQLCINGKEEXFEFRLRTELCSVVKIKYGQNPHNIXEVEVKLPKMDSLIAFMKNFLRRRASLRRPRPRSAPGKLGAQAKKPMTPAAKKPQATPKTKKV

SEQ ID NO: 163364 - protein, 146 aa, Oryza sativa
  unsure (1)..(146): unsure at all Xaa locations
  Clone ID: PAT_MRT4530_62368C.1.pep
QPPSKVQITAVDHLHQYGHLWNMIQTSAPXLTEQRDSITXKPTTSGIYSACKSAYRLQFIGAARTIYIXSIWKCXAPPKYKFFSWLIVQNRVWIADRLQKRGWANQLLYPLCRTSADSALHLLAKCRPSKSIWVEVQRWEKTYLKL

SEQ ID NO: 163365 - protein, 120 aa, Oryza sativa
  Clone ID: PAT_MRT4530_62369C.1.pep
MGKKQDPEVGKKKDPAAATAWRGGAAAAGRSSCQDAGRRRSERGGEVRSSGLRVDEEQCLRACNPRVPNREVEKVVRGWTAQINPDYHAAVRAASFSPLVAPPPLLRGQDADSFSARRLL

SEQ ID NO: 163366 - protein, 206 aa, Oryza sativa
  Clone ID: PAT_MRT4530_6236C.1.pep
MAARRVVSTLTTLRCATHFSSDESAVIGWDWDLVVRLLVFVYVQGVPFLQSFDTWKFIRRLEPVIICLGFYVNKMGQCALDNALQTQTLQWSLVRMKICFFPSKPTPKWCCVPTAVRLIQCSSFLLHTLFHGQQKPQQQPALLQTLFPEKIILALLLHRSSQKLFVISLAYSQKAFFQLLLQCCCYSTTNKTREKRSKDASSDCVP

SEQ ID NO: 163367 - protein, 77 aa, Oryza sativa
  Clone ID: PAT_MRT4530_62370C.1.pep
HVQFHRVKAALCGTSCVATEQPSLCPFAGYNGVCQQIDHQGCMSIWYSWLQDIPCCDCIVGVLGASPSSPYVLRNQR

SEQ ID NO: 163368 - protein, 90 aa, Oryza sativa
  Clone ID: PAT_MRT4530_62371C.1.pep
MQAKAGGSCFTLATRLALANLDFNILLGDEIKLDDPDGPDPDRTAGTVSLHPTPVLLQTPERLRIASIAPHGEAWRARARRAHGQRGVSR

SEQ ID NO: 163369 - protein, 438 aa, Oryza sativa
  unsure (1)..(438): unsure at all Xaa locations
  Clone ID: PAT_MRT4530_62372C.1.pep
VTDSDXXXXXXXXXXXXXXXXXXXXXXXXXXXXXMLLRNINQSMGLCNGTRLLIVQLGEHLLQCVILTGSNIGDKIYIPRIALCTTNVKWPFTLQKRQFPVRVCYSMTINKSQGQTLDRGNSIHAHIFPPLTEKYKPLLTEGKVYYLHSYTVKYGNRLYRPVPNEMMILFTTWTEIEECIGGPAGFPTIVYSLTSYNDVPNLVGNVDRFVDVVGVITEITTPTMLRPKSRKADSLXKRTVQICDANIGHLIFLTCLPPFFYVYTNSNSILNVALWGERALAFQAEDIYNAGKKEPQIVLFVGTLVKDYTNVGLALSGCSACKWYINIDIPEIAELKKKLAKPYGYTYKCGSCSWIGMATPRTAQRLVRKPIEALIDKIPEGSNFIPDEITCLLEKQFVWNVIITESSLRNCEVSFQVNIIISGDTSGQPLLLMSPTSS

SEQ ID NO: 163370 - protein, 1039 aa, Oryza sativa
  Clone ID: PAT_MRT4530_62373C.1.pep
MVWKSWGGVVFAVAAAAAALLCSSDAADDVVSVSFSKTPPRVSRSASAVFTFQVLHTNGSGPCQDCLITCKEGGGRGEGVGVRKKQQQQQRDSGGEYSTRTYNSSNVVNRREPYSSRNENGLDADTVAPTASVKAEAGFTSGSNVSVLVSFSEPCPGGGGFTCNATYCHLSVYGPGRVDPSSLQVLRPALQYSVHVTIPPELLYGRLILVMAKGFCTDAAGHHFIRTANSTFTLRFDRRSDSMNIGSSIPEKLLQIEGATRVVEATNDDKDLRVYLSFAEPVMNSSSQILAALTATDAILTPTNRSTLGNRRFGYLVKRTSNTAVVTVSCDGNSIISRQGTPVSSSEPYTFLYGYFHEASKSIYTAQIQAVDNLVSVHVAENSAQDVAGNTNLPSDRLEVRHYSVPASSSSIAIVTTVIFTATAAFATLLTVSTSSLLASGVIQRPPSYLVSEPSRNLLVFALSRWLSINLPVEYYELSKGLEWSIPYMRLPWEGPSADPFVGYSTMPAIAYSEMLDRTALAADVLRRPPAAPGVAMAMPSTSPLDGKPLTAMEYRYLFENQDMKPEAQIIMKLQDLDGWKYFFRNIFWLAVIAAAFLLLHATLLLYLKLRHRHSHTHVGALVFPRLELMLVILAMPCVSQASAALIRGGTTAGLAVGIVLTGVLTAFLVALLLFLSLGVTTGRLLQYKEVHQEGREYHWYQEIVRRTLGPGKRGQWTWKDPARTACLVKLGPLFEDLRGPPKYMLSQIAGGSGGKRAAERIIVSDDENEDAEAPFLQKLFGILRIYYTFLESVKRVALGIVAGAHASSDHSSRAHAVVVLAIASFQLFFMVLKKPFIKKRVQLVEIVAVASEVLVFAACLRLVDSGGSAVAEGSGVGLAMLTVFAVALAAQVCNEWNALYRQVRLLSSDRRSFVEGAKAAWVGLLLLVLPSSALGEQLEKMKKQQEQPEAVALGGGGGGTERSWLGQLREMAKASFSKEGQGGEAEASGSRAKGGSRSMSSVASSSDSKAKGPENSHSQWSSKSKGLYKDLEAIFSNR

SEQ ID NO: 163371 - protein, 92 aa, Oryza sativa
  unsure (1)..(92): unsure at all Xaa locations
  Clone ID: PAT_MRT4530_62374C.1.pep
IKKNQIWQKLGLVGQKFSYXTLKFFRAXRQKVKIQQVGGFYFEGKLGQNQNLLGFKGPFKKGISPRGXGGPKTITPLGGVFEKVLKKKRVQI

SEQ ID NO: 163372 - protein, 66 aa, Oryza sativa
  Clone ID: PAT_MRT4530_62375C.1.pep
RAAANLAHAPPPPVPNLARAVGAPPGKRIEVVRERENTLLLFGRAATHAAVAFVEFNVHQYGDHRC

SEQ ID NO: 163373 - protein, 81 aa, Oryza sativa
  unsure (1)..(81): unsure at all Xaa locations
  Clone ID: PAT_MRT4530_62376C.1.pep
RRDQGNDGDCPLALLYTGGHSIVFTGAESRXKSGPSWRARGVSFRKGALAFIPHQFITWLSFFFFLVVMIIDNHSILYRLL

SEQ ID NO: 163374 - protein, 35 aa, Oryza sativa
  Clone ID: PAT_MRT4530_62377C.1.pep
MADEVLCERPQNLSQKAHSRQGEAKYILGSSWALG

SEQ ID NO: 163375 - protein, 168 aa, Oryza sativa
  Clone ID: PAT_MRT4530_62378C.1.pep
VDSRGSPLRFLRLNNNMFHGHIPGSITGLRDLRHLNLAENRLSGPIPSGGQLETLYTYNPLMYSGNNGLCGFPLQRSCPGNSTSKDGDLSNEKHGDQQIPELHSDDQMFFLFGCGVGFVVGSWVVFFSLLFVKTWRIAYFRLFDSVYDKVYVFVVVNWGSLTGMKVAS

SEQ ID NO: 163376 - protein, 82 aa, Oryza sativa
  Clone ID: PAT_MRT4530_62379C.1.pep
FCAQQISCHFTSVGPESWIFLGTLFHVKHVQFQMITFVDIICVARLASKSIIKIMSICSRLFILLQRSLNAGVYGLRTLEIE

SEQ ID NO: 163377 - protein, 140 aa, Oryza sativa
  Clone ID: PAT_MRT4530_6237C.1.pep
KFQEFIHRSYLRCWCLTSNVRRRRRRRHSHSSTGSLATPLAPRACHGRPSSLAAAAPPHAAGRPWGRRRRHFRTRSCHHCGGSSWWRGQRGRWQSRGGGGGTAPRRPAGPSARAWRSSSPWQGNGWMGREELMWVSPDAW

SEQ ID NO: 163378 - protein, 57 aa, Oryza sativa
  Clone ID: PAT_MRT4530_62380C.1.pep
MRRWARGECSRRWQPGRASVGGGDSGLVRTMVAVGWIRWSGVFWKESGVEKHVLARA

SEQ ID NO: 163379 - protein, 394 aa, Oryza sativa
  Clone ID: PAT_MRT4530_62381C.1.pep
MVQLVGPKSVFDFSFEERNRRYDEEMHGPGSLSYRRHLLAAALLTDRSIAAGWRRRRVLEKTLCRRWYSWPHRLVEWWVQDCREAERLAAFFLFHGSGAERWRERRRWGAEEAATGEGGRRGGWRRRGGGRRWRIWAGGRWPDSLPALHDALATAHKERRKLRPMFNVVPGLDGKPGSVSLELGSKPGCFLIAGTSAKVQNFASIREQQVGGFGREVVGDGEVNGGGGGMGTDAQLLSAGCRSQGHSRRSRATVAREERGERVEEREKGREREEEGEGAENDMWGPRRLDNGLLMQETSEIAAAGPRRRRKTTTAMWRVTGAAAARPHGGGEVGSDCAAGDRGSDGRVARLRQKTAATVRHTSEDGDGQATRRKRKTVTAVQWTTGTVAASPLS

SEQ ID NO: 163380 - protein, 76 aa, Oryza sativa
  Clone ID: PAT_MRT4530_62382C.1.pep
MASMDDVDDEDFSPHQATTKESMNSKDDVKFICDGYQRVESSMEEYKSKKVEKGQGEKRKVGEGFAPRWYLPSRKQ

SEQ ID NO: 163381 - protein, 81 aa, Oryza sativa
  Clone ID: PAT_MRT4530_62383C.1.pep
KRLEVQEKCSVLIQTGLSLSLKWQYKNVNEDEKQWYEGSERLVGHPFLVYSLVDLPLENQMDPLKIEMRAWKQISSSSPAG

SEQ ID NO: 163382 - protein, 36 aa, Oryza sativa
  Clone ID: PAT_MRT4530_62384C.1.pep
RVKHLSRSTTRCCAVWASSRYSKTLLEFFRCPCKKR

SEQ ID NO: 163383 - protein, 110 aa, Oryza sativa
  Clone ID: PAT_MRT4530_62385C.1.pep
MARRRRRTTAGDDRWRGETGKGRMTTATRAAGRSWVEMESSPACERSGASATIGDNQMVAEVRAGSVSATAATARRGGGSSGGDARPEMGSGSGARVWRGESGTAVAHGK

SEQ ID NO: 163384 - protein, 175 aa, Oryza sativa
  Clone ID: PAT_MRT4530_62386C.1.pep
MTEGAASGDGRDDEEAATVAEGHEAAPADLATRRPDRAGELAAVEAELAAKGRQQRASDSCDGASLRLTAQGQGVLPASGGGNRPDPCRPAGPGGAVAGGGVLRSGGDVWRGWRRSLEALAAEDEAARSVPDLAGRHPAVPGAGGRMSAFAGGRWSRTMTGDSGSFLSSDGGCGW

SEQ ID NO: 163385 - protein, 117 aa, Oryza sativa
  Clone ID: PAT_MRT4530_62387C.1.pep
AFTEASVDTYYPACKEMARCSLLRDESEIPRPILPEKEEEKKALTATAGEEVVRTLDAVASSSTGSGGSMSAPRPPRRWNPWLGVGGRRRGAGVPRGGFRGARRGGGAAGTRKRGLV

SEQ ID NO: 163386 - protein, 145 aa, Oryza sativa
  Clone ID: PAT_MRT4530_62388C.1.pep
MAFMRSHSNASSGMGVAPDIRDTFLELQMKKAFRYVIFKIEEKQKQVVVEKTGATTESYDDFLASLPENDCRYALYDFDFVTGENVQKSKIFFIAWSPSTSRIRAKMLYSTSKDRIKQELDGFHYEIQATDPTEVDLEVLRERAH

SEQ ID NO: 163387 - protein, 488 aa, Oryza sativa
  Clone ID: PAT_MRT4530_62389C.1.pep
MSTASGDGGDGGGGGDGASSAAGGGGRRIPPASSMPWVRNLRRFVGTGAGLGSEALMELETKRILLEIFKERQRKSMEAGAIPSFYKKKPEDGSISNRVQKLAKYRFLKKQSELLLNADDLDAMWVCLRENCVIDDATGAEKMNYEDFCHIATVCTEQIGQKCKRFFSPSNFMKFEKDDSGRIAILPFYLYVMRTVSLTQARIDMSELDEDSDGFLQPHEMEAYIRGLIPNLAQLRDMPSAFVQMYCRIAARKFFFFCDPHRRGKACIKKVLLSNCLQELMELHQESEEEVTDTEQAENWFSLTSAQRICDMFLALDKDTNGTLSKQELKEYADGTLTDIFIERVFDEHVRRSKVGGGNSREMDFESFLDFVLALENKDTPEGLTYLFRCLDLNGRGFLTTADIHTLFRDVHQKWIEGGNYELCIEDVRDEIWDMVKPADPLRIALTDLLSCKQGGTIASMLIDVRGFWAHDNRENLLQEEEEQVEEA

SEQ ID NO: 163388 - protein, 152 aa, Oryza sativa
  Clone ID: PAT_MRT4530_6238C.1.pep
MALPSAGSGEGRKGRGGEPDLGGRGRPAAGSVRGLAAARGIPRTVAMPPPGLGRRGEKEGKFKGRMPDIERGAGRGGRRRAAGQEARSGRPYHRSIFTRTADSSSIISPPLTPSHRRVPTPSDKAEGRRRNLWCGSSVHEYEARHDIAQHRA

SEQ ID NO: 163389 - protein, 96 aa, Oryza sativa
  Clone ID: PAT_MRT4530_62390C.1.pep
LAPLGGSRSRTFWRWLRTRFCGSFPPKNQNWFLTEIPHLPRNWFVEAQSFFPPQNLWSSRVFKKGPWFLRAVEMKLNEMLVCMFASPNFGQFFDCF

SEQ ID NO: 163390 - protein, 65 aa, Oryza sativa
  Clone ID: PAT_MRT4530_62391C.1.pep
CVNCQQHTLFWTSLGLTKMGTTTTTTTTTTTTTTILLAPHTDLALLYVVPTTYSIFTRQPTHCTP

SEQ ID NO: 163391 - protein, 92 aa, Oryza sativa
  unsure (1)..(92): unsure at all Xaa locations
  Clone ID: PAT_MRT4530_62392C.1.pep
RLQTMQRISGSYPKACKPGEHILHMKSITKGPSHXSHHFQLAFSGVIGTVCCIHTQHQFVSPSLPSGFPSSLGGIRHHRFKHPNFYNVGLIQ

SEQ ID NO: 163392 - protein, 363 aa, Oryza sativa
  unsure (1)..(363): unsure at all Xaa locations
  Clone ID: PAT_MRT4530_62393C.1.pep
GRLTGPFISPPHRANCAHIFVEGAQDHIVVAVAIARESHRDVPFRXYYGDVPIQLCDSGVDSTVYAFVDTSLNAPRHLXMNNVLGWLHNMFKVDPLLKIFIIKDVWPVRGXASTGSWRNFVAKVKEKGYSLAILVQKKIDVFGTXETSCTEVEQSPIVVVEEVSVCTSGQGKAPKEVIALVEFVVPDSNCPANEXDDDESDSPLVVDVMEENEATAEEVELKNEETNVPDDXTTISMSRLRINDGLDDHWRYGCKQVXVRQMFHDKGYLHYVVKRWAFLQRRDFRVKISXNRMMYDMKCTRPGCPERVHGXKPQHDXLWVASRVEQHICLLDNTPLVYRIMMAAFVTKTKPSQLDRRGQSQPL

SEQ ID NO: 163393 - protein, 54 aa, Oryza sativa
  Clone ID: PAT_MRT4530_62394C.1.pep
VMGKVLQAMGGAAYWALLDIPFMTNVRCGMVRTNIPDDRCLGLDMMANMPARLS

SEQ ID NO: 163394 - protein, 80 aa, Oryza sativa
  unsure (1)..(80): unsure at all Xaa locations
  Clone ID: PAT_MRT4530_62395C.1.pep
SAHLLSTYXMSHCSEHVILLEGTAVDAVHSGDVRIRARWQLGVGGLTAELVRLQQGVLGLVVMLPCPLRLPAQLSGIASR

SEQ ID NO: 163395 - protein, 85 aa, Oryza sativa
  Clone ID: PAT_MRT4530_62396C.1.pep
TSVCTRIGRVGLQNHALLQRLHERAGDQVFGSVRRDYSLFVNIYFTFTNMSNTGDTATTGYKKKRAPVNITEGNTASNSSGGPFL

SEQ ID NO: 163396 - protein, 86 aa, Oryza sativa
  Clone ID: PAT_MRT4530_62397C.1.pep
GRAWGTSRASGAGSSPQVGSTRQPHAATTHRTRVAASHTPHGSHRRTPSVPGSRSRGTVVARPSPHVCSTRGVPPPPPPVPAAAVR

SEQ ID NO: 163397 - protein, 163 aa, Oryza sativa
  Clone ID: PAT_MRT4530_62398C.1.pep
AQILIKSFDPNKTIKRVKNNPTPTGEARGQHGTIKIIWKQKKNLKPYTKKMGKQKKGIPQQISDLKKAKAPEPKKMVKKTGFIPTSSRDLREQFFFPKKQRHLELPLNKKAGGKQPLEGQNSNRFIIAGMAPKKRLPFIETRRWWCGNKKRGPLKKNFGWWGK

SEQ ID NO: 163398 - protein, 103 aa, Oryza sativa
  Clone ID: PAT_MRT4530_62399C.1.pep
RDNFLVLFNSVADMLAILISRSVERGMTRGVVPNLVDNGLSILQYADGTILFMENDIDEANNLKIVLGAYEKLSGLKINFHKSEMFYFGKAKERENVFSLRRF

SEQ ID NO: 163399 - protein, 140 aa, Oryza sativa
  Clone ID: PAT_MRT4530_6239C.1.pep
SKRSLPSWGQSLAHFQRFPLPLICWRKWASSPIFFRATAFEKMARENNFPYDLRPNAPLEEHPPPRGELIRLPSLVERPIGGWFEFKILSWGVGRPNTKGHAWGCWGLFFQRSSPKCVYTPPVYSLLPRLKYEPQTIFKF

SEQ ID NO: 163400 - protein, 45 aa, Oryza sativa
  Clone ID: PAT_MRT4530_623C.1.pep
FLELPNSFSSIISCADSFCQVRKIYILSYYIIYLYVRTYVRMYTD

SEQ ID NO: 163401 - protein, 48 aa, Oryza sativa
  Clone ID: PAT_MRT4530_62400C.1.pep
PFLRKAVSYAKMATAPDAEFFTKNTTCPINQACTNDAPTGSSFSSNTH

SEQ ID NO: 163402 - protein, 352 aa, Oryza sativa
  unsure (1)..(352): unsure at all Xaa locations
  Clone ID: PAT_MRT4530_62401C.1.pep
CTTLHSSTQDSVFPCSYFSIPLTNVYHPKAFGGLGIADLRLVGFALRVCWLWLQRSGHPYXDGLKAPAKQAVSDMFQASTFFVQGDGESILFWSAHWINGRSVASLAPDQWPCGSCTVASGLANNTWIFDIHSALTVPVISXFLLVWDMVLHIQLSSGVGNRLVWCWTSDQHYSARSVYQAFFLGQHFFACVNLLWHVKGPTKYKFFLWFAFQQCCXTADLLXKRGINSHSACPFCAQELETANHILLDCVFARRVXLRVLSPLGWIALPPPQPRGSWLQDWXPSSRACLPDHLRASFDPLVLLVSWQLWKERNSRMFDSALSSVSVVLESFRRVGXWSLAGVASFGDLLGV

SEQ ID NO: 163403 - protein, 43 aa, Oryza sativa
  Clone ID: PAT_MRT4530_62402C.1.pep
CSATVGRMNNVINHLVVSPCKQAAHIKINSRLIIWQCQPSSSL

SEQ ID NO: 163404 - protein, 69 aa, Oryza sativa
  Clone ID: PAT_MRT4530_62403C.1.pep
MAPAPRHLPVPPPNTVPPLPMTISLSPATSSFLPPPLPIPPTLTPPRETLIRQSSGGVWVVAGTGEEKK

SEQ ID NO: 163405 - protein, 63 aa, Oryza sativa
  Clone ID: PAT_MRT4530_62404C.1.pep
LIQLKFHETEPLFYILNFYMPTQFTDEAKSDLERQVHFGINRQTAKHERDWISNIKHSRMMAQ

SEQ ID NO: 163406 - protein, 122 aa, Oryza sativa
  Clone ID: PAT_MRT4530_62405C.1.pep
MRRRSNCGIAWAVAVCRRWIRRRLEGLAGWQRRVTPRQQVLQHWLPLATVLRASLPRAGELRRGTGHRSLPLRTHRHRSSSVRRPPSSACVMPPPTLRTPASSFTTQGDARPLRTGLLAPRV

SEQ ID NO: 163407 - protein, 455 aa, Oryza sativa
  unsure (1)..(455): unsure at all Xaa locations
  Clone ID: PAT_MRT4530_62406C.1.pep
MELCVRASSLLLGLLLQLLSSVDVVSAAQKFGINYGQIANNLPDPTQVAGLLQSLNVNKVKLYDADPKVLMAFANTGVEFIIAIGNENLQSMAGNPGAARQWVTQHVQPFLPATRITCITVGNEVFSGNDTGMMASLLPAMKAIYAAVGELGLGGQVTVSSAHSVNVLATSFPPSSGAFREDLAQYIQPLLDFHGQTNSPFLINAYPFFAYKASPGSVSLPYVLFEPNPGVRDPNTNLSYDNMLYAQIDAVYAAMKAMGHTDIGVRISETGWPSKGDEDEAGATVENAAAYNGNLMQRIAMNQGTPLKPNVPIDVFVFALFNEDMKPGPTSERNYGLFYPNGSPVYAINTGAGGVSGRTGPFDPYSAQMFSSASRLAMTSGMGVVVLLGALFLXASSQSLSCHFIQSRPIACVRPDSKVPSGFESSFQTNGNQPLSRTIESFPRVTTTAATIQIE

SEQ ID NO: 163408 - protein, 106 aa, Oryza sativa
  Clone ID: PAT_MRT4530_62407C.1.pep
PCCAYQNIYGKIKSSRSFLTIRTHGTLQEEGVTYNGSLDLGSGLLDWDHLGRHGHSLITERGASTVVNLKQTAGQTHRGKQGEWLISEKESKAKQRVMPTENWKKG

SEQ ID NO: 163409 - protein, 180 aa, Oryza sativa
  Clone ID: PAT_MRT4530_62408C.1.pep
KEIYDARFPVQMPSPNWKIIWNCRAPLKVKLFAWLLVRNRLSTRMNLSKKKIVQSASCAICSSGDETTNHLFLTCPFAINFWSKVRIQPAIQDVQLFHRLSNSPLLPSKHLHVFYILCFWALWNHRHDVVFRGQQPSLAACLHRAISEATLWAETLAVQDRHVIDVWKHLFSSALQTLNL

SEQ ID NO: 163410 - protein, 1463 aa, Oryza sativa
  Clone ID: PAT_MRT4530_62409C.1.pep
MASLPEAPVPPESARMGSPPPSHSPSPPPLQGDPSLPTDAPPPEPSPQPHHATPIPPPSPGQATEGWPRAEEPQPPIGGTPGAAGPPAPPSFFPSLELGTSAAPPALEAAAAGAGQPGSPSPCPPAEPAAEFYPGSAASSPSSSSYETAEDDSPASPPPTPPPLVLCASPDSSYTESSPTRDRFGDEEGSHAAPEPPPPPTPLEGGPDASSAEPAAMASRAREPMGSRTAPEPPTPPLESGQEGFQQQQPHPPPTTHPECDSSEPAELPLPPTSPAEIAYTSPDSVEVDVVAVSPEEAPGSTVAMEVMYGETDTSAVSVSPVLGSAETDAAEIDVIAGMQEEAPGSTVAMEVMYRENDTAAVSVSPVLESREPDVAEGDVVSGVQEAHGSKFSMEVMYRETDAAAVSVSPVLESGEPDKAENDAVEEMQEEAHGSRFAMEATYGEPDASAVSVSPVLESVEPDVTEIDVVSEIQEEAPDSTLAMEVTSGETDTAAVSAFPVLDGGDPDAAEKNVVAGMQEEEAPDSTLAIEVTSGETDTAAVSVSPVLEGVDPDAAEIDVVAGMQEEAPGSTLAMEVTYRETDATAASVSPVLDSGDPDAAEVDVVVGMQEQAAGSALAMLVTYGETDTSAVSVSPVLESGEPDAAQIDVVAGMQEEAPGSMLAMEVTYREVDAATVSVSPVLESVEPDAAKIDVVARMQEEAPGSKLAMEVMYGETGTAAVSVPLVLESREEGSLQESMQRPSSPTMNIEQESMQRPFSPTIGTETSSPEMAPAGSENCKVSWLPLPPPTPLGESMPSLPVAAAPKVLLVMPEEAVESVPSSEALDVEKPASITQAEPSSPNTPPPGFENFKSSWLPLPTTPPPVETTDVLPDVVVTKAVEAPIEEVSRPLPALEVTNMESDTVLSILPTTVLPTGGPLGLLQQPLLRPPSPVVQSEPCLQNEMAPPGFENFKSSSEPCSAEEIAPPGSDNFKSSSEPCLPEEMAPPGFENFKSSSVPCSQGEMAPPGFENFKSSWPPLPTLPQTVPDAAAADALAATVEEAAGPPPALELEAMDVDMDAIHPPPLPFDSGVESLQKPLPRAPSPIMQEAPCSPDRAPPGFETYKSSQLLLPSPSLAQTTNVRQDQSVTEPVSVIEEAPQLLHSVEVMGVHMDAVPPLLPSSESGADGLSPQQFAQPPPAEKDTTTCLPDMVHSGCDNSEPSQLLSLPAVISPVQTPDGLADVPAIDRVAVALEESPQRPLVSGEMEAGTVPIRSSPLKNISEGSLPQLESESHSPTSQAADSLLDASDSKSVAVASEEMSQLPLASQATTTDLVSTTAMQPQSEGIVDESLQPQHPPSSTAHDSPCLQDSVPLVPPPPSPYLNKEVGQMVCGSCRILLAYFRGAGYVHCTCCQTMNYVLEAHEVGKVHCGHCATLLMYPFGAPAVKCSLCLFVTEIGERNVRRRLSIEQPTRTNSSGLAEA

SEQ ID NO: 163411 - protein, 313 aa, Oryza sativa
  Clone ID: PAT_MRT4530_6240C.1.pep
MTVIPPVSKSLSSCVNQWAAVYSPSPARPSEWRWRRNSRVGAATATSGRHAGGAAATAGRRGSTTGQHGGGDRWPARRRRGNSRGSARLYRGPARQRQPLAGAQGGAAAARRRGATLVRRPVGNCGPARSGATGSSGLGEYGWGREGVKGKVGAGAVRGQRCWRRHRCSRANVREAGSQRTERRWVGGGPTRQRSGGKRSGAERRVEWESELAVANPGNVIASTYYVRTWERDAGAEADALREELRSLKAELELTETKVAAAGALAEKAREAYERGREDMRCAVDSCQNEVKDCAYYSIRSILTAAMSFHAQL

SEQ ID NO: 163412 - protein, 74 aa, Oryza sativa
  Clone ID: PAT_MRT4530_62410C.1.pep
LLPIKNRRRTDDSGVAGVRNPGYRKGQNEKHIEQNYSTPPVLNNHRALISNNACNVSNTNVSVTRTPSHEKTVN

SEQ ID NO: 163413 - protein, 885 aa, Oryza sativa
  Clone ID: PAT_MRT4530_62411C.1.pep
MASLPEAPVPPESARMGQATEGWPRAEEPQPPIGGTPGAAGPPAPPSFFPSLELGTSAAPPALEAAAAGAGQPGSPSPCPPAEPAAEFYPGSAASSPSSSSYETAEDDSPASPPPTPPPLVLCASPDSSYTESSPTRDRFGDEEGSHAAPEPPPPPTPLEGGPDASSAEPAAMASRAREPMGSRTAPEPPTPPLESGQEGFQQQQPHPPPTTHPECDSSEPAELPLPPTSPAEIAYTSPDSVEVDVVAVSPEEAPGSTVAMEVMYGETDTSAVSVSPVLGSAETDAAEIDVIAGMQEEAPGSTVAMEVMYRENDTAAVSVSPVLESREPDVAEGDVVSGVQEAHGSKFSMEVMYRETDAAAVSVSPVLESGEPDKAENDAVEEMQEEAHGSRFAMEATYGEPDASAVSVSPVLESVEPDVTEIDVVSEIQEEAPGSALAMLVTYGETDTSAVSVSPVLESGEPDAAQIDVVAGMQEEAPGSKLAMEVMYGETGTAAVSVPLVLESREEGSLQESMQRPSSPTMNIEQESMQRPFSPTIGTETSSPEMAPAGSENCKVSWLPLPPPTPLGESMPSLPVAAAPKVLLVMPEEAVESVPSSEALDVEKPASITQAEPSSPNTPPPGFENFKSSWLPLPTTPPPVETTDVLPDVVVTKAVEAPIEEVSRPLPALEVTNMESDTVLSILPTTVLPTEGTEGLLQQPLLRPPSPVVQSEPCLQNEMAPPGFENFKSSSEPCSAEEIAPPGSDNFKSSSEPCLPEEMAPPGFENFKSSSEPCSQEEMAPPGFENFKSSWPPLPTLPQTVPDAAAADALAATVEEAAGPPPALELEAMDVDMDAIHPPPLPFDSGVESLQKPLPRAPSPIMQEAPCSPDRAPPGFETSIATII

SEQ ID NO: 163414 - protein, 61 aa, Oryza sativa
  Clone ID: PAT_MRT4530_62412C.1.pep
RLAAFGLLGIDMCLQKDRSRLFLTVNAALAVHLVKFCLIAVGCLELPASGFRSAVFKKSVC

SEQ ID NO: 163415 - protein, 103 aa, Oryza sativa
  Clone ID: PAT_MRT4530_62413C.1.pep
MDQEEHFKIKPSKFWNPIRPPATVLNSNGRQMSIRAPFWVHEYLIESSRSPLSNGSSLVPKFYHSRQQLQKQGIELICNGKINNPRRGASIAKAQHNVLYSCS

SEQ ID NO: 163416 - protein, 74 aa, Oryza sativa
  Clone ID: PAT_MRT4530_62414C.1.pep
VSGARGHRRRRARAHPRRSALAGAPPSLACAFSMLQAEDVRHGVADGHRHGAPLGLQLRIQLRDPEMTLASGRV

SEQ ID NO: 163417 - protein, 97 aa, Oryza sativa
  Clone ID: PAT_MRT4530_62415C.1.pep
GERRAEGQWTAAPGWAGNQRARRAPEGGRDTGEAGVRGHGRKRRGEDRGRQTEARVRSWSGLRRRTGRRTNRDRRGRQPRGRMRPFGQGLYREADAG

SEQ ID NO: 163418 - protein, 48 aa, Oryza sativa
  Clone ID: PAT_MRT4530_62416C.1.pep
GASERFSSNESPRHQQHGPGPFPFPKQIFAVMGPTFGGFPCVEDLKIT

SEQ ID NO: 163419 - protein, 92 aa, Oryza sativa
  Clone ID: PAT_MRT4530_62417C.1.pep
ISSLGPKFRRTVSLGASLCNWFHAFYVQKSLAVIIDHLELDLCVICCLQLTIEIRCRNRILLALFVVILESIILPEIPLLLLKSILCAPCVG

SEQ ID NO: 163420 - protein, 183 aa, Oryza sativa
  Clone ID: PAT_MRT4530_62418C.1.pep
MAIVSVTTATAAAGVLILVVAAGAAAAAGARRHHVVGGDPGWAVASDVLAWSADRLFTVGDTLWFAYSAEDGGVAEVGGEEEFESCDAGSPVRMYTEGLSRVDLGGEGSRYFVSADPDKCGGGLKLRVDVRAPVAGTTPPPGSSRKGDRAAAPAPAPLASSGGRGVATSRTCVMLCCLLFLAI

SEQ ID NO: 163421 - protein, 176 aa, Oryza sativa
  Clone ID: PAT_MRT4530_62419C.1.pep
QSGEGGDGGGGGRGWGAHGGGEEPAVRGVQERHRRAQGVVAHRVLKMKGDYHRYLAEFKTGAERKDAADATLAAYQAAQDIAMKELSPTHPIRLGLALNFSVFYYEILNSPDRACTLAKQAFDEAISELDTLGEESYKDSTLIMQLLRDNLTLWTSDMQDDGGDEMRDATKPEDEH

SEQ ID NO: 163422 - protein, 60 aa, Oryza sativa
  Clone ID: PAT_MRT4530_6241C.1.pep
LFALSSPHMLPSPPILCTIFLWCVAQVHSKFCHVLGFNMVWFECLCLWVCAPHAYPGWSY

SEQ ID NO: 163423 - protein, 467 aa, Oryza sativa
  unsure (1)..(467): unsure at all Xaa locations
  Clone ID: PAT_MRT4530_62421C.1.pep
MEARGKKRKGEVELSHPALEREIVPTTSPLPIAIRRSTLESGEGSSESVASDTGTAKALADDVVHIANALCTEMAAYNNTSNSPKPKAWENLAKKMFTKCRKKVTKGQLEYIWGSAKKRFQLWVWLESQATGQGRDPLTSAIVTDESWWESQNGVPSTFVNDPAAEGSCCYQVFGVTHLLPSQVDCSNNRLTDLPASLASCLELSELNESNNTISVLPDELAGCSKLFRLNLEVRKGVIAFKNDPLKHIDLHHAVFSMRTVVRNHSAVAGAAQGTPQQPVQWQPIDVEQLTAAYTPPPPALSPSKDSXAQSSGSKGKRKASEGDASGSSNKRXAAVSRARELAAAKATGPETCMEMVENDGHRPGVKTGQVFPAHPPDHISLGQFRVKNPGVQTIDETRCLSVGQKFLVVLARTSLAPIKFNYVSNGYMTYDSGWLGVSHELPQAVIDPSNFVRVNRTSARKRGNFE

SEQ ID NO: 163424 - protein, 184 aa, Oryza sativa
  Clone ID: PAT_MRT4530_62422C.1.pep
FWKTPPPFRRGGGGPPPAKLGWALDRGFGSFWALVKKMGAKGAAFQGFGGGGPPLDKRAKKLSVGTTATPGPLGTKGAPLVPLLGIYVWGPGVSPRAKKVGPGSLGPLWGGMTWESPGGGGENAPAFCCLKAPPRVFFPPGPPGVFGCQKKGPFALLAPGALGEGGAKAYPNRPGVFFLGGFPA

SEQ ID NO: 163425 - protein, 366 aa, Oryza sativa
  unsure (1)..(366): unsure at all Xaa locations
  Clone ID: PAT_MRT4530_62423C.1.pep
MAQWHSSSDAAERLTLARLDLDRAIWIVRLSAAENGQCLTLAGFHHLSGLGLEQNQTQRASRAYYDESVQLSSQDYGDRSQIRCDGSQASRSLVDEATTSSAWNPCSICASPKLDVNGGFSLSHHYKYSSSSSSSRCPSEIDHPVHHPPRTCSVHTRAAATGEMPILPRRRYAEPLLLLLLAAVARSTAAAPDVVELILLTGAQEKGAVCLDGSPPGYHLQRGFGSGEHSWLIYLEGGEWCDTIESCSNRKTTELGSSKLMEAQEFEGILSNNQTVNSDFYNWNKVVIRYCDGASFSGNAEAQDQXMGARSTSEDCASGKQFLMSSWKKDLRTIAKAVGDWYFERSKTVKEIDCEYPCNPTCKLTG

SEQ ID NO: 163426 - protein, 134 aa, Oryza sativa
  Clone ID: PAT_MRT4530_62424C.1.pep
MSFGFLLRVQGITVPGGSGILESLSISKIQRLTSLASPDVGYVGKTRGDRRTPPPPAAAASSTAAGGTLLRFFRDGPPTLPTSSAAGVSSPSSLDRRRVSLPPSVVDGSPPAGEAPSRRRLRPSRWDWGETPRA

SEQ ID NO: 163427 - protein, 72 aa, Oryza sativa
  unsure (1)..(72): unsure at all Xaa locations
  Clone ID: PAT_MRT4530_62425C.1.pep
VRWWSKLDRHQCAVPQPPLATFNAVRADVRRCPIDLRQSGMTGLXPVTSDRTGGGAPTFRPVLGEVGAGMLH

SEQ ID NO: 163428 - protein, 172 aa, Oryza sativa
  Clone ID: PAT_MRT4530_62426C.1.pep
VDNGSVTLLCTEEQEQLYNGDCYIIRYSYIEDGKDYHLFFAWSGLNSINEDRVAAASLMSGMIDSVKGHAVVAQVFEGREPEMFFLVFKSLIIFKGGRSMAYKNFVSQRSDANGWYQKNGVALFRVQGLKHDCIRAIQVDLAASSLNSSHCYILQAGGSFFTWLGSLSSPSD

SEQ ID NO: 163429 - protein, 143 aa, Oryza sativa
  unsure (1)..(143): unsure at all Xaa locations
  Clone ID: PAT_MRT4530_62427C.1.pep
KPNYTTARHGSFFFTDPRSRERSFVNGHVAPLVPEQQAAAEDGGAVLDLVPVSSVNGGGVAKNLPQPLRISDLSPAPMHGSQLRVAYQGVPGAYSEKAAGKAYPGCDAXPCDQFXVAFSAVXLLIXDRAXLPVEXSLAANPPK

SEQ ID NO: 163430 - protein, 114 aa, Oryza sativa
  Clone ID: PAT_MRT4530_62428C.1.pep
SESFLYCTDVSSSTQALSLSLSNQSIWRKSAIDSVSISTGSLLRDHGDLLGIIGREHVLLRLLVDVVAVVSKGGGFLLLLPPHDVAPPDLEEVDELHGRHLHGEEPRTPGYAPP

SEQ ID NO: 163431 - protein, 89 aa, Oryza sativa
  Clone ID: PAT_MRT4530_62429C.1.pep
VALPYAEPLVHFALVCGTKSGPALRCYSPGNIDKELVEAARDFLRNVGIVVDPEAKVASVSKILRCYRILLQEYKVRCGFVGGMKTIEG

SEQ ID NO: 163432 - protein, 301 aa, Oryza sativa
  unsure (1)..(301): unsure at all Xaa locations
  Clone ID: PAT_MRT4530_6242C.1.pep
TAGRRRAAAAAAAAARAPPCPSTAAPPSPSPSASAPPAAAPTPAPPPAPCPSRAAPRAASSPAPXPDTPPPPLPPSSSSPPATKPNPPSSSMNSPSSDHSSSCSGFLISTSPLAAGEEAARPALEVFDEYPEARRVEIDDDDDDVVRSSRRAAAAMLRLQMAASSLISLRSASICARTSAILLSSADVLARRNSRLSPNPAAASVVVAVAADDDAPLPLPLPAATSRPEASSADDDAASLFSAASSSFRPPSRRPPLPPRKLTNRKRAHVKPGIRSRGVPGEGGEATCAAAAATTSSSSSS

SEQ ID NO: 163433 - protein, 41 aa, Oryza sativa
  Clone ID: PAT_MRT4530_62430C.1.pep
GQWPPGRQHAYLGIRSDNYFTATPPPVSDSWGVQSSCSTQS

SEQ ID NO: 163434 - protein, 108 aa, Oryza sativa
  Clone ID: PAT_MRT4530_62431C.1.pep
WVPAPPGALISWPVPPPGDPTPPGYDLRAGGTSGPSILPPSCARLSEKKFSFSPPPVVNLQCSHLLLPRSPSHASVVSPPARRSVICDGGRCPLPPPRFPVKKNPAPP

SEQ ID NO: 163435 - protein, 80 aa, Oryza sativa
  Clone ID: PAT_MRT4530_62432C.1.pep
MKREGYIGGEQTAGVEKEEQRELTGYKPADESNRRCRHRSPTPVAGHSSARALAVRIDLRLAGRRLWTGWEQKEHNDEQS

SEQ ID NO: 163436 - protein, 96 aa, Oryza sativa
  Clone ID: PAT_MRT4530_62433C.1.pep
MSPGLVTPMSKIVDEASRTWWKNMDQGLTWDVGFVVARLGSLGLRMMAFYARSATGGTIESNKEDHESASPLSTRGGMTMAHGEGAAVVVRGCEEW

SEQ ID NO: 163437 - protein, 54 aa, Oryza sativa
  unsure (1)..(54): unsure at all Xaa locations
  Clone ID: PAT_MRT4530_62434C.1.pep
FRMVLNIPSLRXNXXNQYIXFSVGAFXEXCISFTHXYXLXKLVFVWDTLXPPFN

SEQ ID NO: 163438 - protein, 540 aa, Oryza sativa
  Clone ID: PAT_MRT4530_62435C.1.pep
MENMQYAEELVKEFLVFRGFTSTLQSYESELSTEIGRNFQVDKILDLVFSVYIPKYQLDRLQGLFTFFKQCFTSPADAELFSALIKLELSVLRYYVVNALKSGRQDKVVEFFGANGNYLLQKREDWQAWFALLKISTEKNTIKCLKNDIKQLNNKLSELQALLEMKETEISQLRRNSTGVDLGNMNVPNTSAADSSLEGQDMPGVFEESSASRSAAQGFDSQSSSSVKSSTRDEKLHKSFQISNAENEQILVTEDDFPEVKVDFQETFLGHNSSISCCRFSASGSNVASSSVDGTVRIWTYDSSTPSSKNATIYCGSEVSALSWECRSDRLLLIGTANGGIKAWNADAKRVVCDLSTSKDFPSVLDLKCSPVEPVFVSAAASRRPGSTIFDRTGFASLTVWHMKTWKPLITGWPAHDSPVSSVLFGPAETSIFSLGSDGKIFEWSLHNQGQILWSRDCSRFCSPESFSKRMHEISLDSDGKRLLVTSGLVRAPIYQVQGHESGLRTLAHSASITSVDWHPTLPMYITGSADNSVRVTSIV

SEQ ID NO: 163439 - protein, 377 aa, Oryza sativa
  Clone ID: PAT_MRT4530_62436C.1.pep
MWPCLSPRAAVLIALLLLPAAMAAAAAEAGGHGYDMKSIYSGPKVVPVLLGPRGVLPGEPCLRPPGGEGPHPDVSNGVDASCEALKFWASPSPLHSREVCAYPRNAFEERHVPARTVAECAARKKAAAAAESVCGRPLGVQFDRRTGEMYIADAYLGLMRVGRRGGMAEVVAAEAGGVALNFANGVDVDQATGDVYFTDSSTTYKRSDYLLVVLSGDATGRLLRYEPRTGNVTVLESGLAFPNGVAVSADGTHLVVAETASCRLLRHWLRGSNAGATEVLADLPGYPDNVRHAAADGGRGASYWVALNRDKAWTVNGTTPASVAAVRVVVDDGGSKVDVALRGFGGATVSEVVERNGSLWFGSVDTPYVGLLKLTSL

SEQ ID NO: 163440 - protein, 66 aa, Oryza sativa
  unsure (1)..(66): unsure at all Xaa locations
  Clone ID: PAT_MRT4530_62437C.1.pep
LLPLPVRFGTRLRFDPRFLFGGWWESMAATDVEYRCFVGGLAWVTDNRSFXGAFFTYGEILESTII

SEQ ID NO: 163441 - protein, 52 aa, Oryza sativa
  Clone ID: PAT_MRT4530_62438C.1.pep
LMHASPRYLCTPPCIFLKSIPKSQKWWGFFPFFKKNFKKRLENQNLVCLFNF

SEQ ID NO: 163442 - protein, 135 aa, Oryza sativa
  unsure (1)..(135): unsure at all Xaa locations
  Clone ID: PAT_MRT4530_62439C.1.pep
PLRXKLLHXXFXXNXAAPADXSXXAKKAQDKIXXXGXLTNLFTLRVQKPPASAFPSSASSWXXASSSEEETSSXHSXXXHXSXXXKKSGNLXPXKDIVQVXAXXXPXYXFSMIPLDKKRNSXGXXGPAIXXGSXX

SEQ ID NO: 163443 - protein, 78 aa, Oryza sativa
  Clone ID: PAT_MRT4530_6243C.1.pep
DTNTFQGADQHVSAKATGVASDGPMPGIWSVISTWQLINQQPGVAPHRSSLPNIPSLWSVIPSRTHGFQWRLSISSQY

SEQ ID NO: 163444 - protein, 70 aa, Oryza sativa
  Clone ID: PAT_MRT4530_62440C.1.pep
MATKGQRSMGLLTVREATMGTNKNAMGSFVLHNDMWELRSGTNPGAMLWSMKRKTDEEKKKRDLGWCWRG

SEQ ID NO: 163445 - protein, 70 aa, Oryza sativa
  Clone ID: PAT_MRT4530_62441C.1.pep
PTLLLEGSSAPAEASRQSLRGEEAARQYVSDQREEPAQGLRHGGGRPQGRRRRLCRSGVRHGTGGREGAR

SEQ ID NO: 163446 - protein, 574 aa, Oryza sativa
  Clone ID: PAT_MRT4530_62442C.1.pep
MLRRPLAGAPPALAVGTSLSDEGQVSSGSLVAAVEITMMTPGSSSTSVPGDEADAGNWDAGVETAARLEAMVHAEDELSEEQIQANNQTQEDELLALQAIYGDDLVIFDNKDGLRFFQISLHYQLAGDIRVYLNVCPNGRTETGAENDDDDDSDRLLYACSLQHLPPVVLACLLPRLYPSHRAPYFVVAAKWLDEPEVSSFCSVLDEIWAEQPAGQEVVYKWVDWLSTSSWFCIASDDQIVFGPDADSAGGDDRAIGRSCSLDSMIPLIQRYSKERSHEIFARRIHECGVCLSENTGRNFIQLPCSHSFCVKCMETQCRIHVKEGSVARLTCPDTSCRRPLPPALLRGLLGDGEYARCSAACVAAGDDAQCSRCFFTFCAVCRERRHVGDTCVSPNQMLDIMLERQKEKRPLAAPSPDSQAVSSKRKMEELLSLREVMRTSRQCPSCKMAVSKTAGCNKMVCSNCGRPFCYRCSRAITGYEHFAGECKLFESVGKGWFPGQAMWMNLEYDYDEIAEIGTPSWIRAIRYPCPTCGAKRTKSGNNDLLTCRGCRTHYCALCSKKVWSIAEHYGPAE

SEQ ID NO: 163447 - protein, 69 aa, Oryza sativa
  Clone ID: PAT_MRT4530_62443C.1.pep
MADWGPVVVATVLFVLLTPGLLCTVPGRGRVAEFGSFHTSGLAIIVHAVLYFALLTIFLIAIGVHIYAG

SEQ ID NO: 163448 - protein, 35 aa, Oryza sativa
  Clone ID: PAT_MRT4530_62444C.1.pep
KHWLEIYTKKGLSQSIRKDKKYLIITDHHKIKCTS

SEQ ID NO: 163449 - protein, 232 aa, Oryza sativa
  Clone ID: PAT_MRT4530_62445C.1.pep
WYLRSNLEKFGGTDPQTTLMTSYFLASANIFEATRAAERLGWARVALLADAVSSHFRRIGGPKNSTSNLEELISLVPFDDAYSGSLREAWKQWLMAWTAKESSQESIEGDTAILLVRAIEIFGGRHVLTGQRPDLWEYSQLEQLTSSICCKLSRRVLAQENGESTEKVEEIDQQVDLEMQELTRRVLQGCSAINRLTRETFLHVVKSFCYVAYCSPETIDSHIDKVIFQDVI

SEQ ID NO: 163450 - protein, 39 aa, Oryza sativa
  Clone ID: PAT_MRT4530_62446C.1.pep
GIPQRSWRGGGVFPSLCDGGPPAIGLGAPDQGAGQGPLE

SEQ ID NO: 163451 - protein, 106 aa, Oryza sativa
  Clone ID: PAT_MRT4530_62447C.1.pep
QPPFWQKGLFYWEKPKFGPSSGGGGPSFPFGDLKFFGPKGPRFPPPRFFCFSFGGDLGQTQSQGFLGFNLPLKIGFPPGGLRGPWGLSPPGGGFVLVFPKKGVGGF

SEQ ID NO: 163452 - protein, 72 aa, Oryza sativa
  Clone ID: PAT_MRT4530_62448C.1.pep
SLGSAFARRIYQSWDQCATVRAIPYAVGGCVATPQFHEVPGTIYLYPVNIASISVTFSIWRVLKRQTISGSP

SEQ ID NO: 163453 - protein, 355 aa, Oryza sativa
  Clone ID: PAT_MRT4530_62449C.1.pep
MESWVRAVVEAIHSSRAQAVIYLAGGASQALGWLLSVPGASGTVLEVVVPYSMASMAQLLGKMPLQFTSKQAAEDMALAAFNRALKLSGQGLRSREEEDKVSSYFLLKAIADGCKVPATIQSDVQEPELPKESVEQFDEDQELQQVIDGQVCMKVYHFSDSMDKNFNRKIILPGSFNPLHDGHLRLLEVASSMCDDGLPCFEISAINADKPPLSIAEIKRRVEQFRKVGRKLQLIDGFVLLSDAGKNVIISNQPYFYKKAELFPGSAFVIGADTAARLVNPKYYGGDYNRMLEILLECKNTGTTFLVGGRNIEGVFKVLEDLDIPVELREMFISIPEEKFRMDISSTDIRKKQGP

SEQ ID NO: 163454 - protein, 92 aa, Oryza sativa
  Clone ID: PAT_MRT4530_6244C.1.pep
MDRAAVPVKRVWLGLAARLGLRRTSGLGKLKKEVRTCEYHDVHIMWEMLRKTDAPVPMAEKEAAAAAAVAAAAGARRRKAAWRRFLYYCCAF

SEQ ID NO: 163455 - protein, 208 aa, Oryza sativa
  unsure (1)..(208): unsure at all Xaa locations
  Clone ID: PAT_MRT4530_62450C.1.pep
MESWVRAVVEAIHSSRAQAVIYLAGGASQALGWLLSVPGASGTVLEVVVPYSMASMAQLLGKMPLQFTSKQAAEDMALAAFNRALKLSGPGLQVXGVGFTGSLASSRPKHGEHRFYVSTRTQNCLRTSHVTLSKGLRSREEEDKVSSYFLLKAIADGCKVPATIQSDVQEPELPKESVEQFDEDQELQQVIDGQVCMKVYHFSDSMDK

SEQ ID NO: 163456 - protein, 38 aa, Oryza sativa
  Clone ID: PAT_MRT4530_62451C.1.pep
VDIYVTECPPTAEALLYGVLQLQKKINRRKDFLHWWTK

SEQ ID NO: 163457 - protein, 147 aa, Oryza sativa
  Clone ID: PAT_MRT4530_62452C.1.pep
FISSFTNVPECTVNTNLNAVTASVAKQFEDLVTKVLRALTDAAVSRPERYAVGKQRFEETGQSVYGLVQCMQGMPSEQCMNCLDGIISGRQSKISTTQMGAAILGVWCTLRYETYTQFFTDSKMLLLDVLKKSTSPRTVPFIKNFAN

SEQ ID NO: 163458 - protein, 106 aa, Oryza sativa
  unsure (1)..(106): unsure at all Xaa locations
  Clone ID: PAT_MRT4530_62453C.1.pep
SLXLISWXCLYLCCAIVMXXSIARXYXCYCFTRCVSLLCVAALFCXVLYLLLSSVRWWDVYSYCSLTXXASLLLRARTTGSLYCVLSIVCILFVLVIYYLCLCMLX

SEQ ID NO: 163459 - protein, 71 aa, Oryza sativa
  Clone ID: PAT_MRT4530_62454C.1.pep
MIFPRDKINTIPLEYSKVKCYNGISMRLRMNSVTIIYQKYFCAIVGNYISCNAVKKYQQAILAPLAGKIHA

SEQ ID NO: 163460 - protein, 137 aa, Oryza sativa
  unsure (1)..(137): unsure at all Xaa locations
  Clone ID: PAT_MRT4530_62455C.1.pep
YVAPEYGGGGPLSEQXDNCSFGDLMLVLSSGLRPLREAASPMSEFEKASLISWASHIACEGRLLDXYDLALRDVTRVQALXCTTDAILCIQRLSSSSLSSKQVLXMLYGSGGSPHIPVEFSXSPLGGNRIRSRKKGR

SEQ ID NO: 163461 - protein, 114 aa, Oryza sativa
  unsure (1)..(114): unsure at all Xaa locations
  Clone ID: PAT_MRT4530_62456C.1.pep
PGRPTRPAEPAPXARPXPRRHDTXPQKHHHPPPLHRRRRRCYLYSAVVAGDMKEPRRVDNGEGGDGEEQGEVGNGDGNGMCGGIKKGECRVGGGGVEDETRRRGEGRANGEETV

SEQ ID NO: 163462 - protein, 100 aa, Oryza sativa
  Clone ID: PAT_MRT4530_62457C.1.pep
KKETKGVWTKKNTKTSMKRETKRGRGTLRERALPKGQNPDGHGGEGPFYLPPAGRFPKLVTRKARMPKAIDMGWPRTQTRNRDVEGPKLWANPKVGPGGE

SEQ ID NO: 163463 - protein, 154 aa, Oryza sativa
  Clone ID: PAT_MRT4530_62458C.1.pep
CGAPRRRRSQAAARRRSRAAARWCSQAARRCSRVAARQHSQAARRCSRAAARRSPGGSGAWPSGSGTGFPGGGPLQLPRGFQHSATSLAPTRVDLPVAATPGRIRRPLPLPHGSRRHYSTLPHARIRRLLRATRISTMTTTTARGGESGGTSPR

SEQ ID NO: 163464 - protein, 129 aa, Oryza sativa
  Clone ID: PAT_MRT4530_62459C.1.pep
MRHPFLSQLATSTATTSWQGNLPPLPSQLGWHRAQPPRTGSATACSLVALNLGLHQRSCYCRPPLFGKPPELPLLTLPRSGPQSRQVEHRPCDRLLPATPVATSSLQLLSSAVLRPCRAWISLARAGRV

SEQ ID NO: 163465 - protein, 101 aa, Oryza sativa
  Clone ID: PAT_MRT4530_6245C.1.pep
VTMVDHSGYCMSDYLMGIALQSLMKLSGETNAISSSKQAQIPSYRDKYHNAGDQQIICQMFHLSLPLPGCSSCLPGNFDQLLGLARRIAVEIFLCWSAARD

SEQ ID NO: 163466 - protein, 83 aa, Oryza sativa
  Clone ID: PAT_MRT4530_62460C.1.pep
AESLFYVAVGSSTIMQDLLLCKTLVAVAFRFGPIGFLSSADAVGVDLYLVSAQRRADPTAVVRRIQNAHLEKATEKQSAGSIV

SEQ ID NO: 163467 - protein, 94 aa, Oryza sativa
  Clone ID: PAT_MRT4530_62461C.1.pep
PLHFCLHKPAKLKTSPFRKTRTGSMFSFLSLPKPESPSKRGRSRFPAPPLTSTTTTTFSHLLPIFTKPRGQKKPGESSIMSSSPPRSPNRCSPS

SEQ ID NO: 163468 - protein, 337 aa, Oryza sativa
  Clone ID: PAT_MRT4530_62462C.1.pep
MEVVVARQPKAKKQINLFYCSECEELALKVAASSDTIHLQSINWRSFDDGFPNLFINNAHDIRGQHVAFLASFSSPSVIFEQISVIFALPKLFIASFTLVLPFFPTGSFERVEEEGDVATAFTLARILSMIPKSRGGPTSVVIYDIHALQERFYFGDDVLPCFETGIPLLLQRLRQLPDADNITIAFPDDGAWKRFHKLLLNFPMTPSFYFGLFDYKVVCAKVREGDKRIVRIKEGNPEGRHVVIVDDLVQSGGTLRECQKVLAAHGAAKVSAYVTHAVFPKQSYERFTHTNSAGSADKFAYFWITDSCPQTVKAINQQPPFEVLSLAGSIADALQI

SEQ ID NO: 163469 - protein, 46 aa, Oryza sativa
  unsure (1)..(46): unsure at all Xaa locations
  Clone ID: PAT_MRT4530_62463C.1.pep
FIILVTYEIYLXLPISXYMIYLRFTRGLLITSMNLXLEFQDGLLFD

SEQ ID NO: 163470 - protein, 96 aa, Oryza sativa
  Clone ID: PAT_MRT4530_62464C.1.pep
MVQVKCSDQQATGGRFAAPHRRREKSIEPYHLEEGEVVTRFHVGEHCGRIIPVTLPNQPRTRHTRPAERRARGDRAPRPAHRTQGPRGFKEKKKKK

SEQ ID NO: 163471 - protein, 107 aa, Oryza sativa
  unsure (1)..(107): unsure at all Xaa locations
  Clone ID: PAT_MRT4530_62465C.1.pep
KAPARRXSPXRXXSXWXSSAAPPRRPDPDPAFPRNLRHARHPHPRRRRRRRRRRLRAAACRDHXAHLHLRLPPIRRRRRWWWWXEEERERRREREREREREVSSCRI

SEQ ID NO: 163472 - protein, 83 aa, Oryza sativa
  Clone ID: PAT_MRT4530_62466C.1.pep
MPQTLYKNFINKAKRISSPHSSLPADLSALQAPLAAVGKNEHRSSQLVRVSPLIFDLANQFSGFLFPSMPLVHSQTCRGSSIK

SEQ ID NO: 163473 - protein, 88 aa, Oryza sativa
  Clone ID: PAT_MRT4530_62467C.1.pep
MAGMVVSNSLAVGEDEEVAKHLLDQAKGEKTHGTPAKTMLHQSSAVGKPWPRTPEPMKDMERLAAVATVPNGVETSSKNGRDSNAYLS

SEQ ID NO: 163474 - protein, 475 aa, Oryza sativa
  Clone ID: PAT_MRT4530_62468C.1.pep
MASSPPPSTASPTSSSPYRKLLHSLIYWAVQRCRMSESPCRLTVSVKRSPEPAGSSPLRISVSDTGVGSKLEEFLELDALARETPVEKWDGTLLITTTGIDDKAIYRYQFNLQEDTSSSTRFTKLVTTGTEVCLCLPTEADVDDLILWLVGFVRKIFVLRASNLACELFVAQTDSAGSGDVCLSQDSDDVHISITTSSIDRLVSGLKDYALSHANTSDRCEACYMNRDRLKIGTGTAKYVDKRKAKGQLVEVVIMLAPTSSDLSCWMTNCSSTQVLHFVEFIPCPISQSSLSALMSIDWQSYATAVDEWKSSQPERHLLRKALKSALFGLKADHAEDFLSCHGQKNNFHIESFHTKRTVLRFEKRAMSIQKLIQPKVREYVPDLAESIAGLILSSNDQEFQDECIALLGLGSDQDLTEGAVRSCIGEKMNRIVEMNDTKENVEHNAPYLFECERFDEDYSLLDEDDPDEDMIFDF

SEQ ID NO: 163475 - protein, 99 aa, Oryza sativa
  unsure (1)..(99): unsure at all Xaa locations
  Clone ID: PAT_MRT4530_62469C.1.pep
IPYVYGPVRVSDEXXTMAGTGAAXGRYXPVVIFKDSGGGCSLHQDGVESAWKXSRQNKRMCILPTXVLTPVSGPMMIWSRLWGKKWTLGRGTLLFHLKV

SEQ ID NO: 163476 - protein, 47 aa, Oryza sativa
  Clone ID: PAT_MRT4530_6246C.1.pep
MWRKVGEMADTTGRIPLWLIGTVTGIAVIGLIGVFFYGSYSGLGSSL

SEQ ID NO: 163477 - protein, 48 aa, Oryza sativa
  Clone ID: PAT_MRT4530_62470C.1.pep
SSGNGMCGQVAVPANHHKRLRQAALVDGRASPSRVEESSGSGACAQHK

SEQ ID NO: 163478 - protein, 73 aa, Oryza sativa
  unsure (1)..(73): unsure at all Xaa locations
  Clone ID: PAT_MRT4530_62471C.1.pep
DKGLLLRAQGSCLRRMHPLPGASVMRGXNYRHSINDDVLWWSQKLDSDPPSVMTAISLLQPGSDEKQAVIVIM

SEQ ID NO: 163479 - protein, 149 aa, Oryza sativa
  Clone ID: PAT_MRT4530_62472C.1.pep
MAPAHGRRLASKGGSGNHALPSARSGGRAGAMGAKGMGTWLFLFFSDGADGMETCGWSRGGDKGLLLRAQGSCLRRMHPLPGASVMRGQMCQKPNVISVGCLQENYRHSINDDVLWWSQKLDSDPPSVMTAISLLQPGSDEKQAVIVIM

SEQ ID NO: 163480 - protein, 57 aa, Oryza sativa
  unsure (1)..(57): unsure at all Xaa locations
  Clone ID: PAT_MRT4530_62473C.1.pep
HEGQAPPPRSPPSPAPTAAPRARGAGSGGPPCAAXPPPPPPPPPPPPPPPRNPRRQG

SEQ ID NO: 163481 - protein, 119 aa, Oryza sativa
  Clone ID: PAT_MRT4530_62474C.1.pep
METAAGDPFVWCAFYGGAAKLGQLQQVLSGHHIHLANPSRNARCCLYPYSLAVAVEEDGRSLHFVRLKTFTYGFGCLNLHLVEALFGSVHPRPHLLQLAVVSSCSPSLLSPIWASISWG

SEQ ID NO: 163482 - protein, 118 aa, Oryza sativa
  Clone ID: PAT_MRT4530_62475C.1.pep
MSLTKTSSITATIPRGLAGDQIACTAGSGSRSPSWMLKRAWGPEEAAPIIFFSSPSVLSRGPTALAEARVPQPSRVKTLCASRRLLVKGLENESGKCAMPSARTDPSKSTELPEQPML

SEQ ID NO: 163483 - protein, 52 aa, Oryza sativa
  Clone ID: PAT_MRT4530_62476C.1.pep
IVESNIGKLLNFPAEFKVDPFCFNDYSQPLCYPTKSSCVLQWTYTLGIRLEL

SEQ ID NO: 163484 - protein, 272 aa, Oryza sativa
  Clone ID: PAT_MRT4530_62477C.1.pep
MEAVASPPLLASFFLSPPHPTSAVAAACCSRRNTSCAHPPSPGGLEAAVAEVKAAPDPVPALISLQWFPCSIRRGGPPAIDYIDRRCFLQSISNVSSISMDRVIEASRGRQATNANAMLSRVDLLCEIFRSENLCVLVLICLHCFLNCLTVRRGWSEYVQQPVLPANLANVLVCFNVALAPGALMTTFLIHQGEMTRMVTIADKARLVNGVCGVGRREAVGDWRVQRLVGGGAHRQVPATAVVRSEPERDGRRRLPHILPCRAPRRLVDDRQ

SEQ ID NO: 163485 - protein, 78 aa, Oryza sativa
  Clone ID: PAT_MRT4530_62478C.1.pep
ICRGSGAVVVVVMDSLGMAASSEPKACEALGVRETRAGLASARFPREPLVKIRANPFPLPLLSLFLSLLLFFKAWTSA

SEQ ID NO: 163486 - protein, 484 aa, Oryza sativa
  Clone ID: PAT_MRT4530_62479C.1.pep
METGRHRSQSLGSAGLAFHALLCSSLLLNAVFFAHHLLRSSPTATPERLGDGLSWALQAAREAEAVAAADCSGHGNVFLDGVTGEDGRPGCECNRCFSGPDCSVRTPNCTADADSGNPLFLEPYWRRHAAASAVVFSGWHRLSYITTGGRFHSVELDRHIRLLHRAVGNAVVDDKYLVFGAGSMQLINALVYALSPDGNADSPPASVVATVPYYPAYKSQTDMFDGREYRWDGTTATWSNNGSRNSTKGFIEFVTSPNNPDTALRKPVLAGSSAIVDHAYYWPHLTHIPAPADEDVMLFTASKLSGHAGSRFGWALIRDEKVAKRALSYVEQSIMGASRDTQLRMLKILKVILANLHGKEDIFAFGYDVMRSRWRRLNAVVSRSTRISLQKIPPQYCTYFNRIKEPSPAYAWVKCEWEEDVDCYETLLAAGIISRSGTLSEAEARYTRMSLLKAQDDFDVLLERITEFVDAEEHGRAPGGSSSM

SEQ ID NO: 163487 - protein, 66 aa, Oryza sativa
  unsure (1)..(66): unsure at all Xaa locations
  Clone ID: PAT_MRT4530_6247C.1.pep
HVQWIQFLFNLSDSVVTSNYGDLKSPVWTGCPALKIVALIRTXSQKKFASFARAKYHRQHRVGFSA

SEQ ID NO: 163488 - protein, 156 aa, Oryza sativa
  Clone ID: PAT_MRT4530_62480C.1.pep
MSIAPSSSLRALVAPILPSVSSSPSARPGLRGVAAPVQHARARRRRGAAVVARAAALPSDAEWLERLPEKKKPLYTHSLPCIEAWLRSIGFSQTREDRAVWVAEMPLWHARLSLDVTDLHIRYLKSGPGNLDKDVERRFSYALSREDIENAILGGP

SEQ ID NO: 163489 - protein, 179 aa, Oryza sativa
  unsure (1)..(179): unsure at all Xaa locations
  Clone ID: PAT_MRT4530_62481C.1.pep
PRVRRFLALLPWLILTAGFLKRSRAYGPAGAGGVAAAVSGIIIVGRRYDEPPMAFTVARLVETFIGLACIIVADLVFQPAARPSTKATAQLDRCLAALKGCFSRGRQTTTKVKVKAVQEQVALLERCVAEAAGEPHFPWSPPFPASCYHKVAXSLGRMAQLLYLYTQAHPTPIPAADED

SEQ ID NO: 163490 - protein, 38 aa, Oryza sativa
  Clone ID: PAT_MRT4530_62482C.1.pep
ARGRVCRRRVLQWTMAELMRNPGGHAEVHKMSVRRALA

SEQ ID NO: 163491 - protein, 83 aa, Oryza sativa
  Clone ID: PAT_MRT4530_62483C.1.pep
MSPILEDQTRLSLKIPSKRASTPLKTRHYDRGNKDHCVFHDSGKELRLSRDNPYDCSNHHQLHRQRRERYTRASRRATKKKRW

SEQ ID NO: 163492 - protein, 66 aa, Oryza sativa
  Clone ID: PAT_MRT4530_62484C.1.pep
TNRSTTISKWQLQEDANSSVHIINVELTMSRKPRAEKRYQGLHIYQLHIHIICETSEQNLDDVPTV

SEQ ID NO: 163493 - protein, 57 aa, Oryza sativa
  Clone ID: PAT_MRT4530_62485C.1.pep
KFHKKLSYYHNYNNLLIYIIIVIFSKPTGNRYLISSFYLYHSGFIINFCYTSSSVRF

SEQ ID NO: 163494 - protein, 66 aa, Oryza sativa
  Clone ID: PAT_MRT4530_62486C.1.pep
IFMISEKALWFCFQMLQIFSAVKLSVDITLHGALRIDMRLYTKWFVVSVEPRAFWILNMVKLNYIG

SEQ ID NO: 163495 - protein, 183 aa, Oryza sativa
  Clone ID: PAT_MRT4530_62487C.1.pep
MGCERLGDLAVDPAAGGEWRAAGRPRIGSGSGGSSCADPVSVTTEGNGSSGFDGGGARWSRELGRRCGSGKEDGCLGQRQRRRLVQICRQRWQARASEGTAVEMASHPRVGGEGLAVVGARHCCPPPPHPYESPSSLSSPSSDEEAAAAGWICVASAQPFAVPPPSLRGEGTSSSDVIAADNN

SEQ ID NO: 163496 - protein, 376 aa, Oryza sativa
  Clone ID: PAT_MRT4530_62488C.1.pep
MWRPLRPASTAARDLDQDAHRPEWDLDQSGIGSMRHRVVPPIGVDGWKAQGLFIGEQVTDEEVCTDGTQSVYFTDLLVNDVDESQFAAPTSDPISNGAPTAAKISQGRTKNFTTQEDILLVSAWLNVGMDPIQGVDQSQGTYWARIHEYFHANKEFESTRSESSLLNRWSAIQHDVNIFCGCMSRIEARNQSGSRVDDKIANACELFKEEDKKHRKFNLMHCWNILKDKPKWMDNRKKVGCAKKPSNKKQKTVANSSPTSVEPADLDVYCSDAQPSVRPDGKKAAKQKLRQGRTIEAVDYLMEKKKEADVVRELKKEEMCKKAFALQEERCKRAFALQEERNKLEREKFEFQKKEAEKAEKVEEERILGLDLSTMN

SEQ ID NO: 163497 - protein, 55 aa, Oryza sativa
  Clone ID: PAT_MRT4530_62489C.1.pep
MAAGYLLPFVDHRLPLRGYRSSKSPRKPLLPPPSSPSLAPRSSPARFCCPGMEVE

SEQ ID NO: 163498 - protein, 120 aa, Oryza sativa
  Clone ID: PAT_MRT4530_6248C.1.pep
NLFWGPQKKNFSLQARGSKIWSFKTAPPFFFFFFFFFFFFFFFFFFFFFFFFFFFFFFFFSFFFFFFFFLNNKLTRCFVPYYSENKKYREESKNSCLFSANYKTRRTAAHASAHASAHAS

SEQ ID NO: 163499 - protein, 58 aa, Oryza sativa
  Clone ID: PAT_MRT4530_62490C.1.pep
TKLTTKKHFLKLPKKIDLKWRKTNQEIGDHGKTKGSPYGESQKNPPFFGKKSPNPQIK

SEQ ID NO: 163500 - protein, 130 aa, Oryza sativa
  unsure (1)..(130): unsure at all Xaa locations
  Clone ID: PAT_MRT4530_62491C.1.pep
PHLTPSXPSPFFFXLFSCLLPPKLTSNFPYKYPPSPIEKPIIFPTLIPIQPLPFSPLLITPKIPLPHHLSQYIPHLTTNRSPPFFPSLNPHVLSCFPPNFPLHCPLPNPQLFXFGPXPSKHFIPVFPHKL

SEQ ID NO: 163501 - protein, 278 aa, Oryza sativa
  Clone ID: PAT_MRT4530_62492C.1.pep
MPGGEAKLSTPSARRVECWRHFEKMKVMVDDQLVTRATCKHYGKTLSASSSSGTGHLNRQYLAHLKDKAMVGARWNTTYLMLRQPKGYEEIISVFINSLHFRNNDIDKDGDGDAMSLDYFEAYQHAKDELFKVFRLYQTKLSVARQVPEETPQKKQSKSSAMNMWKKIRGKKQASSSGSRSNWNPDAELNHYLNTNHTKHDRTLDGENFDLLERWKEKERTLHVLAHFAQGVLLVPVSSISSEHAFSEVGRIIEEQRSCLAPDTVEAIFCLKDWIKAY

SEQ ID NO: 163502 - protein, 468 aa, Oryza sativa
  unsure (1)..(468): unsure at all Xaa locations
  Clone ID: PAT_MRT4530_62493C.1.pep
VNPLDDKPKVKFGFEEEDELQHAVAPLVIFLLVLISIYESDIEKGVNRRPLYESHPLSSFSWTTTDNMDMGDWSKKXKEALSNFELLKEGKSKDDTPSKDELHDIFESALKSSDLKGLHAECLTDMWIGRDRFAFIDLSAGPFAWGPAVGGDGVRTELSLPNVAKTIGAVAEVTEEEAEAKLQDTIXRFSSFGEQNYHAVDILLAEIDVYELFAFKHCVGRRVQLALCKELDERRHDLKSELEGYNTGDSDDINKKKALDALNRMEKWNLFKDVPEEHHSYTVARDSFLAHLGSVLWGSMRHVIAPSVSHRAHHYYDKLLFQLYFVTQEKVRNIKQLPVNVKSVTEGLSSVLLQFQKPMFSQHMLSLSEDPALIMAFAMARRAAAVPLLLVNGFSKSTVHTYLDSAILQHQLQRLSEHNLLKGAIRVQCTRERKVDVQLDLTTIPAFLAVFLLLWFLLRPRRPKPKIN

SEQ ID NO: 163503 - protein, 643 aa, Oryza sativa
  Clone ID: PAT_MRT4530_62494C.1.pep
HASALSSFSWTTSDNMDMGDWSKKCKEALSNFELLKEGKSKDDIIYDKAVQVLHGKKDELHDIFESALKSSDLKGLHAECLTDMWIGRDRFAFIDLSAGPFAWGPAVGGGRVRTELSLPNVAKTVGAVAEVIEEEAEAKLQDTIRERFSSFGENYHAVDILLAEIDVYELFAFKHCVGRRVQLALGKELDERMHDLKSELEGYNTGDSDDINKKKALDALNRMEKWNLFKDVPEEHHSYTVARDSFLAHLGSVLWGSMSHVIAPSVSHRAHHYYDKLSFQLYFVTQEKVRNMKQFPVNVKSVTEGLSSVLLQFQKPMFSQRMLSLSEDPALMMAFSMARRAAAVPLLLVNGTYKSTVHTYLDSAILQHQLQRLSEHNSLKGGHSNHRSTLEIPIFWFIHSEPLLLDKHYQAKSLSNMVVVVQSEVDSWESHLQCNGRSILWDLRRPVKAAIAATAEYVSGLLPSHLAYSPAHETATEDWTWSVGCNPLSITSKGWQLSEFQRDVIARNYIITAVEESIQIINSAIQQLITERTSERGFKLFKAQERVLVEKYNSVVSLWRRVSAMSKGLRYGDAVKLTSMLEEASHGFANAVNSTISSLHPVQCTRERKVDVQLDLTTIPAFLAVFLLLWFLLRPRRPKPKIN

SEQ ID NO: 163504 - protein, 65 aa, Oryza sativa
  Clone ID: PAT_MRT4530_62495C.1.pep
VGCPSDYVTLLVLNWEKCHFIVREGIVLGHRVSERGIEVDRAKIDVIDQFPPPVNIKGICSFLGH

SEQ ID NO: 163505 - protein, 80 aa, Oryza sativa
  Clone ID: PAT_MRT4530_62496C.1.pep
PKGGFIGFFFPGFPLEGLPWPWKPGSPRKAPKKLFSNPIVWIPPFSTFFPKYPGLGIQPPFSFFSHLKIFYPWGLAFFLG

SEQ ID NO: 163506 - protein, 184 aa, Oryza sativa
  unsure (1)..(184): unsure at all Xaa locations
  Clone ID: PAT_MRT4530_62497C.1.pep
WPARNTSYVKIVIFACWWCPHTTLDPPHSTATAAPAATAGSWRGEGGAAPGRLLLVIVGGCMRWGGRXCSSPPPPPPRQRWRRSRLPPPPPRCRRRLPRRLHQQPRQAPPHRRAAAAPLLAASSSSSSSSAAASALPPAGSALPSGSTAADAPPLHWIWGGKEWEGRGGEQIPRGVRPAARRIR

SEQ ID NO: 163507 - protein, 144 aa, Oryza sativa
  Clone ID: PAT_MRT4530_62498C.1.pep
MNLLPSSKETAEDPSSPRNPSNLSSPPSPPQRPMLHRSRRSRARGAPSMAITGTTPPSLTCPPPFSPRSPSTARWVASNPSSHVPAVAADVVAADAVSLPPKPSSRSPFYGHNWRDPIASNPSSTPRKKMHAHSARCGSRINDL

SEQ ID NO: 163508 - protein, 61 aa, Oryza sativa
  Clone ID: PAT_MRT4530_62499C.1.pep
FSFFGICFFYFFFFFFFFIAHWRIVLHFTKKKYLQLQRRDSFDQRIPPTKTTSQNGSPTGE

SEQ ID NO: 163509 - protein, 591 aa, Oryza sativa
  Clone ID: PAT_MRT4530_6249C.1.pep
MIRDRGGGEERSKKKKKKKKKKMGMESGDAQLPLLHHQASASNQHYTKPPFNWKAPALILAFEFLESIAYAGISLNLVVYLGTVLHGTTASNAANVDTWNGTTFLTPVLGAFLADTYWGKYKTIAISTVFYLIGLLVITASAVIPSLQPAPCNGSSCPPATGFQYFVFFTALYLISVGTGGVKSALLPFGADQYNDSNLEESKKKQSFFSLFFIAINLGVFISGTVVVWIQQNVAWSLGFGISSICLVVATVAFLAGTPVYKVQLPSGSPLKSVVMVFVASFKKRKLEVPADNALLYEGDDADLSNGQSVKLAHTDGFRWLDKAAVVFEEVEEINKDEGGGGGWLQCSVTQVEEVKILLRMLPIWVTSVLYAASLGQTATTFVQQGNAMNTKIGSFSVPAASLNSAEVIFMMIWVVFQDTVVVPIARRYTGNPAGLTQLQRMGVGRLLAVPALAVAAVLETWRLRSVRDGGNLSIAWQLPQFVILACSDVFCGIAQLEFFYSEAPVSMRSLCSAFSFLALSLGYYVNSLVVSIVAVVTTTSNKGWLPADLNDGHLDYYFWLWTGISAINFVVYAAFAKNYTVKRLAVPHSH

SEQ ID NO: 163510 - protein, 61 aa, Oryza sativa
  Clone ID: PAT_MRT4530_624C.1.pep
TKQKASTVYSHKRRRDASTDNRWALITELLNMDSYDLDELFDRHEPRRVQRANNRNTMVIM

SEQ ID NO: 163511 - protein, 134 aa, Oryza sativa
  Clone ID: PAT_MRT4530_62500C.1.pep
HDQQVSLIEINTSLQAVSNSRTSYRASRSRLTPRRSKPLPAGRFQRPSTIFGLSMALFHSYISCFFAREIFVVLYSSTDEEVGVVGEEPTFSGYGRPRQSKSVASTDPRRHLLGQCWAYQLSHLESEERNGPRH

SEQ ID NO: 163512 - protein, 366 aa, Oryza sativa
  Clone ID: PAT_MRT4530_62501C.1.pep
MAAAVLCFVTLLAFCFLAPAALMLGYYHGSPELVVIGSGCSRLVETNSFFAQDIKARTEGGSPENGLVLYGMPVAPPLGVPAAWSEARRAVVPANSHMEWVYFLNRGSEIEVAYSVRSETESSRPICMIIARGKESFLQWAENPSANETTLSWHLVHGNGTIKQTINLSSEYFIALGNFNNQDVTGLNSDGHYVKLSYGPRWIVYIIGLVLLAVALLIMYDILNMLFGPGPGGGDARASLLSSSSAAAASKEEDDASLGSSYDSVSHDGDGEDDDDDVEERGGGGGGGEGRHLCVGGRGGRELPVVPEETEESEEDLLRLSCPRAQAWGFSEPVEWRREKKKGMDAHRGARTHDHKVKSLALYRLS

SEQ ID NO: 163513 - protein, 104 aa, Oryza sativa
  Clone ID: PAT_MRT4530_62502C.1.pep
MMMDYNNGGAGTRRARGSACESRLLAKGVVARVASEVGRGTIMETKFWSNSTKKILAATQVDPSRLRLHVNPHRLGSAQIGSSRQPGKPRLWPPSSSASHATLT

SEQ ID NO: 163514 - protein, 46 aa, Oryza sativa
  Clone ID: PAT_MRT4530_62503C.1.pep
VQYLSCGNYFSLQTYGSVYRSKRRVIVACTLFSSNLQFDKTYFLQT

SEQ ID NO: 163515 - protein, 258 aa, Oryza sativa
  Clone ID: PAT_MRT4530_62504C.1.pep
MVPWEGYVSDETMGTFAPIALYWVYAGGYQLVLHRRPLERYRLHTRAEEEEKNLVALPAVVRGVLLQQLVQAIVAMILFMVTSDSSAVVVQPPIIMQAFQFLVAMLVMDSWQYFVHRYMHQNKFLYRHIHSQHHRLIVPYAIGALYNHPLEGLLLDTVGGAISFLVSGMTPRTSVFFFCFAVLKTVDDHCGLWLPYNIFQSLFQNNTAYHDVHHQLQGSKYNYSQPFFSIWDRILGTHMPYNLVRRKEGGFEARPLRD

SEQ ID NO: 163516 - protein, 54 aa, Oryza sativa
  Clone ID: PAT_MRT4530_62505C.1.pep
SIVRLAGVLDSKKKSLHGWDGGVLQNGGVLTGGVKVHQFRGRFKPGHDVLDMGG

SEQ ID NO: 163517 - protein, 89 aa, Oryza sativa
  unsure (1)..(89): unsure at all Xaa locations
  Clone ID: PAT_MRT4530_62506C.1.pep
MLLAHAVVKGKQGAWRRRTETGGEGRVKTVCRSWATDLRVVGQEKFVKAGSRLRKERDTLSGRRSAFVQPHEDRVEXRPGSLRAPQRRL

SEQ ID NO: 163518 - protein, 58 aa, Oryza sativa
  unsure (1)..(58): unsure at all Xaa locations
  Clone ID: PAT_MRT4530_62507C.1.pep
PTRPVTRLRRQNPRPAPSSIVFRYIXSPSQFPLFSSLARDNHPSCAPCRHILVEHFTL

SEQ ID NO: 163519 - protein, 136 aa, Oryza sativa
  unsure (1)..(136): unsure at all Xaa locations
  Clone ID: PAT_MRT4530_62508C.1.pep
PLELGSFADATTMSTSALAQHTLXQIGPMTNLWSLLTLAMILMRSKDHPLWKHERVLLAAVILVRAVMTTMAAIASXGLGCTSTTNVLAVMSRAHNRXFAFALLMSTPRIHVLVAMLSSMTFGSPALSLITTLYSI

SEQ ID NO: 163520 - protein, 107 aa, Oryza sativa
  Clone ID: PAT_MRT4530_62509C.1.pep
MAQKYLWYIMVIDFIRKRTDISLLGKESSSRGELTGRRYFSAIPTANGASSADATKRRIVEEFLANPPKVVSSPGMDGIDAGSSASGDGLNRGEYGEDSPAERMNSG

SEQ ID NO: 163521 - protein, 38 aa, Oryza sativa
  Clone ID: PAT_MRT4530_6250C.1.pep
TKRHPWFQFNRRSSSRCTVAVLDHSIALQPLHSSTHIY

SEQ ID NO: 163522 - protein, 72 aa, Oryza sativa
  Clone ID: PAT_MRT4530_62510C.1.pep
MVTRGVGMASATTTVRGAGGARGGDGDGGDAIAQQWRGDQGAKQRRAARLSDGDGDTMGCGGAGRKAAARQG

SEQ ID NO: 163523 - protein, 125 aa, Oryza sativa
  unsure (1)..(125): unsure at all Xaa locations
  Clone ID: PAT_MRT4530_62511C.1.pep
RGDSGRLKVAGERRRWGAAWGEREKAREAPTRRGNERREPEDGFYRLGEGKTLPGVADLGRQXPATWVTSWAKWSSIPARFLGETWGECRGGGWEPISCGLGVRAXREEPESAAMWAAWRLRRFG

SEQ ID NO: 163524 - protein, 242 aa, Oryza sativa
  unsure (1)..(242): unsure at all Xaa locations
  Clone ID: PAT_MRT4530_62512C.1.pep
LGTPFIRRLFLSLITLIILTLIVYNILLRDPLNHFMDLYGIQAYFSYVMGLLHGDFGISYSNGDPIANQILNVFPATISLCFAALFVSVIIGIPLGFVAASFRYNVVGKLLAIVSAFSLAIPVFWLAIMALYYAASNDWQIAAVGELHPIYEISLVTGFRLLDIFLADSPYKLKMMQSVLHHLALPTLILALPATLEVIRFTRQRAEYVMKPNYIKVXXTRCWSPYKICXTYLRNTLPCLIP

SEQ ID NO: 163525 - protein, 101 aa, Oryza sativa
  unsure (1)..(101): unsure at all Xaa locations
  Clone ID: PAT_MRT4530_62513C.1.pep
REESDHRPSXRGHGPLQAYRDXRQRGGYTGGEARDEYNRDPHRNCRTGTNETLAQKFGEAVSIEVXSVTATGENEQEYVPQSDEVEKHNEGECYEEEHKEP

SEQ ID NO: 163526 - protein, 110 aa, Oryza sativa
  Clone ID: PAT_MRT4530_62514C.1.pep
GKGGIFSLREKSIIFPAFIKMEKFPKPGPNEKGVNFVNYLRGGPTTNLNGKALFFSGLKIHSFFKGGFLFLLIFQALGAKTFKGLKILDLGNNEYKNLTPAGGILKFFFF

SEQ ID NO: 163527 - protein, 906 aa, Oryza sativa
  Clone ID: PAT_MRT4530_62515C.1.pep
MAANGRASVRPVERHGAPPRPAGRSRVRVAVRLRPKNSEDLAHGADFDSCVELQPECKKLKLKKNNWSCESYRFDEVFSENASQKRVYESVLEGYNGTVMAYGQTGTGKTYTVGRLGNDDPSEGGIMVRALEHILSVMSLETDSVAISFLQLYLESVQDLLAPEKTNIPIVEDPKTGEVSLPGAAKVEIRDLEHVFQLLQIGEMNRHAANTKMNTESSRSHAILIIHIQRSSRIEDGSNTSLPNGTDNLFPDNLPLVLKSKLLIVDLAGSERIDKSGSEGHMIEEAKFINLSLTSLGKCINALAENSPHIPTRDSKLTRILRDSFGGTARTSLIVTIGPSSRHFSETSSTIMFGQRAMKIVNTIRIKEEVDYESLYKKVEHEVDHLTSEMERQQKLKNSEKMQLEKKLKESEASLNDLKVTSNMQIENMAMEKRQLESTIKRLMLDLEKEKGKNNILSEQIIHLETSLDENKQKQLENISNTNILADTTKSHEKKIRELLKQLEDERSRSASMNDHLNVLQQQLSDAQNYFQKNIACELEKQLSRTTEEFASQISSLEERIADLISEKELVYEELKSTQEKMQQEMRHRQGLEDEILRLKQSLADNCSEESKALCGMVRSGSGLGSVPFMSKSGKSRELLSSQRSNISKIFEEVGLPNVLALLKSDELEVQIHAVKVVANLAAEDVNQEKIVEEGGLDALLSLLETSENTTIHRVTAGAIANLAMNGSNQGLIMNKGGARLLANIASKTNDPQTLRMVAGALANLCGNEKLHVMLKQDGGIKALLGMFRTGHNEVIAQIARGMANFAKCESRVISQGHRKGRSLLIEEGVLNWMVANSSAFSASTRRHIELAFCHLAQNEDNARDIILTGGIKELLRISRESSRDDTRNLAKKALNSNPAFFKEIQ

SEQ ID NO: 163528 - protein, 47 aa, Oryza sativa
  unsure (1)..(47): unsure at all Xaa locations
  Clone ID: PAT_MRT4530_62516C.1.pep
HXHIYLHXNTDXYRWXATCIVYTLASVCGVVDHRSPATTGRXRSTMG

SEQ ID NO: 163529 - protein, 92 aa, Oryza sativa
  Clone ID: PAT_MRT4530_62517C.1.pep
MEENDNTVMVDGGGRRWLRSYICTSCSMWLTTEDRVESAGDRGCLLSIFLLLVISIDMNENVFAFFSCLLDDGWLLLRNVEFIYIPHRYILL

SEQ ID NO: 163530 - protein, 93 aa, Oryza sativa
  unsure (1)..(93): unsure at all Xaa locations
  Clone ID: PAT_MRT4530_62518C.1.pep
NCNFISISQKEKPITIQTPNFNFNKKKKKRFVFKSXKKFXXKPPXXLKKKKIKKKKKIYKKKKKKKKKKKKKKKKKKKKKKKKKKKKKKIKKQ

SEQ ID NO: 163531 - protein, 152 aa, Oryza sativa
  unsure (1)..(152): unsure at all Xaa locations
  Clone ID: PAT_MRT4530_62519C.1.pep
GIGGADKRAPPVGGSKKVGTRWTRSTCALXRGRTTWQPRGGHGGRXDEVAPMWHHRAATPGGTGRATWTAQIAPVGGSGGHGRAGAGSPAGRPGXATMHGLMVAGDDHWRGDTRGRRRKKGKGRGDGGVPHRGAPAELWRREVAVIGMGFRR

SEQ ID NO: 163532 - protein, 82 aa, Oryza sativa
  Clone ID: PAT_MRT4530_6251C.1.pep
VHTSLDVQNFILPVYAGHVIPYHCTRPRPTRTGLILRCITGVIPNVQILCKAQITVCLPSMCSSAHYTSVRCLHIVLEYPIF

SEQ ID NO: 163533 - protein, 88 aa, Oryza sativa
  Clone ID: PAT_MRT4530_62520C.1.pep
CRVGWSKSKLQVIVGTVAFGMGINKPDVRFVIHHSLSKSMETYYQESGRAGRDGLPSECILYYRPGDVPRQSSMVFYENCGLQNLYDI

SEQ ID NO: 163534 - protein, 151 aa, Oryza sativa
  unsure (1)..(151): unsure at all Xaa locations
  Clone ID: PAT_MRT4530_62521C.1.pep
YVRTARGRTTWQPRGGHGGRXDEVAPMWHHRAATPGGTGRATWTAQIAPVGGSGGHGRAGAGSPAGRPGXATMHGLMVAGDDHWRGDTRGRRRKKGKGRGDGGVPHRGAPAELWRREVALLRRRAALRKKRTRVAATLSDRDGVSAMIHGG

SEQ ID NO: 163535 - protein, 365 aa, Oryza sativa
  Clone ID: PAT_MRT4530_62522C.1.pep
MASSAAAAAATGRAALVKAFDETRTGVRGLVESGVSAVPDIFRHPDPYASVPLAPPGVSIPVVDLSLPAPLAAEAAAGAAREWGFFYLVNHHALVPPGFTDGLLAATRAFNELPATERAAHYGRSVDGGVDYFSNFDLYRSGAASWRDTIEVTFGPSRPDTGRIPAACRAEVVGWDAHATAVSRAVMALLCEGLGLAADALEEASCLEGRVMVCHYYPVCPEPERTMGVVPHTDPVVLTILAQDDVGGLQVKHTNEDGESYWVDAKPVPGALMINVGDLLQIMSNDKYKSVEHRVVMNSHEEARVSSAIFYNPGKRGDSVFYGPLPELVSSENPPKYRNFTMPEFLGTFFKRELASNALIEHFKI

SEQ ID NO: 163536 - protein, 169 aa, Oryza sativa
  unsure (1)..(169): unsure at all Xaa locations
  Clone ID: PAT_MRT4530_62523C.1.pep
GIGGADKRAPPVGGSKKVGTRWTRSTCALXRGRTTWQPRGGHGGRXDEVAPMWHHRAATPGGTGRATWTAQIAPVGGSGGHGRAGAGSPAGRPGXATMHGLMVAGDDHWRGDTRGRRRKKGKGRGDGGVPHRGAPAELWRREVALLRRRAALRKKRTRVAATCGRGMRD

SEQ ID NO: 163537 - protein, 88 aa, Oryza sativa
  Clone ID: PAT_MRT4530_62524C.1.pep
HWIERIVLLTATQFSQICRFIRPLAEKETLQSIYKQKVRSLCLNFLTDAYRSGVKFAALWTWTEPKLCRCRQIFAQKVKSPHKLLHGY

SEQ ID NO: 163538 - protein, 105 aa, Oryza sativa
  Clone ID: PAT_MRT4530_62525C.1.pep
SVGEHRLGSFNNLPHGFSRQLFFASITIDIQIVPVYLVVDKRIFKLTIILLLQIHRGSLGNKNCLGPEYTRSQVKYSSHISPHFKLFLATDLRFTMSNKFYKCLL

SEQ ID NO: 163539 - protein, 869 aa, Oryza sativa
  Clone ID: PAT_MRT4530_62526C.1.pep
MASRRHVLIAALIMVGVLEFANADKYKPTESILVNCGSDKEGQDIDGRKWLSDKDSKWLIDGEKSSIMANADFQDPSLPSPVPYMTARVFTKETMYNFSVGEERHWVRLHFYPASYHDLPAENFFFSVSTSTGITLLKNFSVYITAKALSQAYIIREFTLPPSTTGSLSLIFTPTAMNNASYAFVNGIEIISMPNIFSQAAASVDIAGNEVSTTDSSLQTIYRLNVGGSYVAPTNDSGLSRDWYDDTPYIYGAAVGVTYQANDTVQIKYPKNDPDAEYAAPASVYLTSRSMGPDPKVNKNYKLTWVFEVDGNFTYIVRLHFCELLLSKPNQRVFDILINNKTAQSGADVIGWGGQFVPVYKDYATIMPGGAGDKVLWVQLMPNVGSGSEFFDSLLNGLEIFKMSDSSGNLAGPNPDPSKLLEEAESSAQGKFKSKPSNLKATVIGGAAGGAAAFRIVAAICIVVYQSKKRKVLNNSASHSSGWLPVYGGNSHTSTSKSSGGRSAALINPNITAMCRHFSFGEIKSATKNFDESLVIGVGGFGKVYRGVVDGDTKVAIKRSNPSSEQGVLEFQTEIEMLSKLRHKHLVSLIGCCEDEGEMILVYDYMAHGTLREHLYKGGKPALSWKQRLEITIGAARGLHYLHTGAKYTIIHRDVKTTNILVDEKWVAKVSDFGLSKTGPTAMNQTHVSTMVKGSFGYLDPEYFRRQQLTEKSDVYSFGVVLFEVLCARPALNPSLPREQVSLADHAMSCQRKGTLHDIIDPLLNGKIAPDCLKKFAETAEKCLADHGVDRPSMGDVLWNLEFALQMQETFENGGKTEGADSTSDSTTTSVADSMAANAAALSLISEDMDEEDIANSVVFSQLVRPTGR

SEQ ID NO: 163540 - protein, 571 aa, Oryza sativa
  Clone ID: PAT_MRT4530_62527C.1.pep
ILDKLLSQAWLREQHELIRQLVGSSTDLMDKLLQTLRCTGTRDRGVREHAARIVAHLAGEITLARFPQGIRCIYSLLTTPRNQQQDDDNDDDDDDSAQSSDHYKKLMVQGLVILHKLAAAEHNRRIIINSTQGRQLLSMAMAPVSADLLHRIDHEAWNDIVACSLQLMCRLVTAPGETGDKLRSQVLNDKDAIGTMERILNCDGCNEKRLYILAINILTQLPMAAKNKVVDEASSMSVESRRKFTKLLLLIYTDEEKDAFMRQMAGEALAMLSERSKSDATIILKASDSTLKDLTAMLLDVNSNRGYRICAAEILEHLYIRYTKQDGYLNNLTEAMKDVLPKVLGEIFLVSWTHKEKQPGMTEQGTEGVNFSAQKADIESQDPVACQHEKVKEENEKVKEENEKVKEQDEKVKEQTVDMKLYAALLSLSEAIFQRLVNDDKDLAELTDKIAPGGGTAFSFAGKLKEMVEGNSEQATANCLRMLKITTRMIISLINLNGAKVGADLESLMHSLLKASEKMLELEGFMIFSSSDRTESTNPANILASLVKEAQELLEKKRQAQTTPAPSMETS

SEQ ID NO: 163541 - protein, 361 aa, Oryza sativa
  unsure (1)..(361): unsure at all Xaa locations
  Clone ID: PAT_MRT4530_62528C.1.pep
VNNNWKPVEEKIEKKLGCWXGKLLAIGGRVALINSSISSVPLYMISLYSLPCGVREKIDXYRRRFLWQEDQGIRKYHLVQWPVICLPKDQGGLGILDLDVMNKALLGKWLWNMENTEGLWQDMLRNKYLKKKTLTQIKHKNGDSHFWSGLMEIKELFLRFCDKKVENGESTLFWEDSWCGGGGKPIKESAPDLYNITLTKNVTVAEIKRRGLGSIKFRRDLNAVKXRKWANIGRALEFVSLTNEKDRLIWRLSNKGFSVKSFYRALIXRGSIIPKKMWKIKAPPRVKVFSWLVLRNSILTKDNLFKRGWRKGSIKCQFCDKSESIQHLFLDCEGDRGKMQWGAQLLRQVANEIFHSKFGWR

SEQ ID NO: 163542 - protein, 98 aa, Oryza sativa
  Clone ID: PAT_MRT4530_62529C.1.pep
CRFRRQCSLAPSVLLMNMSDSSPWPLSGHQHGHPQLDRWCFYRSIVVASHHHWYHVYNISPSSGLAGPKFIRPQSSVRNRSFRGCSCYPIRRSLRLSY

SEQ ID NO: 163543 - protein, 241 aa, Oryza sativa
  Clone ID: PAT_MRT4530_6252C.1.pep
MEQQSLVLPSDKCNNNRSHRENKKESMIGGAARPPTPPAVVDKTMCAACDILKLLPTGTVLAFHELAPSFTNHGGACGAASRYTTAALIAACTASCVLLSFTDSLVSHVDGRRLYYGVATLRGFRPFNFEGTREEMEERFGDLPGMKVRALDFVHAHVSAVVFVVVALGNADVQGCLFPDAGTGFTEMFRNLPMGLGLLASMVFMIFPTTRKSIGYTDMMPHKEDYGKGGNNIPGQTTPSV

SEQ ID NO: 163544 - protein, 501 aa, Oryza sativa
  Clone ID: PAT_MRT4530_62530C.1.pep
MNRGGGVGVGDESGSDYESGGGMRKPLLMHTGSWYRMGSRQGSLTGAGTSSMAILRESHVSAFLCTLIVALGPIQFGFTGGFSSPTQDAIIRDLDLTLSEFSVFGSLSNVGAMVGAIASGQMAEYIGRKGSLMIAAIPNIIGWLAISFAKDSSFLYMGRLLEGFGVGVISYTVPVYIAEISPQNMRGALGSVNQLSVTVGILLAYLLGMFVPWRLLAVIGILPCTVLIPGLFFIPESPRWLAKMNMMDDFETSLQVLRGFETDISAEVNDIKRAVASANKRTTIRFQELNQKKYRTPLILGIGLLVLQQLSGINGILFYAGSIFKAAGLTNSDLATCALGAIQVLATGVTTWLLDRAGRRILLIISSAGMTLSLLAVAVVFFLKDSISQDSHMYYTLSMISLVALVAFVIAFSFGMGAIPWIIMSEILPVSIKSLAGSFATLANWLTSFGITMTANLMLSWSAGGTFVSYMVVSAFTLVFVILWVPETKGRTLEEIQWSFR

SEQ ID NO: 163545 - protein, 267 aa, Oryza sativa
  unsure (1)..(267): unsure at all Xaa locations
  Clone ID: PAT_MRT4530_62531C.1.pep
MCDGGVSCLVVRILDDQGRNHLLEITLPMNYPSSPPCLVADVPYLPELQWSKGSRLKDVVCQFQEHLKILQDYWSIMDDIDKVLWVVDPTKPTFAMSHRRIALGDDCYLLLHVNVRKPRSLPEVRFLGTDGKLDRLITXGQNIAKSDKKFHENLSTVLDFALPPPPSVNIEDDEQVDCGICYAKHLPIDDELGTHSGGTTDYTCENPSCSRAFHSVCLRDWLRAITTTRQSFDVLFGNCPYCSDPVAVKITDRNSLQRQISADSNHS

SEQ ID NO: 163546 - protein, 108 aa, Oryza sativa
  Clone ID: PAT_MRT4530_62532C.1.pep
VFLIRSGTSQTHTHPAAVHSDTSIRSASTNHTLGTFHAIGQFIHSLHSSSVHSIRSSQLSASQPTPHPAQQREHPRASARVGSHREYPARYRAGVPAFPYSELVLELG

SEQ ID NO: 163547 - protein, 62 aa, Oryza sativa
  Clone ID: PAT_MRT4530_62533C.1.pep
EQYDRRVACLIVGLQIFEKIRVRCTSPSFIFSIVPENKHPKPYKSKRDGVGRPSVIPGSVPQ

SEQ ID NO: 163548 - protein, 167 aa, Oryza sativa
  unsure (1)..(167): unsure at all Xaa locations
  Clone ID: PAT_MRT4530_62534C.1.pep
EDSKYKQKSPAESXMXITSETKLPTVLRRKYPDTLKDGFVVALRTKDNSGFHVARQRLAGGGGWIPRVRSNATNRDPAAQFLVTFKNKDTMGLRSFVAGGKLLQINRRMEFVFASHTFDVWESWMLEGSLLEGCKLINCRNSSAVLDVCIEILAAASEEDGVTRWLD

SEQ ID NO: 163549 - protein, 657 aa, Oryza sativa
  Clone ID: PAT_MRT4530_62535C.1.pep
MARSAASGGGGGGQPLVVSLNCLDDPSLEQEGLAGVAGVEHVPLSAVASGRVEAAAAVLLPSLAFLPRAAQRRLRPWQLLLCLGSPDRAADAALAAELGLRLVHVDANRAEEVADTVMALFLGLLRRTHLLSRHASSAPAAVAAGWLGSVQPMCRGMRRCRGLVLGIIGRSAAARCLATRSLAFRMDVLYFDPRHSANGKAKRPSIVFPSAARRMDTLNDLLAASDLVSLHCTLTNDTMHILNADCLQHVKPGAFIVNTGSCQLIDDCALKQLLIDGTIAGCALDGAEGPQWMEAWVREMPNVLILPRSADYSEEVWMEIREKAITILQSFFFDGAVPSSAISDEDEEISEAGNEDDQLEEKVSSSQVFYSEQQTDESQLKMEYEKRRAISQHKEPQASARSQHIVPRSEGRRSRSGKKGKKRPARRRSQQKTDELSAVESGSNYSSRRDDDTAMSGRDQVLSSSSRFASPEDSKYKQKSPAESPMEITSETKLPTVLRRKYPDTLKDGFVVALRTKDNSGFHVARQRLAGGGGWILDIVSNATNRDPAAQFLVTFKNKDTMGLRSFVAGGKLLQVLYLYLYKLHCSSRFTQPKINRRMEFVFASHTFDVWESWMLEGSLLEGCKLINCRNSSAVLHVCIEILAAASEEDGVTRWLD

SEQ ID NO: 163550 - protein, 92 aa, Oryza sativa
  Clone ID: PAT_MRT4530_62536C.1.pep
MASVCAVRPPLSLASPSYPRPTQTEPPNRGALRRSLLTGSLSRRVHHRSLSAKVTLPRPRPLASKHREKADSVDPRTGSLHLHGNQYSNKCN

SEQ ID NO: 163551 - protein, 82 aa, Oryza sativa
  Clone ID: PAT_MRT4530_62537C.1.pep
MAISPAGPSPLQGPALTGAGVGVIFDPRVRQGGRPAAVHRARQESRRGEVAAAGETGKGAARGQAWPAVRLQRIGGDSQRVR

SEQ ID NO: 163552 - protein, 430 aa, Oryza sativa
  Clone ID: PAT_MRT4530_62538C.1.pep
MGVALTLALTAMWPPPRLAAPATGGHVTVTARKPRGRRLSGKYTTTTTTASLGCGSKPNNIRGATAAAGGGSKMEAAAAVAPSGLRASFLDVLLSRRRNLQVALTVEPGSPVKRPLYQGRPPMGRSEAMESCPRKGVVNSKEKLVEENFYLITESGEQGRVPVLLLKLNDTTPKRKPVIVFLHSSYKCKEWLRPLLEAYASRGYISVAIDSRYHGERANNNSTYIDALKSAWRNGDAMPFILDTVWDLIKLGDHLSEREDVDPCRIGITGESLGGMHAWFAAVVDTRYSVVVPIIGVQGFRWAIDNNKWQARVDSIKPLFEEARIDLGKSEIDTEVVEKVWDKIAPGLDSQFDAPFSLPVIAPRPLLLLNGAEDPRCPVLGLQEPVSRAAKAYEEVGSADKFMFIAEPGIGHQMTANMVKEASDWFDRFL

SEQ ID NO: 163553 - protein, 89 aa, Oryza sativa
  Clone ID: PAT_MRT4530_62539C.1.pep
MRRRTAAAPVGAGGPRGCGRGWRRLPLALVALGAAAALIGAGSPRGCDRGRRRLPAAPVALWATAAPVDAGGTRGCGGSRRWRSLIERA

SEQ ID NO: 163554 - protein, 139 aa, Oryza sativa
  unsure (1)..(139): unsure at all Xaa locations
  Clone ID: PAT_MRT4530_6253C.1.pep
MDEHKAQVSVREVQGVYAIELGAKRAPLLLVGEYLYXHPPKLAVGGEIPQXLCSAGLTGGMWPVRPCYSATARKLAVEMLSEGPIGLAGGRSDRSCAAGQTGPMRRSDRHLAACQTGHGTPVRPPLCGRSDRPWSGRTQ

SEQ ID NO: 163555 - protein, 53 aa, Oryza sativa
  Clone ID: PAT_MRT4530_62540C.1.pep
LMKFLSVFWSSTEYKVYCKSCSKRFSLILVVRVRIWFIWWQYSYFAHVSVIWC

SEQ ID NO: 163556 - protein, 559 aa, Oryza sativa
  Clone ID: PAT_MRT4530_62541C.1.pep
MASRVASPSPKSMASESDPSMMLAITSNMEHSQANNQSVSVLGPVAIFWDIENCPVPSDVRPEDVAGNVRMALRLHPVVKGAVTMLSAYGDFNAFPRRLREGCQRTGVKLVDVPNGRKDAADKAILVDMFLFALDNRPPSSIMLISGDVDFAPALHILGQRGYTIVLAIPSSVTVSSALSSAGSFVWDWPSLARGEGIVAPRSIGRRFADPPGYQHGGNFGSFPDTQNEEEAIVYMGTSRNECSGRTTSNQIYCYNSSQTTREPSKAFYTVTDGNCGTSSRSHNLACSLNEGPDVDQGLPDERSWWVRPGDLQGLKGQLLRLFELSGGSVPLVRVPSEYLKLFGRHLYVSEYGAVKLIHLFEKLADSFVVIGKGHRKVICLRNSGDSNLKKYSTTPIILKKENRGGSILDESTIGTGQQLGSSSDDFSEDERNINPDVDGAYAFDSHLDNFRQEIQELLVCYSCPVPLGNFKSLYEQRYKKTLIYESFGVDGLEELVEKSLQLFRWTSMLQKHSFHATVRPIRIQCSEGVEKLYELGVLQSPQELVQVFSTGVSTLDLL

SEQ ID NO: 163557 - protein, 114 aa, Oryza sativa
  Clone ID: PAT_MRT4530_62542C.1.pep
DAWPKLNKVEFFSTLLEQTGPKWQMDFGDLESIQVWQHALMYLVKEGMNVSNALGPWPEVWSFFKGVQGRVKIAFLTKVLVGEGLEMVAGLTWGGTRALQPLAKKITDLPPLKG

SEQ ID NO: 163558 - protein, 579 aa, Oryza sativa
  Clone ID: PAT_MRT4530_62543C.1.pep
MAAGRAFLRAAPSSLAAGAGRFAFACPTALPLTAAAAAATGPHRRGRGRCYCSASDAPPPPPYVLTTPLYYRLLDKRVVFITGTDEHGEKIATSAEACGRNPKDHCDTISNSYKMLWADLDIEYDKFIRTTDRKHEAVVNDFYSRVLDSGDIYRADYEGLYCVSCEEYKDEKELGENKCCPVHLKPCVPRKEDNYFFALSKYQHQLEDLLTKNPNFVRPSHRLNEVQGWVKSGLRDFSISRASVEWGIPVPNDTKQTIYVWFDALLGYISALLDDGEKASLQQAVERGWPASLHLIGKDILRFHAVYWPAMLMSAGISVPDAVFGHGFLTKDGMKMGKSLGNTLEPKDLVNRFGVDSVRYFFLREVEFGNDGDYSEERFINIVNAHLANTIGNLLNRTLGLLKKNCKSTLAFDSIAAADGISLKDNVENLVDKAKDQFENLLLSSACETLMEIGNLGNLYIDEQAPWSCFKQGGESAEKAAKDLVIILETMRIIAIALSPITPSLSLRIYTQLGFTEDQFRTLRWEDTKWGGLKAGQVMMEPKPVFARIETETDEKDQSSSKATKGGKKKARSQGLVEA

SEQ ID NO: 163559 - protein, 366 aa, Oryza sativa
  Clone ID: PAT_MRT4530_62544C.1.pep
MASKQMVHMNRGQGETSYARNSILQNAEQNRMRPLIEDAIADLVCSRSMVIADLGCSSGPNALALASIAVDAFRRRCLALRRPPPPAELCVLLNDLPDNDFATVVKSLVEFRRNNGDEPVLLTGVVPGSFYGRLFAAESLHLVCSSNSLHWLSEAPEDLKMNGIPAYDVDANVRRERRAVVVGAYARQFRKDFMAFLKMRAVELVPGGRMVLSLAGRRSVDLASELTHAWESTAMTLSDMVTMGVIDKEKFETFYMPIYGPSDEEIRQIIQEEGSFLIREMQVPELTSGAYSALITSARVASMLRAAFEPIIVQHFGPTGCDGKEGIMDEFVRTAERRWSLEGSLQDELAQNPRGVLLVSLEKKPS

SEQ ID NO: 163560 - protein, 566 aa, Oryza sativa
  unsure (1)..(566): unsure at all Xaa locations
  Clone ID: PAT_MRT4530_62545C.1.pep
GHPNAFAFVNGIEVFSSPDLFGSSNPMEVTGDGSGTPFPIDAGTAMQTMYRLNVGGNAISPSKDTGGYRSWEDDTPYIPFASFGVSYANDTNVPINYPDSIPQYVAPADVYSTARSMGPDNNVNLQYNLTWAMQVDAGYQYLVRLHFCEIQSGISKINQRTFDIYINNQTAFSGADVIAWSTGLGIPVYKDFVVFPMGSGPMDLWVDLHPNVKNKPQYYNAILNGMEVFKLQLTNGSLAGLNPVPSIVPTASGGNSGKKSSVGPIIGGVIGGLVVLALGCCCFFVICKRRQRAGKDSGMSDGHSGWLPLSLYGNSHTSSSAKSHTTGSHASSLPSNLCRHFSFVEIKAATNNFDESLLLGVGGFGKVYRGEIDGGATKVAIKRGNPLSEQGVHEFQTEIEMLSKLRHRHLVSLIGYCEEKNEMGLLXDYMAHGTLREHLYKTQNAPLSWRQRLDICIGAARGLHYLHTGAKHTIIHRDVKTTNILLDEKWVAKVSDFGLSKTGPTMDHTHVSTVVKGSFGYLDPEYFRRQQLTDKSDVYSFGVVLFEVLCGDPLESTCRHASLSIL

SEQ ID NO: 163561 - protein, 159 aa, Oryza sativa
  unsure (1)..(159): unsure at all Xaa locations
  Clone ID: PAT_MRT4530_62546C.1.pep
GXXXAGRXGVVLSXXGGRVFPGXGGXGWRXNXXGGDVXFXXGEWASXYNSGQTXLVXXGVPHXXGTXPPSWARGRSRXXXLGVEXPXTTXSVLFFPPRXGXXFAXAAXXRSXGFGXPVXVXSPLPRIRXGXAVDVPPCPLXEKNAPHLAXXXRNTXSXS

SEQ ID NO: 163562 - protein, 206 aa, Oryza sativa
  Clone ID: PAT_MRT4530_62547C.1.pep
MEWVIIAIRAHRSASWPKERAGGGAQGSSEPPPAPLILAFHVKLPQKMSLPFIKTESNIVKNEVPQKCRPDVRHRRVPQRRRLRPDAAEAHSLASDHVLDATMVDAKGRLLDRATMEEDLFWAIRGGGGRNFGIVLSWKLRLVPIPATVTVFTVHRSRNQSATNLLIKWQHVASSLPNDAFLRVVVPLYRVPASSPPWPTPSWSST

SEQ ID NO: 163563 - protein, 529 aa, Oryza sativa
  Clone ID: PAT_MRT4530_62548C.1.pep
MASRKSICNKGVFEEKEIREIEKIRKTRKVPTVRAGPGPMQPRRPLGAHDGNRFSTVCNFPDDLLPSLGATAHQPPKLRKYLVSPYDPRYKVWETFLIILVVYSAWICPLEFAFLRYLPSAPFVVDDVVNGFFAVDIMLTFFVPFVDKKSYLLVNDPKKIAVRYLSSWFVFDVCSTVPFHSISLLFNEHGHDLGFKFLNVLRLWRLRRVSSMFARLEKDIRFNYAVIRCTKLISVTLFAIHCAGCINYLIADRYPDPRRTWIGAVMPNFREDGLWIRYVTAMYWSITTLTTTGYGDLHAENAREMLFGICYMLFNLWLTAYLIGNMTNLVVHSTSRTRDFRDVVQAASEFAARNQLPQQIEEQMLNHICLRYKTDGLKQQETLDVLPKAMRSSISHYLFFRVVQGAYLFKGVSSRFIQQLVTEMQAEYFAPKEDIILQNDSPSDLYLLVSGAVDILVFLDGTEQVYRRAAEGELLGEIGVLCNKPQSFTFRTTKLSQILRISRTKLLGIIQENREDGDIIRSNLQQVNV

SEQ ID NO: 163564 - protein, 64 aa, Oryza sativa
  Clone ID: PAT_MRT4530_62549C.1.pep
GRSIFLQFAPRGLHVFVGWLSVNSLNSVNFGTCLFCLCLSLQSFISFGKKPLASMYYYMCKCWF

SEQ ID NO: 163565 - protein, 41 aa, Oryza sativa
  Clone ID: PAT_MRT4530_6254C.1.pep
QSCGGSAAAPSVASSLLPLTSIRSSVSHLPSNPCSSPLFLG

SEQ ID NO: 163566 - protein, 74 aa, Oryza sativa
  Clone ID: PAT_MRT4530_62550C.1.pep
INGIKNNSILLQLKTITPHHIYILNSGSFKLLKQPYGVLRNFKIILINTIVHKMTNISYTSLLLRIYIFHSLYY

SEQ ID NO: 163567 - protein, 50 aa, Oryza sativa
  Clone ID: PAT_MRT4530_62551C.1.pep
QLDLFSAHNPVVVYGLINQKYLHLICHLAASSLHLFFFSDLNHHTNIHRM

SEQ ID NO: 163568 - protein, 51 aa, Oryza sativa
  Clone ID: PAT_MRT4530_62552C.1.pep
LHQCSPFPYNRNFDIQSDSKYDYYKIFITLIPHNPQFILFQHPAHVLTGKH

SEQ ID NO: 163569 - protein, 57 aa, Oryza sativa
  Clone ID: PAT_MRT4530_62553C.1.pep
NIIESNTYFLCRERLERGTWCHAATRGCLTCQSFLNLHHLCYGKSINFYSSGVFHEG

SEQ ID NO: 163570 - protein, 97 aa, Oryza sativa
  Clone ID: PAT_MRT4530_62554C.1.pep
MVLRVVLMTIKDRFASYCLRQTEKWREVHGGRWGVHASGFSGGDYDPGKGEDDGGGLTVYCGREVTDSDRDDVNREKKAGAVIGASGAVVELMVVVA

SEQ ID NO: 163571 - protein, 894 aa, Oryza sativa
  unsure (1)..(894): unsure at all Xaa locations
  Clone ID: PAT_MRT4530_62555C.1.pep
MDYYYPMEEEEEVHERPRFRRPVHPWQWHHWQNLLGLLSSSSPSPATAAAAQRCSHVSWEETAAAHLYSASLPGVRKEEIRVEVEDAMYLVIRTELDDGGDGDGGGGGGRRSFARKFRLPAMVDADGISAEYTHGVLRRLLDVVDVGGAVDDEAEVLGVVVDIEDDLEVAVGEAGEAIGIAGRERKSTLWRERRGMMSGPSRILHCRIVWLLAPPPPPRTNEVVVAGAEDAISVRTTSTTAASVEVLVERRGGMEGGGGGGGGGGGEGSTSGARFPILQANRDPESNWEVDVAKSLEEYLLRICSGEISGEDGAHSVNFAEAALLLQGSVQVYSRKVEYLYTLVLNALEFLSQKKNERFNANYDHTRVLKDKRPILYLVSHVNRDSSNGCSYHNLTYCSIDPTTCCSFSNLAANCVKHLKHSRQDQENSSAQANESDRSTVPNEEDDVFSGLDDVPVEARTTLDNNIDRDDLLKKNLATCGFFGDFLLLDPCDAPAVSDFLQGKQSAKEDIFAGRGSSARSKSRTNVFCSPNGRSGGTGRRPTPGKVQEGNPDQTQESNPDQSQEMNANQTQEHIDDLNVNDDHWSVHPADHDFPDNDMPHPDDADAGCVDDSDDDDDPWRPLNPHEPGNLKIRTCRKVKSFARQVIGAPKRNIIASLFPMEKMDGASFKVHLSQQETHHVPEPPPLYEKLMRSLEHGEPESHLFGDLKDGHEPDIGVNDFDIHEPDMPDDVCDMDVDMDIPTYPDKNNDATLDGAQGTQDSMDAHESLEDLCRSHLDRNPPFDIGSYGEQIIDALSSRAENGGITSFGETVTGKPKYEVARTIYALLQLEDGRSVDLDKGETTNGWGCXTSCKPCHVRLMAHKQEQGIEIRFEQLLINLISGYTVSVKTSPAK

SEQ ID NO: 163572 - protein, 588 aa, Oryza sativa
  Clone ID: PAT_MRT4530_62556C.1.pep
MPPAPSQEQTKLAPEKQQHISGHGEQAVRYHGWKVMPYVIGNETCERLGTIGTTANLLVYLTTVFHIPSAAAATLLNVFSGTSNLAPLLGAFLCDAYLGRYATLAAASIASFLGMLVLTLTAAIPSLHPPPCASSSSTSCQGPTHRQLAALLASFAFLVVGAGGIRPCNLAFGADQFDPATAAGRRGIASFFNWYYFTFTIAMMVSATLIIYLQSNINWAIGLAVPTALMALSCALFFMGTRLYVRVRPEGSPFTSFAQVLVAAARKRRLPAPASPADDLFDPPHRSKLVAKIKHTDQFRWLDKAAVVTAEDAVVDGMSAAAANPWRLCTVQQVEEVKVLARMIPVWSSSIVYYVMLTQLGTYTVFQVMQSDRRVGRSGFEVPAGSMVVFNMVALTAWLPVYDRAVVPALRRVTGREEGISQLQRIGIGLALSVATMAVAVAVEQRRRGAGGGSSSSWAWMVPQQAMAGLSEAFAAIGLNELCYKESPESMRSVAGALSPLALAVASYASGAMVTAVERATGWLAQDIDKGRVDLFYLVVGAMSAANLAYFVVCALWYRSKNIADHGGVELLQTSSKHNADAPPAMAV

SEQ ID NO: 163573 - protein, 53 aa, Oryza sativa
  Clone ID: PAT_MRT4530_62557C.1.pep
MAAAAGDSSEPKASIGAGSCWSPPSTSVSESVRLAPGVVVFLEGRFYRVAYLE

SEQ ID NO: 163574 - protein, 550 aa, Oryza sativa
  unsure (1)..(550): unsure at all Xaa locations
  Clone ID: PAT_MRT4530_62558C.1.pep
MTCHVWKKSRVIQIAYDSEYTRFKFVMLAVAGAKGNKKESDRRSKKDRNQDSSIYQLPKMIDVRTHARDGTVSTENCFPRCRFGGPRFPSISITPYLAFFIRENATPNQSLDSLRSPFFLPLNRRSSRWYKLAGVLAARIVLGARGRTSRVAQKWRDSLQEGGKAGGVLSCPLFEAEPVGAPMETRGKKRKRERELLAIPSSPARVQSPWIHLPPCIRAHKLESEAVIDFVCRVSPATAVRSLNWDIVRDGDSTKLTAAYSPPLPPPSAPASAVRGKGKRAATSTAASEGCSKKSRGNSAGEALERLVSLWMESMERLARAKVEAKSKGSEACMELVEADGHPVPGPVWHAAVRVFTYPHYCSCFMKLPTAEARSVYILMMAQSLPAVPWSQGTTGFGGWHGGAGSSAPGLGEQDWSEEDDAIINVLACSLELNQRAARRVPVQTGISWMLETMANPRQCKAMFRLKAEQIHSLHDLLSSKYHLHGSWEVCGIEALGMFLYXMAGNRPNRDTNNRLSARSKGFESSNTILSRQFPQVIAKKVFTCGLWIS

SEQ ID NO: 163575 - protein, 174 aa, Oryza sativa
  Clone ID: PAT_MRT4530_62559C.1.pep
PEVTLRIAWEVSKLVEVAIIDFHFDQELPGEKVYHINMTSNSGINPLVINLDQEGGGPNLRAIELAMLFAKTLRLGSNQQGKLLDAFKHCYFRRGISQESPQSWLKVPPNFSDLEALLEEMAEEDKEAEKLRLKLFTMFEYGIFNKTQPPYERLTRWNLAKLSPNCRRSPGTEL

SEQ ID NO: 163576 - protein, 139 aa, Oryza sativa
  unsure (1)..(139): unsure at all Xaa locations
  Clone ID: PAT_MRT4530_6255C.1.pep
MDEHKAQVGVREVQGVYAIELGAKRAPLLLVGEYLYSHPPKLAVGGEIPQXLCSAGLTGGMWPVRPCYSATARKLAVVALSEGPIGLAAGRSDRACAAGQTVLMRRSDHRRAAGRTGQGTPVRPPLCGRSDRPWSGRAQ

SEQ ID NO: 163577 - protein, 396 aa, Oryza sativa
  unsure (1)..(396): unsure at all Xaa locations
  Clone ID: PAT_MRT4530_62560C.1.pep
RGWGAGGQGWRXGGAFDRDGVAAAVRWLACNLELNQRAARRVPVQTGISWMLEMMANPRQCKSMFRLKAEQIYSLHDLLSGKYHIHGSWEVCGLEALGMFLYTMAGNGPNRDTNNRWVRSSSTVSIYFNRVLNAMHVLAGNILKPVDPNFTYTHPRLLEGNKFRPFYDSVGAVDGTHVSIVASVATSIENRNRHHVTTRNVLVVCDHDGRVMFLDTEXPGSVHDQRVLNQAMQYYPDNFPRLPLGKYLLTDSRFPSRMGFLTPYPHVRYHMDVLGGVRAPQPVGREEKFNHRHFSLRSVIETTFGIVKKQWKILKEIPHNDDDRVHTRIIKAAFALHNFRKDSRDVNYRHNHPLYNNNPIVQKHPSFSHMYYATNREQAMRALRDCIADVVYNHLR

SEQ ID NO: 163578 - protein, 36 aa, Oryza sativa
  Clone ID: PAT_MRT4530_62561C.1.pep
SPQRQALRPAASALSPPSSVASEAATLPGHLGAVSA

SEQ ID NO: 163579 - protein, 187 aa, Oryza sativa
  Clone ID: PAT_MRT4530_62562C.1.pep
EEAGYWWQRHILRLHPKSQAHVRRRRRRRRLGNDEGLTSSNRAVRFAGAVRRAPRLRPWSDPTSSLSARRSAPSSTTPPPPWCRTVRSSGTRRSAARPSSCWGPDSTPWTTARASPTPASRSSSRPPPLSPGPAAGAGAIGRCASAGPSSSSSASNTAILICPRASPSSSWLSKSSPSPEKKDSCAL

SEQ ID NO: 163580 - protein, 124 aa, Oryza sativa
  unsure (1)..(124): unsure at all Xaa locations
  Clone ID: PAT_MRT4530_62563C.1.pep
PRGPPPRSFLVYYRVDEAGEKPRRGGTVFFEKIFPKYIDVXAPSGGPFFGGWKGPQKDIFGKKGIKFFFGFFFEACKLSLNFFFQEPLLGPFLFGDPGFPWIWLWFFKGSPPPPPNLNFLYSCP

SEQ ID NO: 163581 - protein, 963 aa, Oryza sativa
  Clone ID: PAT_MRT4530_62564C.1.pep
MKMMSMAQIMRKTSVVVLQEEEDLTSSATRRAPAPPPREVVRVRLRLTPAPVATAEDAARGGKMPPPPPLPTSCEQEEACVEQEGRGGPCPLLLRRGATPDDQELQRRRRALAGERAGAVTVAGEAGLLDGARHAERGHRRGPFGHGQAEGGLAVEGGGPRRELAKMPTKAGTSCPEPEPEGPVASHAQPLNPEGLSSPTAVARRGRRARSGGQGYGAGCSGAGGSGRVQRGRSTAAEPLLRAAARRRRGGEPQGRPAGGRRQAAAERRPASACAAATRRRRGLAAAAGAGAAWSLGGLAAISPSPSTVGHLGTSLNSVQFYIHYWLLRNLVAITRKSIKRQLLALKVKISSHRSHSNCYIMSLAAVASPHFPPSWAYQIRMAASQGQFLHAISLFLQMRASVAPRSSVPASLPAALKSCAGLGLCTLAASLHALAIRSGSFADRFTANALLNLCIKLPEHKRHQEALSMVREMWRDGFMPDTFTLSTVLPIFAECADIKRGMVVHGYAIKNGFDNDVFVGSSLIDMYANCTQMDYSMKVFDSFSDCDAVLWNSMLAGYAQNGSVEEALGIFRRMLQAGVRPVPVTFSSLIPAFGNLSLLRLGKQLHAYLIRARFNDNIFISSSLIDMYCKCGNVDIARRVFNGIQSPDIVSWTAMIMGYALHGPTTEAFVLFERMELGNVKPNHITFLAVLTACSHAGLVDNGWKYFNSMSNQYGFVPSLEHCAALADTLGRAGDLDEAYNFISEMKIKPTSSVWSTLLRACRVHKNTVLAEEVAKKIFELEPKSMGSHVILSNMYSASGRWNEAAQLRKSMRIKGMKKEPACSWIEVKNKLHVFIAHDKSHPWYDRIIDALNVYSEQMIRQGYVPNMEDVLQDIEEEQKREGQPPLDASAIYNSSLRHFEISDSKFPLHSISLSYDNLAWMLALVEISADLWSIRSALQGTEEIGCLVYFPCVIKLFVLEE

SEQ ID NO: 163582 - protein, 228 aa, Oryza sativa
  unsure (1)..(228): unsure at all Xaa locations
  Clone ID: PAT_MRT4530_62565C.1.pep
DPAAAHPRRKTEASARGEGGSERRPMLFATASSSSLLTIGGARGVRGGRQRLARSGREGAAPCDLRRSVVVVADPGAVRVWRNRGRQRPARTATEGAVPXRRWSSPACGGRAAASRARRKEEAGAXRGRAVTAWRRNSPAHGRGAPLDLRLVRPASAGSTATTXLRHRCSSSSSSSCRRSFRSSLLLVLLLAVAVTCPFSARTASSAHGLPQVCYLRHKPWYKNLVKR

SEQ ID NO: 163583 - protein, 887 aa, Oryza sativa
  Clone ID: PAT_MRT4530_62566C.1.pep
MLEKWGFSYCKIDGDVTVGEAPRVVASVELKAVQLAVGAGELSEVVFGADISRGVADHEENRDEWRLSRCQVKKSGCSWLKSIEKIISQTLGNSRKKPRFDAGEEEEEELARMPLADAFVGAGSSGDGDGAAAGAGGCAAAPSVELLDIVQHPLPGYGAPVALSFSPDDRRVAFLYSPDGTLHRNVYAFDPAQRRQELLFGPPDGGGLEEGNLSAEERLRRERARERGLGVTRYEWRARLPGTPASRAGIVVPLPSGVYFQDLSGAEPVLKLQSSATSPIIDPHLSPDGSMIAYVRDDELHTVGFSDGQTTQLTYGASESGKIHGLAEYIAQEEMERKMGFWWSPDSKHLAFTEVDSSEIPLYRIMHQGKSSVGPDAQEDHAYPFAGAANVKVRLGVVSSHGGEITWMDLLCGEPNSIHGDEEYLARVNWMHNSAIAVQVLNRTHSKLKLLKFDIASGGFIWASEKTGFRHLYLHDKNGTLDGPLETNLYSTNLFPDWSLPLQVPKRLTHGTGRHSVILDHQLLRFIDVYDSIKSPPVILLCSPQLSPEIVQIEGKDGTALYGTLYLPDEKKYGPPPYKTLVNVYGGPSVQLVSDSWISTVDMRAQFLRSKGILVWKMDNRGTARRGLQLEGQLKYNIVRVDAEDQLARAEWLIKNYGGFLSAMCLARFPDTFSCAVSGAPVTAWDGYDTFYTEKYMGLPSEQRDAYRYGSIMHHVKNLRGRLLLIHGMIDENVHFRHTARLINSLMAEGKPYDILLFPDERHMPRRLVCVTWNVITAALECRNFVGGAVDRLRPPPIRASAVVTARLRKRNLAGVRGPSEAEAEAEAETEKGGWEASSSRLLGSNLFISIPMLCCCAIGVVAETILPPLHDSFGSGLNALGAKKGL

SEQ ID NO: 163584 - protein, 106 aa, Oryza sativa
  Clone ID: PAT_MRT4530_62567C.1.pep
MRGVGRKGVRTSIYTPTYGFLSCVANRIIRKGEPPTKAHLITISKLLQYARYERVLFTSILSEFCQDTRLMKIRMVPGQPREITVQIQTYPLRPKISATISFCVQL

SEQ ID NO: 163585 - protein, 172 aa, Oryza sativa
  unsure (1)..(172): unsure at all Xaa locations
  Clone ID: PAT_MRT4530_62568C.1.pep
QFEGQLKYNIGRVDAEDQLAGAEWLIKKGLAKPXHIGLYGWSYGGFLSAMCLARFPDTFSCAVSGAPVTAWDGYDTFYTEKYMGLPSEQRDAYRYGSIMHHVKNLRGXLLLIHGMIDENVHFRHTARLINSLMAEGKPYDILLFPDERHMPRRLGDRIYMEERIWDFVERNL

SEQ ID NO: 163586 - protein, 106 aa, Oryza sativa
  Clone ID: PAT_MRT4530_62569C.1.pep
HFAAPLVVECGRRRRICIVRRPTATTTTDSPPSSTTPGSSPRAPSCATSSAASRATRTSTAPPSSPSHGLRSPWTGTTSSPTGASTTSPSPTTAARAASGAPVDGS

SEQ ID NO: 163587 - protein, 95 aa, Oryza sativa
  Clone ID: PAT_MRT4530_6256C.1.pep
PPLPRRHLRPRLRVVKCCAGRVSPSSKDHRRRRSLAGRLHRPRAVSAAPVRRCRSHASSRGGKDPSSRCPVLVLSVSPHARRVVVDPGTHVPVSV

SEQ ID NO: 163588 - protein, 93 aa, Oryza sativa
  Clone ID: PAT_MRT4530_62570C.1.pep
MEYTITYSRQITNQPDIVNQLNISAIIPKTGSSATMKKRPLTGYEDEDESRQAAPQSRRSAGEGGRGEGTEVAAARGDENWRRLWQAGVHGRM

SEQ ID NO: 163589 - protein, 182 aa, Oryza sativa
  Clone ID: PAT_MRT4530_62571C.1.pep
FFIKLGEKPPALEEKKIQLEAKFKKEPEEALKLFRKSLTFKAPPMPRFFPEGPFSKGENKKLPTTRAKLPKMGRRKAFTGADAFNLLEEKDSPPRPCFRANPDNLDRIFKFSSSSKNGKPQQPSTPKPAASKKQAQPPAPKLFGQRAMKIPVPQMVFFLFFFFLVGGMGPSWRKEPPPPFRG

SEQ ID NO: 163590 - protein, 961 aa, Oryza sativa
  unsure (1)..(961): unsure at all Xaa locations
  Clone ID: PAT_MRT4530_62572C.1.pep
MAEFLVRPLLSAVTNKASSYLVYQYKVMEGMEQQRKALERMLPLILSVIQDTEEKRSKKPELSAWLDELKKVSYEAIDVFDEFKYEALRREAKKKGHDATLGKGIQQETPKQWRQTDSIMVDTEKGIISRSRDEEQKKIIKMLLDEARGKDLIVLPIVGMGGLGKTTFAQLIYNDPEIEKYFPLRRWCCVSDVFDVVTIANSICMSTERDREKALQDLQKEVGGKKYLIVLDHVWNRDSDKWGKLKTCFKKGGMGSVVLTTTRNAEVARIMVIGEVPVHNLEKLGEAYLMEIIQSKAFSLSKKSDEHFEVLRKIVQRCDGSPLAAQSFGSVLFNRTTLQEWKDILAKSNICNEGEDIIFPILRLSYDDLPLHIKRCFAFCAIFPKDFEIDMETLINLWLAHDLIPLQEDDNIEMVAKHIFNELVWRSFFQDVQKFPLQTTCKIHDLMHDIAQSAMGEECVSIVGRSDYRSKSLEHPRYHFYSLDDDNTILLDDFMRKQSSTLRTLLFDRDYIHISTSLLSKSSSLRALRLRYLNTESLPIRPRHLLHLRYLDISRNYHVKVLPEDICTLYNLQTLILSDCKILVGLPKDMKYMTSLRHLYTNGCLRLKCMPPELGQLTSIRTLTYFVVGASSGCSTLRELHSLNLCGELELRGLENVSQEDAKAANLRNKEKLARLSLVWNSECCVEEPNCNGKVLDALKPHHGLLMLNVIYSLIHWLRIWAILQKPDSRDMLILDVDDKEGRVQLDQIHESSLSELDLKHCNFFFPTSPSQPIIMFWKCLRQLVCLEIWFCGVLIYWPEEEFLCLVSLKTLGIEGCDKLIGRPTLLLARRRARRPRYRSPRLLALKANLVAQIVATAGRSSGAGLTGLDGARRQCSIGIGITRSPQRRRPTAYSGSPAPHVSMGAGSRRRCGGGRGRSSGGDASEKRXYMRVVTVELDWAPNFMDKNTPSLMMITLLIRF

SEQ ID NO: 163591 - protein, 36 aa, Oryza sativa
  Clone ID: PAT_MRT4530_62573C.1.pep
MVKDDALPDEGTLQLCGYILISTSVGQPVSAFMALA

SEQ ID NO: 163592 - protein, 181 aa, Oryza sativa
  unsure (1)..(181): unsure at all Xaa locations
  Clone ID: PAT_MRT4530_62574C.1.pep
TXFLTHTPSQHSAHRAHHHCSTRHTASIAPAQAHFGHTHATLEFNQPQQGQGAHTXQPSSQWLVTTLARPARPNHRAXLTQPVGPFSHPSSTRPPSKAGHPSCIRKLANRIPQTFQSNXXIHWEVQPTPSATRRFIKFPQPRRXSRXSRVAIRTRMIPIPYXKAFEXMGSWXQQGHXATQP

SEQ ID NO: 163593 - protein, 107 aa, Oryza sativa
  Clone ID: PAT_MRT4530_62575C.1.pep
MSKKRQRRRWSLPLTPTTRKATMLDDEKTILEQQIAAATARLEELRRTNRELEIKLIVCDLMSGRRNNVDDLTVDILQVVRMAIVKYRLGIRKRIRELRSMDSSKPT

SEQ ID NO: 163594 - protein, 65 aa, Oryza sativa
  unsure (1)..(65): unsure at all Xaa locations
  Clone ID: PAT_MRT4530_62576C.1.pep
ACXVXAPXFRESRXATLQDXXILTGXEVITXELGIXLXNFEPQXLXXSKKXTVSKAXXVILPGAX

SEQ ID NO: 163595 - protein, 507 aa, Oryza sativa
  Clone ID: PAT_MRT4530_62577C.1.pep
MEMGSLLPHAASLFAVSMASLMIAAVLSIVRRPWPWKTAAISREAVLRLLGVRLGDVPTTVVRDGAVAVDALVRRADAFSDRPAGGGATSIVSGGRAHNINTVPHGPLWVALRRNLTSEAFHPDVSASAARSAGGGAGVVVPVRDCLYAALFALNVATCFGDGVDGELVGAMRAAQQEFLRFLPRARVFSTFQKAARLVYPDRWKQLLRHRRRQEEMYLPLIRAINEQRRTRGTPSPPPPTTYVDTLLYLEVPADDGRRRRKLSDGEMVGLVSEYLGAATGTVVAQLEWALANLVRRPDIQTRLCGEVEAAAGGEPCAYLRAVVMECLRRHPPVSSVQRHMVRDVMLGGAHVARGNVVSFAIEEIGRRQHENILKARLKYRYVFLKTNLKTDSYTDDIWTSSEEFSPERFMEGGEEGVRLAIGSKQEATTKVKMMPFSAGRRTCPGMGYAILHLEYFLANLVTAFEWRRVPWEEEVDLTADYGFITTMQHPLRALVVPLSNDRSTVV

SEQ ID NO: 163596 - protein, 48 aa, Oryza sativa
  Clone ID: PAT_MRT4530_62578C.1.pep
LYYPTPTLLRFKHPFFIRHLLIYSFIPISKLFVHSYLPYFMYIPFTFC

SEQ ID NO: 163597 - protein, 273 aa, Oryza sativa
  unsure (1)..(273): unsure at all Xaa locations
  Clone ID: PAT_MRT4530_62579C.1.pep
SGPTSRHAHPNATTAAPEGQTAAVRPPMLRRADHGPRSGRALREDRRRRRHPSAQAAARMQLAPPSMRAVAAAPIPGRRPVLDHGVPRPPAPSRDTRAASKVXRRGPLALAPPLPRCPRAPRAARRSTSPLPTPSPSPRRRYRRAVARRSPPSRRAVPSRRAPSRRHAPRRPFHRRAPSPFGRRVAAAAPSPSHVASPAAPRPRAPCRRCCRAAAAPRAPRPPLLYPRHHAAAPSHRAAAPPPRSRRAALHLAPTSPPSPSPPSPPPPSVSRS

SEQ ID NO: 163598 - protein, 71 aa, Oryza sativa
  Clone ID: PAT_MRT4530_6257C.1.pep
MRVGLCDGSVMRFTTASDESLTPPATTIWKEREYQDDVRVVFFFHLSRTAAVLPGAQPFFSSHIGPDPAVE

SEQ ID NO: 163599 - protein, 2420 aa, Oryza sativa
  Clone ID: PAT_MRT4530_62580C.1.pep
MMPLRDAARAACASHIFLQSWRCRPNLIFTGETLGLIINGTGKDDAKRDFINIVQRILLNHSGIGVKTLKLELLHFSDLDLGCLEAWLQIAVAPGIEELTLMFPCVRYKFPCSLLFERGGNSVRYLHLMVCTFRPTIGLGCLIKLTQLHLSFVWITGDELELLSKCVALEWLKLSYCPEIICLKVPCMLRQLGSLEVAECRYLKVIEICAPNLSNFYLTGFLVRTSFENPLLVKKLRIMCLRQGNFVSYARTKLPSLVPNVETLTVASNEATGQAIPTDRRPLRPRRPPPCAGSHPGADAHHPRLSCPIALPLEPARPPLDVAGQMRLASLPPSWPALQPAHPTLLRHHKPVIPSQPLSGPPLSPRSSTPRRNPQFWLESPPPPPSRSAVPFSADDVSHVSESPDPRSSPTPAMPRSFADAVRLDFNPAKGDGLPVFKSPHGQPPPRPKLKSAITIPAWSTFQRRAYRATPGEEMGVRRIHGTARPGRFNGEWKEVKPRHWWRRSPHSPESQRPASRRQDAHSRRSLAPAASASLRLFRERTAGKCFNCLARDHRAARCRDPVRCFRCFRSGHKANSCSRREPRPRQPRQSPQKALRRQASTPPPPQNTSHRQASTPSPSLPRATRPRQPRQSPQNTSCRQASTPPLQLPLPPKPSCNTRMALLGDPATRPDEDHCFVPTPFATEAERKEWESSAVVSWAMRAPASTTAQDVEAAFREEFRLRRGEVTVTRHHPEAFLIKFEHSSHCYEAMRKGFVKRNGIELHFIKWRSLSAALGIALMFRRLIARTCGLEEIETNLIHPVDTRTVDVWAWTGNPSSIPKRMWLTFTGSTRGAKPEQILVSDRPPAHWQHGAKFCVYIHLEEIHDYTTVAVDLDGNEACAPSKRRLPEWHLGVADGDPVPTRAFENFPHHPPPPRTRQGREPERIDDRDDRRRRAKDDRDRSRPRRSYNDDHPDHDRDQAWRRRDDDDDRDGRGGRGREAWRGRESRKVSGLDGQRVRERSPRRRDWAEDDRRGDRRHHVQAAVALPATIPPLKLAPKQAPRENLRETGERLVNRVNNFAAAVDDASQPGGEEAWSDRRPSRVHDVPIRQVFDRLKHCLFPAGIHSTPSHSGQVMPHDERASIGARGNTAAATAVASKTVTPPQLITAAPTTEQDEHQDAGNKNTLQVLESLFSTPPRAVLPRPTSPALTTTQATPAPAPAPPGGHGMERRRSARLAAKPPMPTMQRCTRVLLKRLGMLHDDKTLDEVLSDYIAMFNGPLPQHVIAALTSIFDIDADAIMEANHVDNTLLEVVGEGVADLVEECTALNELIAETSCNLVCIQETKLRAVDDQLARFLGAYRLDSYAFKPSRGTRGGILLLWNSTAISVHSTRIGRYSLTANITVLRCGTSFMLTTVYGPTRHREKDSFLRHIRSLKPSPGNKWLILGDFNLVYRARDKNNNNLNLGRMNRFRAALNRCELKEIHLQNRKFTWSNERRRPTLMRLDRFFCNEEWDLSFDRHILHALSTGPSDHCPLLLTDPSCPRKPRPFKFENFWIKLPGFKEVVEQAWGKPSNHTEPMHRLAYKLRDMAKELKRWARTTCSQTKLKYHMALDVILRLDVAQEQRTLSPEEGNLRAALKRRVLGLAVIERARKRQASRITNIRAGDANTKFFHLKVNSTRRKNHIHRLRKQNGWAVTHEEKSQAIFDHFSLFMGRPQERQLDLNWQSLGLETTDLNSLNEPFTVDEIKRAICHMPTDKAPGPDGFTGCFFKACWETIKNDVTTAFNAIYNHRCNHLNLLNSASVVLIPKKDGAEQVSDFRPISLIHGFAKIFSKLLALRLQPLMHKLVSTSQSAFIRGRSIHDNFLYVRTLFATSSSKILLNGIPGTKIIHGQGLRQGDPLSPLLFILAIDPLQRLLSKATELKLLSKLRGKSVTLCTSLYADDAAVFIKPGKSEVQNFTAILHRFGLATGLRANIEKTQVVAIRCENVDLDEVLQNTPATRASLPMKYLGLPLTTGRLRKADLQLLFDKSAGKMAAWRGRNLGLAGRTTLVKSVLSSQPVYLLIALKVSKESMETLDKQRKSFLWAGSEKLTRGKCKVNWKRTCSPTVYGGLGILNLENFARALRIRWLWQEWKAPERTWIGRDNPCDNTEKTLFAAATTITVGDGETASFWNSAWMQGRRPRDVMPLVYAISKRKNRSLKEGVTDNVWVQDLNFSSPDAITVELLDQIVTLWSIIQSVQLSPDVTDEITWKFTNHGEYTTSSAYKMQFLGSINANYDAIIWKPWAPNKCKIFAWLAIQNRVWTAGRLTTRGWPNNTFCPLCRHTRETVFHLLVDCRYSRRIWENLACWTSQEHIKPGNWAQPASLQDWWTAIATHPGTPRKGNRTLLLLVTWEIWKERNQRIFQRNELSILSLCTKIKEEAKTWTLAGAKRLSEIIP

SEQ ID NO: 163600 - protein, 138 aa, Oryza sativa
  unsure (1)..(138): unsure at all Xaa locations
  Clone ID: PAT_MRT4530_62581C.1.pep
LVFSDXGLDYLGNPXLVHAQXILAVLGFXVVLMGLVQGYRINXLPGVXXSNXLXPGXQXFXPLGLAXKPVTFAETQXXRXIKNGRXXXFSXFXFFVQAIXTGKGPLEKTALTPRQTRPKKXWXXXTXLPGVNPPPLLK

SEQ ID NO: 163601 - protein, 66 aa, Oryza sativa
  Clone ID: PAT_MRT4530_62582C.1.pep
SRPSAPSPSCLSGTNTLPAWRRRRSPSSTATPRRSTPPAAGSPPARCTSAWIAPRSPATSRASRGT

SEQ ID NO: 163602 - protein, 784 aa, Oryza sativa
  Clone ID: PAT_MRT4530_62583C.1.pep
MSSQSLQLLSWNVRGLNSPEKCTALNELIAETYCNLVCIQETKLRAVDDQLARFLGAYRLDSYAFKPSRGTRGGILLLSNSMVISVHSTRIGRYSLTANITVLRCGTSFMLTTVYGPTRHREKDSFLRHIRSLKPPPGNKWLILGDFNLIYRARDKNNNNLNLGRMSRFRAALNRCELKEIHLQNRKFTRSNERRRPTLVRLDRFFCNEEWDLSFDRHILHALSTGPSDHCPLLLTDPSCPRLETTDLNSLNEPFTEDEIKRAICRMPTDKAPGPDGFTGCFFKACWETIKNDVTTAFNAIYNHRCNHLNLLNSANIVLVTKKDGAEQVSDFRPISLIHGFAKIFSKLLALRLQPLMHKLVSTSQSAFIRGRSIHDNFLYVRSMVRKYHRTRRPMLLFKLDISKAFDSVRWDYLLTLLQHRGFPQRFCDWVSALFATSSSKILLNGIPGTKIIHGRGLRQGDPLSPLVFILAIDPLQRLLSKATELKLLSKLQGKSVTLHKTLFAAATTITVGDGETASFWNSAWMQGRRPRGVMPLVYAVSKRKNRSLKEGVTDNAWVQDLNFSSPDAMTVELLDQIVTLWSIIQSVQLSPDVTDEITWKFTNHEEYTTSSAYKMQFLGSINANYDAIIWKPWAPNKCKIFAWLAIQNRVWTADRLTTRGWPNNTFCPLCRHTRETVFHLLVDCRYSRRIWENLACWTSQEHIKPGNWAQHASLQDWWTAIATHPGAPRKGNRTLLLLVTWEIWKERNQRIFQRSELSILSLCAKKKEEAKTWTLAGAKRLSD

SEQ ID NO: 163603 - protein, 97 aa, Oryza sativa
  Clone ID: PAT_MRT4530_62584C.1.pep
FPPKNQSVSSSGFQVLSLFSWASVLDIICYRPKFSRRIHGSSFSLGLTFIRTLQACLPCNKFCARLIVLPLSSALCLVSLALHFFLVNLFLRFFSFK

SEQ ID NO: 163604 - protein, 92 aa, Oryza sativa
  Clone ID: PAT_MRT4530_62585C.1.pep
ILMLHCWWFLEERKKTRTNTILKINKNSTIHSKITTLISLFHAIYNFPSFYPPLLTTSYANDYFTPHRITTSPNPTHSPLLNIFSYISYLYF

SEQ ID NO: 163605 - protein, 198 aa, Oryza sativa
  unsure (1)..(198): unsure at all Xaa locations
  Clone ID: PAT_MRT4530_62586C.1.pep
MIIGNMSERNISTHQIFLFYIYIYIYIYIYIYIYIYIYIYIYIYIYIYIYIYIYIYIYIYIYIYIYIYIYIYIYIYIYIYIYIYIYIYIYIYIYIYIYIYIYIYIYKMKCMVSDQHIYMARKFKIFICXIKFYTTNVCIYIYTCNYMCVSIYIYIYIYIYIYIYIYIYISCIYTLSRAYIHIYIYIYIYIYIYIYTPS

SEQ ID NO: 163606 - protein, 63 aa, Oryza sativa
  Clone ID: PAT_MRT4530_62587C.1.pep
RPVGNLERDPGGDPEDCLGDLRCGGDPSLSAGGDLLNYNWSTLTVDDHDNGESGNANVNETSL

SEQ ID NO: 163607 - protein, 60 aa, Oryza sativa
  Clone ID: PAT_MRT4530_62588C.1.pep
PYSSFLHFSFICCRFLCSFFSMSDLLGHSVKSCSGSLWRSEPHFDGHHSRGIEDDALDIN

SEQ ID NO: 163608 - protein, 124 aa, Oryza sativa
  Clone ID: PAT_MRT4530_62589C.1.pep
YIMVQIETERSMVSRTQKSGAFYFSGELFIGFFSPFFIGQLRFFRPFSSRSPGYLASFVDRRWKHLLFSVVEICFGACVKLALEQTSFIFCYLSIPHKTLFIFCYLSRPHIRSFYWKKNVISSK

SEQ ID NO: 163609 - protein, 139 aa, Oryza sativa
  unsure (1)..(139): unsure at all Xaa locations
  Clone ID: PAT_MRT4530_6258C.1.pep
MDEHKAQVSVREVQGVYAIELGAKRVPLLLVGEYLYSHPPKLAVGGEIPQXLCSAGLTGGMWPIRPCYSAAARKLAVEVLSEGPIGLAGGRSDRTCATGQTGLMRRSDRPLGAGQTGQGTPVRPPLCGRSDRPWSGRTQ

SEQ ID NO: 163610 - protein, 149 aa, Oryza sativa
  Clone ID: PAT_MRT4530_62590C.1.pep
VSPAAAAAAGRGPSAGARGRNRKSEARRDPEPAPLAAMQPPVLLNIGGSRYETTADTLTQRDPGSLLAAALSGAAAHGLPTTEDGAVFVDRDGELFRHVLNWLRDGAVPALADAEYRQLLREAEYYRLPGLIDCISERIEDWDDKIEDL

SEQ ID NO: 163611 - protein, 753 aa, Oryza sativa
  Clone ID: PAT_MRT4530_62591C.1.pep
MSVVGFDVGNDTLVAAAARQRGIDVLLNAESNRESPAAVAFSHNARLLGPHAAGAASSHAPFSSIKRLLLLAGRPTLLPRRGGDLSRLPFPVEASSADGGGGVLVHVDHIGRRIALSPTQLLAMLLGYLRQLAEADLEAPVSDCVISVPCYFTQAQRQAYLDAAAVAGLRPLRLMHDLAATALGYGLYRSDLGGPGGPTYVAFVDVGHCDTQVAVVAFDVSGMKVLSHRFDADLGGRDFDEVLFEHFAEEFRDKYKIDVTGNVKASMRLRAACEKAKKVLSANAEAVVNIECLMEEKDVRGMIRREEFEKLCAGLLERVVEPCKKAMEGSRIGFDRLHSVDPVGSGSRVPAIARILAGFFRREPSRTLNASECVARGCALQCAMLSPTFRVREYEVQDAIPSSIGFCTSEGPISTLPSNALFQRGHPLPSVKVVTLHKNSKFKLDAFYVDENELPPGTSTKIGAFQIGPFQAHTEKSKVKVRIRLNLHGLVSVESAALIDDDQSDAHSADSMEVDSNGEMGQQVDKSRSERLIQLPIVQSIYGAMSNQELLEAQEQESQLAYQDKLMERTKERKNALESYVYDTRNKLSERYRSFATDSEREEISLSLQQTEDWLYEEGDDETEAVYNSKLEELKRLVDPIENRCKDEEVRGQATRDLLKFILDHKTAAKSLPTPEQEAVDSECTKAEQWLRERSQLQESLPKNVDPALWSHEIKKKEHELDMFYRNIVRYKGSPARADSSGGSDHMHTTDRD

SEQ ID NO: 163612 - protein, 78 aa, Oryza sativa
  unsure (1)..(78): unsure at all Xaa locations
  Clone ID: PAT_MRT4530_62592C.1.pep
MASSVFSPFSIYICVLLLCRGSMAQLXNPXTNPWHSPRQGSLRECRFDRLQAFEPLRKVRSEAVVTXYFHENNELFQC

SEQ ID NO: 163613 - protein, 319 aa, Oryza sativa
  Clone ID: PAT_MRT4530_62593C.1.pep
MQPPILLNIGGSRYETTADTLTQRDPGSLLAAALSGAAAHGLPTTEDGAVFVDRDGELFRHVLNWLRDGAVPALADAEYRQLLREAEYYRLPVYEQCLLPPWLCVWGDFDPNAGLIDCISERIEDWDDKIGRSSEAELTRKDVIKCIQADKVRFRGVNLSGLDLSKLDLSEVDFSCGCIEETKFSLANLYKAKFREVQASRSSFNYANLRECEFVGANLQESTLDRANLQSANLQDACLVKCSFIETDLRSAHLQRADLTGANLTGANLEGANLKGAKLSGSNLQGANLQRAYLREVDLRETQLTGAKLGGANLLGAIR

SEQ ID NO: 163614 - protein, 36 aa, Oryza sativa
  Clone ID: PAT_MRT4530_62594C.1.pep
GVYHAVRFVRAYPEFSYLAPFFLSERRRGFKNYFVP

SEQ ID NO: 163615 - protein, 675 aa, Oryza sativa
  Clone ID: PAT_MRT4530_62595C.1.pep
MAPREAPPGLLLRHRRRSVGDCDQRKVQGRAPPRGGRRRAARMSFVSLIGPCMDTVVEPLPEMAADGRGLEFRGIRPGDMLTCQGGSAMLGIGERSADASFSQDTYALKWTFNNDLGLVFVAVYQRMLHLLYVDDLLAAVRKEFSQIYDPKRTSYDDAFNEGFRQLHLEGEARSEEMKKNKQDTGSRPTKATTKTNRGDTQGSGGGRKKGDSGKDDSDGDSGKEHTLPNGNSKMQENSLKDNSHARSVVVKGKENGDPNDGAFDVNKLQKMRNKGNKKNEVASNVAKNTSKANTKKNLKKNRVWDDTPDDKKKLDFTDPADERGDEVIDQVVVKQGESMMDKDDVVSSDSDEEEEDGEENSGASQKKKGWFSSMFKSIAGNNVLEKSDIQPALKALKDRLMTKNVAEEIAEKLCESVAASLEGKKLGSFTRISSTVQTAMEEALLRILTPRRSIDILRDVHAAKERGKPYVIVFVGVNGVGKSTNLAKVAYWLLQHNLSVSLAACDTFRSGAVEQLRTHARRLQIPIFEKGYEKDPAVVAKEAIQEATRNKSDVVLVDTAGRMQDNEPLMRALSKLINLNSPDLVLFVGEALVGNDAVDQLTKFNQKLADLSAVPTTRLIDGILLTKFDTIDDKVGAALSMVYISGAPVMFVGCGQSYTDLKKLNVKSIVKTLLK

SEQ ID NO: 163616 - protein, 243 aa, Oryza sativa
  unsure (1)..(243): unsure at all Xaa locations
  Clone ID: PAT_MRT4530_62596C.1.pep
RKKELLRQRLGFAVDRAHGDGSRERTAEIDPSKTDGRDRTVHDRLTADGHDDVSGDVIDDVSTGGGSAARARKLAGERRRFGTNEGHQHEAGDAANSPVTNATAEDQQTATATRLKRRRRSGXRRRRCSGGQQRLRRGGRGRRCDGDHEDDLPERRRRLERWQRTAGATSTTAAQGLTALGLFRRRETKARVAAGRGDTGDPFKGARRRRRRPTATGDAKERSGLGERETDPNRPRIKHFRSD

SEQ ID NO: 163617 - protein, 174 aa, Oryza sativa
  unsure (1)..(174): unsure at all Xaa locations
  Clone ID: PAT_MRT4530_62597C.1.pep
MLEELLIFTRGGLILWSSCRALGGAALKGSPIDALIRSCLLEERSADASFSQDTYALKWTFNNDLGLVFVAVYQRMLHLLYVDDLLAAVRKEFSQIYDPKRTSYDDAFNEVFRQLHLEAEARSEEMKKNKQVTGFPATKVTTKTNRGDTQGSGGGRKKGDSXKDDSDGDSRKEH

SEQ ID NO: 163618 - protein, 105 aa, Oryza sativa
  Clone ID: PAT_MRT4530_62598C.1.pep
RALSKLINVNSADLVLFVGEALVGNDAVDQLTKFNQKLADLSAVPTTRLIDGILLTKFDTIDDKVGAALSMVYISGAPVMFVGCGQSYTDLKKLNVKSIVKTLLK

SEQ ID NO: 163619 - protein, 58 aa, Oryza sativa
  Clone ID: PAT_MRT4530_62599C.1.pep
TGWEKTFKGALKPPGFATQKPPPPAGPPAPWGALNPKNPRGEPHPKRTLIKTGASKKP

SEQ ID NO: 163620 - protein, 139 aa, Oryza sativa
  unsure (1)..(139): unsure at all Xaa locations
  Clone ID: PAT_MRT4530_6259C.1.pep
MDEHKAQVGVREVQGVYAIELGAKRDPLLLEGEYLYSHQPKLAVGGEIPQSLCSAGLTGGMWPVRPCYSATARKLAVVVLSEGPXGLAGGRSDRACAAGQTGLMGRSDRRCEAGQTGQGTPVRPAXCGRSDRPWSGRAQ

SEQ ID NO: 163621 - protein, 85 aa, Oryza sativa
  Clone ID: PAT_MRT4530_625C.1.pep
MLTREADHREPETHGAKEHHQRGPSHAWAAAGRGRKGQGNRRSDGVERGWDSLYWAVTFAEAYSSEAAEATGAAQRPGAEGGQRL

SEQ ID NO: 163622 - protein, 169 aa, Oryza sativa
  Clone ID: PAT_MRT4530_62600C.1.pep
MCKSLANCSSALETELAACVEGLRLALQWTLLLVAIETDCISVVHLLTNKEDCLTLAFLVREARWLRSGERTTSITKIQREQNLISHELANKARRDDYSGFWAGFESNSVSWLIEKDFHEKVKGCLKDVPMEWAVSPGDIWLLTNFAKSHIRQGVAATKCVVSKILATT

SEQ ID NO: 163623 - protein, 46 aa, Oryza sativa
  Clone ID: PAT_MRT4530_62601C.1.pep
FFFFFKNKQIIFIHFILIAHMKSRRLVSSFGHHPSQVEKNIIIQNT

SEQ ID NO: 163624 - protein, 81 aa, Oryza sativa
  unsure (1)..(81): unsure at all Xaa locations
  Clone ID: PAT_MRT4530_62602C.1.pep
TVYRRVYGRSLNTLRKFISKSTNGKVPTHIGLGRHYIVXGPMSPSPTWRPPDLRYKRDPPGRPRASNLIANMVGSTCQARR

SEQ ID NO: 163625 - protein, 55 aa, Oryza sativa
  Clone ID: PAT_MRT4530_62603C.1.pep
KQVELLFYVASIHLGSPVKLSTSSEVSVIISSVSVSMKIGDISVLCRVFYSSVIL

SEQ ID NO: 163626 - protein, 279 aa, Oryza sativa
  unsure (1)..(279): unsure at all Xaa locations
  Clone ID: PAT_MRT4530_62604C.1.pep
MMMSMRVGVIGPSAYSVDGAADGLAEVDIVAGGDLVGDEVACFWGNKITHLKLPPPLLPAPPPSSSPSCPAAAAPPPRXPRPSPPSPSPTPPPPSAGAPPPRRAALPPPSSPPSSSLTPPPPSAAAPPPRHRXPSPPSPSLTPPYPXPPPLDVSRDLAPLSPVSLHPPGRHSFPTQTLDPYPPLRRAAFPHRRSGPAPASERGQPLASTTFPCLRPPTPSHLQLALSCGHMPPPAAVAAGSPSPFLLFRWLWRRRGHRRAAAGSPPPLPPNLVEGRALP

SEQ ID NO: 163627 - protein, 264 aa, Oryza sativa
  Clone ID: PAT_MRT4530_62605C.1.pep
FVFDGEPPDMKKKELAKRYTLNSDCTSEAAFMLQVGDEDLIEKFSKRTVKVTKKHNEDCKRLLSLMGVPVVQAPGEAEAQCAALCENHKVFAIASEDMDSLRWRASCLICHSTGLSFKRSAVTEFEVSKVLEELGLTMDQFIDLCILSGCDYCENIRGIGGQRALKLIRQHGYIEEVVQNLSQTRYSVPEDWPYQEVRALFKEPNVCTDIPDFLWTPPDEEGLINFLAAENNFSPDRVVKSVEKIKAANDKFSLGRATPWPSAS

SEQ ID NO: 163628 - protein, 121 aa, Oryza sativa
  unsure (1)..(121): unsure at all Xaa locations
  Clone ID: PAT_MRT4530_62606C.1.pep
ETSYLEEHDKLQHQISSARSNRRVRGRWTHYLRVKMAKGCXAELNDTRLRGVMATNRVATAALLIDGGDTVTVEDIATVIPNCLRHLLRKDPLVLIDSGLLVVEKLYEALHLNYTGGNWIS

SEQ ID NO: 163629 - protein, 1116 aa, Oryza sativa
  Clone ID: PAT_MRT4530_62607C.1.pep
MAGTISRIRLENFMCHSSLHIELGQHVNFITGQNGSGKSAVLTALCIAFGSRAKSTQRAAALKDFIKTDCSYAAIIVDINNQGEDAFKPEAVVSLILPLPFIKNLRLVNQFEDGQEGCSDGEAGAPVKLMDVVFTGRKVAHRKDDLIEIIEHFNIDVENPCVIMSQDKSREFLHSGNNKDKFKFFFKATLLQHVNDLLLAIRELLDNADSVVQELEKSIKPAMMELDELQQKIKNMEHIEEIAHEIDNLKKKLAWSWVYDVDRQIEEQTVKLLKLKERIPACQEKIDGHAAMIVKLKEELTDKERNARSLVEKSREVTMMKEKLEDDIAQAVALKIELEREHVRGTNVLKNMNNRVKQLQKQIHDFREQYIQYTQDESSKAENDKCEIQKEINSLHSNVTRLKEEERGLHETQMGIVKSIQNMETEIVENRKKITQFKAHIRDLQQRQSDKVSTFGGQRVRNLLKSIERQERRFNIPPLGPIGVHVGGSQITLSQHEINAVPLVKLHILLAIECALGRLLDAFIVSCHRDSVILRECAKEVNYHNLQIIIYDFAKPRLNIPDHLLPSTTHPTVLSVIQSENPTVLNVLVDQGSAERTVLVRDYEVGRSVAFDNRIQNLKDVYTSDGYKMFSRGPVQTILPPHRKGNAGRLCTSLGEKIAEMESEIADMERIISQRTRDMKKPNDKREDIELKIKNLKRKRVEEERLLESKKVQLDASGKTSADINRVTSSDTSELEAEMMQVEVDIEQKELLVQKTNLRLTKALQDENDRRACYKEFIDGVYREVGPSNVLEKEIERVKDKLQTAEQGKAYYEGIMETKVLPDIKIAEAEFEDLQKLQQESFKKASIICSESDVETLGGVAGSSPEQLSATINKLELRFHKESSRYTESIDDLRALHIKKKEKIEDKQQLYAGFRDKLNSCQKALDMRWKKFQRNAALLKRQLTWLFNEHLGKKGISGFINVDYKERLLSVELTMPQDSSRDTITDTRGLSGGERSFSTLCFTLALHGMTEAPFRAMDEFDVFMDAVSRKISLDTLVDFAVTQGSQWIFITPHDISYKPHLGCILPFLNRFSSFMRMLFKLLKLAWFMDIFALGLTCQIQSEKSLSGSNRSILPPG

SEQ ID NO: 163630 - protein, 317 aa, Oryza sativa
  Clone ID: PAT_MRT4530_62608C.1.pep
MEIMMMGLSVEGFTLPPVTAVTGRTAGGRCALLRRGDEDCRARSAASVPAWLISARVEMAESRDLVWEHGEDFAPGWRCKYCHQRKKGGGATRLKMHLGHKGKGVTYCNSVPPDVRDFFKRELERIKQTGDKRQNDSNRRVEAAGVNYYDLTEENFRSHVEERGGTYEHGGGSGSAQLEARKGRSNPITSMLRRATSHRESPAVRDYNLASAKFPVQTRIDIGFFTKKGKQARQAIGESWARFFFTAGIPGRNADNPYFVSAVRETQKWGGPFHTVYHLDPQERFEDIGSDTEQSVYVKINLIGIFHKSQDRSFLKE

SEQ ID NO: 163631 - protein, 412 aa, Oryza sativa
  Clone ID: PAT_MRT4530_62609C.1.pep
APAALVGPSLQVLTALSDQNNKRIVLALQSGLKSEILWALNALTVLSFKEKDDLRRDTTPLAKVPGLLDALLQVIDDWRDIAMPKDHTKPPRVRTLGVNTTLSGFGHENVEKVYSDTTTPSDDQTKTADSTVTKKRSAGFLFDEEGLFNVDDEGRTEKQQCAVAASNIIRNFSFMPENETVMVQHRHCLETVFQCLEDQNTEDDELITNMLETLVNLAPVLDLRIFSSSKPSFIKITEKRAVQAIMGMLASSIRVWHCAAAELIGRLIINPDNEPFLLPAIPQIYKRLVDLLSVPAVDAQAAAISALYNVAEVNMDFRLKLASERWAVDRLLKVVKTPHPVPEVCRKASMIVESLVSEPQNRMHLLVHENTFSEILTSEGKYSDTFARILYELTARPSNKVTAGQAIWGNIN

SEQ ID NO: 163632 - protein, 65 aa, Oryza sativa
  Clone ID: PAT_MRT4530_6260C.1.pep
LSSSLSSSPSIIAVRSIALLGSLQRPTQSSVSFLCNQYLLLHIRRYEGKDNNRSIHPTSKNMEQC

SEQ ID NO: 163633 - protein, 1354 aa, Oryza sativa
  Clone ID: PAT_MRT4530_62610C.1.pep
MASGKVVSFVGADELGVSLAASFVRSGAIVRCFVAPGGDGSATALAELGGVRCASPAEAARDAELVIVLSDTDGVDELFFGPEGIVKGLCSGAVVLIRSTMLPSHLEKLNQKLADEKKNALLDGYIFSGLSDELKQKIVVVASGRHDVTERTGQFFSGLDTAVYFVEGEFGSSSKIKLVNDLLESIHFIASIEAMFLGVRAGIHPSIIYDIISNAAGSSRIFVEIVPKLLREDSLLIDYLESSKTNAGYVMDMAKAVIFPLPLVAVSYQQLIHGCSSANGDALVSPLKVWEQSFGVNIIDAASQQIYDASKLADQLVMACKTAKTIGFIGLGAMGFGMASHLLKSGFSVIAYDVYKPTLARFTDLGGLTKDSPEEVSKDVEILVIMVANEVQAENVLYGNAGAVSVMAAGTSIILSSTVSPGFVIKLKERLEAECRDIKLVDAPVSGGVKRAAEGTLTTNMQKLVHDCSIFYVTALSEKLYVIKGGCGAASSVKMVNQLLAGVHIASAAEAMAFGARLNLRTRRLFEIIQHARGYSWMFGNRVPHMLDNDYTPYSAVDIFVKDLGIVSHESSNARIPLHVSSIAHQLFLSGSASGWGRFDDAAVVKVYETLTGVKVEGRPPMLNKEDVLSSLPAEWPEDPMDDLVSSASHNSKKILVVLDDDPTGTQTVHDIEVLTECAISLTWKLNCRPVEALAEQFQKLPACFFILTNSRSMTAEKATLLVKDICRNLEAAAKSVPGVSYTVVLRGDSTLRGHFPEEADAVVSVLGEMDAWIICPFFLQGGRYTIDDIHYVADSDRLIPAGETEFAKDAAFGYKSSNLRQWVEEKTKGRISENQVSTISVNLLRKEGPNAVCQHLCSLKKGSACIVNAASERDMSVFAAGMIQAELKGKRFLCRTAASFVSARIAIKPKPPIRPTDLGLKRALTGGLIVVGSYVPKTTKQVDELRSQCEQSLRIIEVSVEMISMKSAEDRDHEISRVIELGNAYIQSRKDTLVVTSRQLITGKTPEESLEINYKVSSALVEIVRGIGSRPRYILAKGGITSSDLATKALEARRAKVMGQALAGVPLWQLGPESRHPGVPYIVFPENGGYAIGAFNVYNLEGIDAVVSAAEAEKSPAILQVHPSALKQGGVPLVSCCIAAAEHASVPITVHYDHGTSKSDLLQALEMGFDSIMVDGSHLPLGKNILYTRSISSLAHSKGMLVEAELGRLSGTEDGLTVEEYEARFTDVAQALEFIDETGIDSLAVCIGNVHGKYPPSGPNLRFDLLEDLRALTMKKGVSLVLHGASGLPHELVKECIALGVRKFNVNTEVRNSYLESLKRPEKDLIHVMASAKEAMKAVVAEKMRLFGSSGKA

SEQ ID NO: 163634 - protein, 760 aa, Oryza sativa
  unsure (1)..(760): unsure at all Xaa locations
  Clone ID: PAT_MRT4530_62611C.1.pep
MVISRTLVVRGFDELWETIRPVLVSSDGPASMSKNGLLLVVSEEFWIGKVWWVSGDRIWGLEMKEVGEVEEVRCLDPQLWHACAGGMVQMPAPRSRVYYFAQGHAEHADGGGGAAAAAAELGPRALPPLVLCRVEGVQFLADRDSDEVYAKIRLAPVAPGEAEFREPDELCPLGAAGDAAEPSPEKPTSFAKTLTQSDANNGGGFSVPRYCAETIFPKLDYRADPPVQTVLAKDVHGVVWKFRHIYRGTPRRHLLTTGWSTFVNQKKLVAGDSIVFLRTRHGELCVGIRRAKRMACGGMECMSGWNAPGYGGGGFSAFLKEEESKLMKGHGGGGYMKGKGKVRMADVVEAASLASSGQPFEVAYYPRASTPDFVVKAASVQAAMRIQWCSGMRFKMAFETEDSSRISWFMGTISSVQVADPNRWPLAPGKRAPVTWDEPDLLQNVKCVSPWLVELVSSIPPIHLGPFSSPRKKLRVPPHPDFPFEGHLLNPIFHGNPLGPSNSPLCCYPDTAPAGIQGARHAQFGLPLTDHQLNKLHLGLLHSGSFNRLDAITPPSRISKGFVVSSAPAHDNISCLLSISTPQVAEKSDDRKTTPHIMLFGKAIFTEQQITSSGSTETLSPGVTGNSSPNGNAHKTGNASDGSGSSICIGFSSQGHEASDLGLEAGHCKVFMESEDVGRTIDLSVFGSYEELYGRLADMFGIEKEEIINHLHFRDAAGVVKHPGEVPFRXFMKAARRLTIIAGDRERIERPLIECLVEQA

SEQ ID NO: 163635 - protein, 138 aa, Oryza sativa
  Clone ID: PAT_MRT4530_62612C.1.pep
FPSQPHEDSVQALISSQLEVGRPGYMHGTSSTQDVHFMNATERHICHSINLNIYEFRSEKSPRSSKPFSAHFDYIMMRMLGPDHPIGIDNYQFGGNLTHTLEPRNRSTTSPLVINRAKTVDLAEKADPCKRIEEHKCI

SEQ ID NO: 163636 - protein, 455 aa, Oryza sativa
  Clone ID: PAT_MRT4530_62613C.1.pep
MDWLSANLQVNPQVTVHGDWVSAVMPLMKLLCLTVIGLVLSNPRTQIIPKATFKLLSKLVFALFLPCLIFVHLGQSVTIQNILDWWFIPVNVLISTAIGCILGYIVALICRPPPQFFRFTVIMTGFGNTGNLPIAIIGSVCHTTDHPFGPGCHRKGVAYVSFAQWVAVILVYTLVYHMMEPPMQFYEIVGEGNEIVEEPAQISNYSRSLLHEAEWPGMADKETEHSKTPFIARVFMSISGSSQNTFPDIDFAEEGTSGAGPSSPKSLRCLAEPKVVRRIRVVAEKTPIQHVLQPPTIASLLAIVIGMVPLFKDFVFVPDAPLSFFTDSLEILAQAVVPSVMLILGGMLAEGPKDNALGIRTITGIIVARLLILPCIGIGVVLLADRLHLLVEEDHMYRFVLSLQYSTPSAILLGAIASLRGYAVKEASALLFWQHICAVLSLSIYLIVYFRLLTI

SEQ ID NO: 163637 - protein, 89 aa, Oryza sativa
  Clone ID: PAT_MRT4530_62614C.1.pep
CEGWICGDLMTPSAPSPCRCIVDKLIMSTLSVCDCGRIHMIRGPLISLTPFFFCPFIFYFLLFCSSNMYIDVAPCEGMMVRRRHRSSSF

SEQ ID NO: 163638 - protein, 105 aa, Oryza sativa
  Clone ID: PAT_MRT4530_62615C.1.pep
MIVLGCLCARWPVCAEEQTIVFFFSCISAVSLASCPLDPYQSLLPLSSFFFCFFFPPPPCTKCSACVDRKFYGAIISLPDGQICEERIAYSDGAFLACGDQKKNK

SEQ ID NO: 163639 - protein, 57 aa, Oryza sativa
  Clone ID: PAT_MRT4530_62616C.1.pep
FAPFLGLFFGIYVSYACVLFSGLSPLLRFWVVLSAINAGWGCSSLQTSTKCFIVEFF

SEQ ID NO: 163640 - protein, 69 aa, Oryza sativa
  Clone ID: PAT_MRT4530_62617C.1.pep
AAQTQTSASQASAQGSAHDRLVLAQGKLSKQRHPLGLQGHPPKTQSFLCKLGAARSHLGAAVYEALSSP

SEQ ID NO: 163641 - protein, 115 aa, Oryza sativa
  Clone ID: PAT_MRT4530_62618C.1.pep
ELDEAPKEELAAVLGEPDRMTELIGGGGQAGPKPNLAASILVLEEEGRRKWSWGVEELEVQVAGRLAGGAQQVSIGEIAALRGRSLLQICLLDSRGTRRSAVWSVTWLTARVLPD

SEQ ID NO: 163642 - protein, 67 aa, Oryza sativa
  Clone ID: PAT_MRT4530_62619C.1.pep
HCVFHGMLRVLIVVDQTVAMTAVAASRLVETQLLDIQSDTANGLSVNLVCELLDVVAELLLHYLSLR

SEQ ID NO: 163643 - protein, 50 aa, Oryza sativa
  Clone ID: PAT_MRT4530_6261C.1.pep
SSNSLESAKVAPEPTTEGMQLKERLGSNFISGMNQGPDPWDADVGQLHPS

SEQ ID NO: 163644 - protein, 60 aa, Oryza sativa
  unsure (1)..(60): unsure at all Xaa locations
  Clone ID: PAT_MRT4530_62620C.1.pep
LVVVGVAAWYKEVRVRDEEVPLRWHRPHVSXSLRWRWXVGLAAGLAGEVAAAFVCHIVYR

SEQ ID NO: 163645 - protein, 58 aa, Oryza sativa
  Clone ID: PAT_MRT4530_62621C.1.pep
MHALFLVFLPVKTEGSSITVEVEALVIQGPKLGTVLSQVKKLDASVLVLSQCKPSPFC

SEQ ID NO: 163646 - protein, 45 aa, Oryza sativa
  Clone ID: PAT_MRT4530_62622C.1.pep
MERGGPCDGLCRFRIHLEFEYVSDGGFSENTARMLQQVPPNSSTS

SEQ ID NO: 163647 - protein, 105 aa, Oryza sativa
  Clone ID: PAT_MRT4530_62623C.1.pep
KFVAVVKEAIKKQRDDNPDGDEMVRRFKGSRVKPAMEKRSEEDHPPPREMARRNNHVIEEARSKLLEKRQSTRVKALVGAFETVMDAKPPGEGAPPKPQPYPPRR

SEQ ID NO: 163648 - protein, 77 aa, Oryza sativa
  Clone ID: PAT_MRT4530_62624C.1.pep
GVDWGRVAPDHFIQGQGGCSPQLCLGCGTGYGVVQALFSTWGKRLPWDIPKLRENYRGRNLGRHTLMVLPWIQRTHP

SEQ ID NO: 163649 - protein, 42 aa, Oryza sativa
  Clone ID: PAT_MRT4530_62625C.1.pep
FFLSSRARGTFSPILNVIVLTQHPFALFVTFVLRSITHIESS

SEQ ID NO: 163650 - protein, 176 aa, Oryza sativa
  Clone ID: PAT_MRT4530_62626C.1.pep
MVATIPLHLRWRIDLVHCLCGFVPTTSSEASITMSNSGSGTSNIKDEIDAAFAAGAMPPEWRPRLLASQRLGEGDVDRIAAAIAEVHATYQYVGSTKGNIGYVAFLFVLGVLFLCVAGLFFRENNYLNGALAVLVAVAFIVIIPMIILLYEFHRWRANMLMAQTRTVLERFLLPPV

SEQ ID NO: 163651 - protein, 818 aa, Oryza sativa
  unsure (1)..(818): unsure at all Xaa locations
  Clone ID: PAT_MRT4530_62627C.1.pep
MADTRGELGDPVTDQQLVLAMIGGLNPKYEILQTIIPLQCPFPMFVEARIELPLSLALDRPGPLLSTPGSARFKCGWAARCCVLQGFWALGPLLLLRAWQCPVGKLPSRSRTQFATPIRNIQCDNGHEFDNSAARSFFLTNGVAMRISCPHTSPQKGKAERTHRSLNNIVRSLLFQAHLPGSLWVESHPTKTLAQHTPYFALHGVHPSYTHLCVFGCRYPNLSATAPHKLSPHSTKCVFXGYPSERKRYRLQLAPIARGRLPPLLLGPPAHASIGRPLPACRAGLGASLLGRHLRPHLRRPMGSLXRASFSGSPSPLAVPTCARSARALVTWPPVTGFGISPIDNNHAMVTRGKAGVRVATSRLNLHAATLSLIPRTYHAALADTNWRDAMQEEYSAPMSNCTWDLVPLPPGTNIATGKWIFRHKFLADGSLDRYKARWVLCCFSQCPGIVFDETFSPIIKPATVCTVLSLAVSRNWPIHQLDVKNAFLHGTLAETVLCMQPSGFVDPAQPNSVCRLNKSLYGLKQAPCAWYSRFATFLRSVGFVEAKAYTSLFICRRGGDVAYLLLYVDDIVLTASSTSLLHWTISSLQSEFSMKDLGELHHFLGVSVSRHSFGLFLTQRQYGLEILERVALKRILRYVRGTLDLGLHIRHSASHDLVVYSDTDWASCPDTRKFTSGYAVFLGDNLVSWSSKHQTMVSCSSAEAEYRVVANAVAETCWLRQLLHELHAPPVKATLVYCDNVSIVYLLTNPVQRQRTKHVEIDLHFVREKVAIGSVRALNVLTHYADIFTKGLPTPVFTEFRSSLNVCSNDVQSAGAC

SEQ ID NO: 163652 - protein, 985 aa, Oryza sativa
  Clone ID: PAT_MRT4530_62628C.1.pep
MPFMPRRCLFSMSRCLSPSSSTLAPQITKYALTDHVLSDDAFPHHASWARTDCVVLSWLYGTIATDLLETIIQPDGGGNTQGGGGNNKNRCRRNGNGGGTAGGNGGAAQGTCGQSVGQAAPQPRAGQAWPTPQHPWVGTIQMWLGGPMLRAPGILGPRPTSPFAGVAMSGGQAALPQPVSQAGPYLPAGLTQQQQQLQPSAQPTSCLVSPNIIKNLISVCRFVTDNNLSIEFDKFGFTMKDLLTRTVIARTQFATPIRNIQCDNGHEFDNSAARSFFLTNGVAMRISCPHTSPQKGKAERTHRSLNNIVRSLLFQAHLPGSLWVESHPTKTLAQHTPYFALHGVHPSYTHLCVFGCRYPNLSATAPHKLSPHSTKCVFLDTLANAPIGSNRSGKAASTSLGPTGACIDRPTPPCLPGWAGRLSPGPAPAASSPTAHGVSTLGPASPARSAHDDAILAHDGAPHVHDGASSLAHDGAPSPAHDGASSFGISPIDNNHAMVTRGKAGVRVATSRLNLHAATLSLIPRTYHAALADTNWRDAMQEEYSAPMSNCTWDLVPLPPGTNIATGKWIFRHKFLADGSLDRYKARWVLCCFSQCPGIVFDETFSPIIKPATVCTVLSLAVSRNWPIHQLDVKNAFLHGTLAETVLCMQPSGFVDPAQPNSVCRLNKSLYGLKQAPCAWYSRFATFLRSVGFVEAKAYTSLFICRRGGDVAYLLLYVDDIVLTASSTSLLHWTISSLQSEFSMKDLGELHHFLGVSVSRHSFGLFLTQRQYGLEILERYAVQQICLHMHDPRESHLIALKRILRYVRGTLDLGLHIRHSASHDLVVYSDTDWASCPDTRKFTSGYAVFLGDNLVSWSSKHQTMVSCSSAEAEYRVVANAVAETCWLRQLLHELHAPPVKATLVYCDNVSIVYLLTNPVQRQRTKHVEIDLHFVREKVAIGSVRALNVLTHYADIFTKGLPTPVFTEFRSSLNVCSNDVQSAGAC

SEQ ID NO: 163653 - protein, 166 aa, Oryza sativa
  Clone ID: PAT_MRT4530_62629C.1.pep
MATAVERRRGRRLMGRRTWRRWREEAMRRRGLMASRQRRVEARRRDATHWRRGRGRRTVMEGAHKAPIAGEADGDEGGSQAGVETWAGEKAARAAKKGFDGGSGEGDGAGGGGDARTGDGGGEGDERRRSRKHRSGTHTNRGRDKDYLLPTPERAGRDIYMHANID

SEQ ID NO: 163654 - protein, 475 aa, Oryza sativa
  Clone ID: PAT_MRT4530_6262C.1.pep
MPPPPPTPPPSPPVRVVSTRTVKPSRPRPRERIPLTTWDVSLLAADYIQKGLLFRPPPATLHLVEHLAAALADALHVYYPVAGRFATDKHPGGGCSVSIDCDGQGAQIVHAVADGVSTADILPPDVDVPSGIVRSFFPLDEAVNYDGHELPLFVVQVTELVDGGVFLGFVYNHALSDGTAFWDFLNAWAEIARAKLENAVATSRAPLLERWSPDGGAAAPVVLPYDDLAGLIARTTTTTPPLLRERMLHFSAESLAALKERARWELLAAGDAAGAAAVTRFQALSSLLWRCVTRARRLAPGREVVFRASVNSRGRLRPPLPPEYFGNSILPASTEAVPASELLARGHGWAAAAVGPAVAAHTDERIRSRSAAAPSVSAFRLFDASGVVVSSSPRFDMYGCQLWWGKAVAARSGKGNKYDGKVSLFPGRDGGGGGGIDAEVELAPEHMAALEEDGEFWAAVTPDHLLLVNDNNDKA

SEQ ID NO: 163655 - protein, 283 aa, Oryza sativa
  Clone ID: PAT_MRT4530_62630C.1.pep
AVCKLQTPPKNPPKPKGKRKKITLRSRVAHDTTEPAKPPIRHPAAPAIYSRVAARPPALVLARVRKGEGGDRPAMDWSAVTAEDLVDALREVDWSTPPRPVPEFFSRFTVPRSYSKWTSRLKCNLYYYRTNYFILIMFILGIGFIWKPVAILAAFMTGISIAFLNDSFAVTFNEKVTRTVRQFSPHLAAKMRPPITPVLRGRPSSKRSIHICGRPRWLFVLLFSAVSCMLWLTSCSLLTVLWALLIAIFATLLHASFRTPNLKARLNTFREEFRAVWRNYSEL

SEQ ID NO: 163656 - protein, 203 aa, Oryza sativa
  Clone ID: PAT_MRT4530_62631C.1.pep
TGRVTTVEAKVLFFVLLIIAFLLDLSLNQYAFLLSFVAVALAVIYPFMKRFTHLPQVVLGMAFGWTIPMAYGAVIEDLPLTCWLLFLANILWTVAYDTQYAMVDRDDDLRIGVKSTAILFAQYNNKIIALLQFLSLILFILFGWLSEYHIGYFIVLALTSTLFIYQCWLTKQRVREQCFKAFLNNNYFGFGIFIAILVGIYGF

SEQ ID NO: 163657 - protein, 384 aa, Oryza sativa
  Clone ID: PAT_MRT4530_62632C.1.pep
MKNFKKLETAYFLTRSKLAKQVGNPVSSCHQVVKRTTGSPVVTEGSSIDDFALEGHYGTRQRGFDRDKEFFATAGVNKKIKVFEYNMIVNEHCDIHYPVVEMSNRSKLSCICWNSYMKSHIASSDFEGIVQVWDVTRSQVFVEMREHERRVWSVDFSLADPTKLVSGSDDGSVKLWNMNQAILFLHLAGSVGTIRTRANVCSVQFQPDSARSIAIGSADHKIYCYDLRNIRAPYCTLVGHTKTVSYVKYVDASTIVSASTDNSLKLWDLSMSQARIIDSPLRTFTGHTNTKNFVGLSISDGYIATGSETNEEYFGSLTLVRKVFVYHKAFPMPVLAYKFSVTDPISGQEIDDPSQFISCVCWRGQSSTLLSANSSGNIKILEMD

SEQ ID NO: 163658 - protein, 770 aa, Oryza sativa
  unsure (1)..(770): unsure at all Xaa locations
  Clone ID: PAT_MRT4530_62633C.1.pep
MEGSRVDAGAGGRRWGEGEEGGRRGRGGGRGGGGGGTGGGGGGGWRRGGDDGGXVSLREWLDRSGRAVGAPECLYVFLKLDESEEIEHAQGGALGRARPSSVVGWSPFARVSFIESACGSDVSGSCSSSDRNKEAXPEPLTPRRRWXSPALYFTFETMEEKMRAIANLRHRVFPSQLLLMCPXQASFCQLLMHPVPVTRPKMSDMLQSEFLNRSRNSLEEREAALRLREDIEEQELLLDFLLQLQRRKQDIADNLQDTVAFLSSDINEAHQQSALGQCGNFSFELDKEVCSETVEDQSDCGSRKRFRPELPAVDMEEQNRSLEECSGTVPSSVLIQESVLSKSSRLMKNFKKLETAYFLTRSKLAKQVGNPVSSCHQVVKRTTGSPVVTEGSSIDDFALEGHYGTRQRGWMNSFLEGLCSYLSFSKLKVKAELKQCDLLNSSNLVCSVGFDRDKEFFATAGVNKKIKVFEYNMIVNEHCDIHYPVVEMSNRSKLSCICWNSYMKSHIASSDFEGIVQVWDVTRSQVFVEMREHERRVWSVDFSLADPTKLVSGSDDGSVKLWNMNQAILFLHLAGSVGTIRTRANVCSVQFQPDSARSIAIGSADHKIYCYDLRNIRAPYCTLVGHTKTVSYVKYVDASTIVSASTDNSLKLWDLSMSQARIIDSPLRTFTGHTNTKNFVGLSISDGYIATGSETNEEYFGSLTLVRKVFVYHKAFPMPVLAYKFSVTDPISGQEIDDPSQFISCVCWRGQSSTLLSANSSGNIKILEMD

SEQ ID NO: 163659 - protein, 283 aa, Oryza sativa
  Clone ID: PAT_MRT4530_62634C.1.pep
MASPRLKREQSFDFEEASAQEAVGSASASYSPPGGGGVFGISPPESSPRDGRKRRKDRPSLVKHTFTPHFDGHLWRKYGQKNIKDSAFPRLYYRCSYREDRQCLASKLVQQENDDDPPLYRVTYTYEHTCNTTPVPTPDVVAEQPPPGAAGDAYLLRFGSSAGGGGGGAHQQQTERERQQQNTARRRPFMMLSFDSSSSHQLHEQPHAFPPDGQLPATAAAASPSSFTAAEALAAPPLTTTMNDGGDLFSTWDALRYGLDYDHGHLGNHVYLPDDCNGGDDNY

SEQ ID NO: 163660 - protein, 40 aa, Oryza sativa
  unsure (1)..(40): unsure at all Xaa locations
  Clone ID: PAT_MRT4530_62635C.1.pep
FGASSKDSAMPLNVFSNHVAGHSISENSHSVLPRKXTXPS

SEQ ID NO: 163661 - protein, 119 aa, Oryza sativa
  unsure (1)..(119): unsure at all Xaa locations
  Clone ID: PAT_MRT4530_62636C.1.pep
AAEIAPYVMASSATSVAPFQGLKSTVAMRVARRSGNFSFGNVSNGGRIRCMQVWLIEGIKKSVTLSYLAALTVEDLLXXIEYLNTSKREPCLEFSKDXFVNRENHISXXXYDSKIWTIW

SEQ ID NO: 163662 - protein, 71 aa, Oryza sativa
  Clone ID: PAT_MRT4530_62637C.1.pep
HTTAYLHIRVQKTPIAILEIKLRHLESERYVSYTNKMYDNNNDDIVWIYKWLLVSINLRHFMYHQSFISYQ

SEQ ID NO: 163663 - protein, 76 aa, Oryza sativa
  Clone ID: PAT_MRT4530_62638C.1.pep
ASVTRPPTLLTRNRSRAVTLESLRLHHQLHVTDSDYCRANRHRIKWRSVYNTGTATTAVTTKVIAYRDTFPCSELN

SEQ ID NO: 163664 - protein, 132 aa, Oryza sativa
  Clone ID: PAT_MRT4530_62639C.1.pep
MANSNGDRSQPPPTPSVNLPHSLTASYSPSPSALIGGLLASTDNRAQPSALLLPAGRLLNKGWMVAEERLDLACWGAGRDGHRQRLGCMSGTQAEVREDDGHGPPWRIQEALGCSSIYGAHDIGNAWSRATN

SEQ ID NO: 163665 - protein, 60 aa, Oryza sativa
  Clone ID: PAT_MRT4530_6263C.1.pep
QLRSTTLLKRGNNSKAEYNHRTQQATLTMQTCKGIQGRFVAICIKAVVKHFIEQNGKTVE

SEQ ID NO: 163666 - protein, 88 aa, Oryza sativa
  Clone ID: PAT_MRT4530_62640C.1.pep
YPHEPTNGGSNAQTTPPVPPIPPPRRASGATASAGHTWRRRRRRRRRRIPRHGKASPPHLAARETRVRGSFRKMRDRYVLAVHASLSG

SEQ ID NO: 163667 - protein, 722 aa, Oryza sativa
  Clone ID: PAT_MRT4530_62641C.1.pep
MMPYSSGDRGLPQPAPAPPHAAMSWPSAALLFAVDRHRLAEHYPNPTALDPLARGPTSPPPHRTTRLRRNLRRAPCTPLSRRRGTANTDGFLFSDSALHNVYPEDQFSSIKQLHPWIPSTTGRSSWLEEKIPVIHQRTSAAASSEIGSSVLHKPSLFPSIIDCFDKEPVPIHQSDGRYSYDSHLSHLTSCSTSLNYGLSMPSVAASPVVCGMKRIDPSPSDPVLKGRFLQYANPCRFNIGHFDSVQDEQKDHAGFQTAYRHCSDWNRCTNDTGIVGNYLANSSGETCNVGENSITGRFSQEILCSEVPMSRVQEPLSHHHSLVQEDLNAFCENITYRCNYHAELIKSMYNLSVALISSCNGDYELDESYQELIQSAIQNLSSLSPKRSKNLSIEENKSGNDKDAHVLAYKNLWIEAEASMCKLKYELQLARMELALKYHSQQSGAPPTIPLDVQDSSLSKSKSLLCDEVLDDPSKQQNHVKENTICSATLLPEEGNTGDGQSPKVNRSIANEVEAGVFTQLRVLRSRGDSICSFGEGSDEEQQETSNNKKTNGFDNTAAVSMDTLKSGDDSMNSVVVEPIKERVESSKTDVDTAAPFYSFVKRLSGSSSSSDVDFDKFLSSIKKQTDVTVMARHKDFVCDKGNIRSLDDTTNQCQAASNTKQLEDDALRFFQSLKIPEGIPEDHSDDGSSDSDYYQTEHYPLRVEPGRLLFIHKVLGSGKEW

SEQ ID NO: 163668 - protein, 53 aa, Oryza sativa
  unsure (1)..(53): unsure at all Xaa locations
  Clone ID: PAT_MRT4530_62642C.1.pep
TPWFGRTWGRPNPAQFRLAASSVASIRXLVNFGPILCINSEFLAHSYISLVLD

SEQ ID NO: 163669 - protein, 164 aa, Oryza sativa
  unsure (1)..(164): unsure at all Xaa locations
  Clone ID: PAT_MRT4530_62643C.1.pep
MTAAEVSITCADRSAEPRRARWRAGGEAAGAGTSAAMVAEAARTSSRSLMGGPEYHGDSAAAAAISASSVISTSSTMTTTSPPSALSSSLSSIGGSFRAMQIRNLSDFYLHCHSVLDPRTLAAAAATVFSCSDCDEVFVKPDSLDSISIVXFDLSELGQDDTSM

SEQ ID NO: 163670 - protein, 92 aa, Oryza sativa
  unsure (1)..(92): unsure at all Xaa locations
  Clone ID: PAT_MRT4530_62644C.1.pep
FFSDCDALPSLGTSGYAFTRMRXVFAFLAQTSHETTVGWASAPYGPYLWGYCFKEENICIVGCVCCVQSLYLYVRFCNGSLRFTLRPYYPLF

SEQ ID NO: 163671 - protein, 142 aa, Oryza sativa
  Clone ID: PAT_MRT4530_62645C.1.pep
RVPAAALAPGGRRQAGGAGDAEAVGAAGDRDPRRRERSRSRSARVHQPPGHPLVAGVRRVEQVQLPRRRWQRRRRRRRRRRRGRAHDTPPAGEARGVRLPPADAVGEGRRRRRRQEAAAQPRPALPPPPRLPRLRRRALRTV

SEQ ID NO: 163672 - protein, 139 aa, Oryza sativa
  unsure (1)..(139): unsure at all Xaa locations
  Clone ID: PAT_MRT4530_62646C.1.pep
DSARARAEFGTSPGKKTAAARCCPGRGCWWRRRSPRRRSPCPAPWWAAPRSSPRSPSTFSNEFXXGGPVPXXPYSEXYYNSLAVVLQRPDWENPGVTQLNRLAAHPPFXSWRXNEKXRTDXPSQXLXLNGEWQIVLNIL

SEQ ID NO: 163673 - protein, 102 aa, Oryza sativa
  Clone ID: PAT_MRT4530_62647C.1.pep
AVRRAALSPAGRRPPRRFATSPSSSDRRRRRLALLHPSSPPLFPSKAIASHQRDGPRPTRRLMCPHGDGVCNLLTCHRTATAAAAALDRRRCRCPYWPLRCS

SEQ ID NO: 163674 - protein, 72 aa, Oryza sativa
  Clone ID: PAT_MRT4530_62648C.1.pep
MLSRNGRIELRCLSWPNACSNAAPARARIAAACASGAKGSLVTTLPLSHFSPKTKRLGFVAAALLIAGLDLS

SEQ ID NO: 163675 - protein, 50 aa, Oryza sativa
  Clone ID: PAT_MRT4530_62649C.1.pep
MPREVAAQVGDEATARGGWSGCRRWTEKTNAATTLQATVERAGWRLKMPL

SEQ ID NO: 163676 - protein, 75 aa, Oryza sativa
  Clone ID: PAT_MRT4530_6264C.1.pep
MAGAACPWYRFLPLLPCFSLSSSLSFSLPLILPLSQSRPSSNPSRRPASPIAAAAVEMTGANHRATPAAASYPHW

SEQ ID NO: 163677 - protein, 80 aa, Oryza sativa
  Clone ID: PAT_MRT4530_62650C.1.pep
QQRKTAEPHPRPANDKFSSPRSCEPSKELQTRSDRSPRPQWINASLSAAVRGTTRDARRRAGKASTKRLGRGVDRNPDGP

SEQ ID NO: 163678 - protein, 60 aa, Oryza sativa
  unsure (1)..(60): unsure at all Xaa locations
  Clone ID: PAT_MRT4530_62651C.1.pep
RFGRVTRVFLAKDRDTESGQGFXAFXSFADRENAVKACNKMDGWGFKHLILRVEFAKKAT

SEQ ID NO: 163679 - protein, 64 aa, Oryza sativa
  Clone ID: PAT_MRT4530_62652C.1.pep
LLPAGTCYMHAVVDPVQSWPQLSLGPKLCPNQKGGISPRVILIQIVYSSVIIVVCHLQDDFVLY

SEQ ID NO: 163680 - protein, 90 aa, Oryza sativa
  unsure (1)..(90): unsure at all Xaa locations
  Clone ID: PAT_MRT4530_62653C.1.pep
IARPISATLFFNSSPKSLYHQQIDPCTHKDHLGTTNLHVVLTEYMKLDTSTRDQSMLNKRTKSPRPTSWIDMETWLIIYIKGVNVXPAPL

SEQ ID NO: 163681 - protein, 47 aa, Oryza sativa
  Clone ID: PAT_MRT4530_62654C.1.pep
LWLRLEPSRWSCRCPVDAAKPPKSIDDEALPTNACPHHHPMPTGEGH

SEQ ID NO: 163682 - protein, 187 aa, Oryza sativa
  unsure (1)..(187): unsure at all Xaa locations
  Clone ID: PAT_MRT4530_62655C.1.pep
KDQNTLSPIAEIPLSXNNLLCLCDKQDLCDAFLISMPQLVNGHVNYIVEPSCVEFKHVIHIASENKEFKLLSFLNTWGYIQFDDLCPLNCLENKLFASCLNELYVGLQEGGCCGFPSGKISESNHIAIKKCSLPDVVIDKDKFSRLNNKVKPRTVSKQEDEYDKDTTRSDMTMTTICIHQPKVHMFY

SEQ ID NO: 163683 - protein, 105 aa, Oryza sativa
  Clone ID: PAT_MRT4530_62656C.1.pep
DGVDIVKWVRSMTDSNKDCVLKVIDLRLSSVPVHEVTHVFYVALLCVEEQAVERPTMREVVQILTEIPKIPLSKQQAAESDVTEKAPAINESSPDSGSPPDLLSN

SEQ ID NO: 163684 - protein, 128 aa, Oryza sativa
  Clone ID: PAT_MRT4530_62657C.1.pep
MAEVAAGTGQLIGVAVATLLAAIFLAAALLGSRRRRRRAPLAGKPAAVGGCGVADGEGCGGDGRTDVIVVGAGVAGSALAYTLGKDGRRVHVIERDLTEPDRIVGELVQPGGYLKLIELGSRGLWFKK

SEQ ID NO: 163685 - protein, 155 aa, Oryza sativa
  unsure (1)..(155): unsure at all Xaa locations
  Clone ID: PAT_MRT4530_62658C.1.pep
GAAVWQAARAAAVSGAGYGLERDGVRGERGIARGAAATKRATWQWRRARRRRDGAAVACRGGVVASRRRAATAAXGVVARLRRHCRRDVVAGDGRIEVGVGIVGAAESCSAATTSAAASATRRPAVRXRRRRRRRRRRARDDGEIRRRRRRGDAL

SEQ ID NO: 163686 - protein, 59 aa, Oryza sativa
  Clone ID: PAT_MRT4530_62659C.1.pep
FAENHQMQKCLQHHLHNYLNKEVHIRWYKMGRTTSSTLDNTMHYTMKYIRHIYIIYIYI

SEQ ID NO: 163687 - protein, 467 aa, Oryza sativa
  Clone ID: PAT_MRT4530_6265C.1.pep
MESEQVKRRFGRCPYCRAMIYQDPNAIIYYCSKCRTPIRGKNPEPTDDAEYALSQLEILSADTASVFSDDPDTLSRTSSVAYGGGEQPPVRTSSAPYAAFDRGSVRAGSRSGEQSGEERGGSPMHSRVSELRPTSRRTRRPMSGDMGAFRDDGSSYGSDNDVPTSAAASYRRRASPLTSQELEASSSSMGSSGYQPSGVSSSSMGSSSVYEPSGAARSPLTDPAFQRDLLQALDNLRRVIAAVEQPYGVDAHLQQAGMPPKSASCNDAATGGSGGGGGAYAAAVTRRNSRLMRRLESQLVQALPRDGLRRDRSTSSSSSASSSRPGGDRARAAGRKHHCRAVLGGTPFVVCDKCSEILQLPAAVSANRAARLECGGCGETLSIKLPAAAAAAASGSTDRPKKIFSAPQPAVRRLDDDDAGEEHASARSNLSGDQRWPASPAEGPLHRMLGYSTVSSVFRSRRYGEQH

SEQ ID NO: 163688 - protein, 126 aa, Oryza sativa
  unsure (1)..(126): unsure at all Xaa locations
  Clone ID: PAT_MRT4530_62660C.1.pep
GILSTLGYILYTDTVYLRAYGCFLYMLRKSITXIETESTHERSPTRTRLRRHCIMRGLISPSPTWRSTDPRYKRDHREDLRHRISPPTHPPQPTKSEPTGAKSPGDLAEPTRLRSRRYHRVLLFSL

SEQ ID NO: 163689 - protein, 288 aa, Oryza sativa
  unsure (1)..(288): unsure at all Xaa locations
  Clone ID: PAT_MRT4530_62661C.1.pep
MMLPRLLLLVVASALPLASVAAGAVGVGEGFCSAEPSAASGGCSGVRPPLYWKATNPTLAPAHLQDLPGFTRSVYKRDHALITPESHVFSPLPDWINTLGAYLISPAIGAHFTMYLAKMHDGSKSALPPKGVERLIFVLQGSILLSEESGNTHTLLVDSYAYLPANMKHSVISDEVTTLVIFERRYTTIEGYHPDLIVGSTDKQPLLETPGEVFELRKLLPTSLPYDFNIHIMDFQPGEYLNVKXYPVQSGDTIWMAPFVPQWYAALGKTKTRASNMWRHVEHQCLGI

SEQ ID NO: 163690 - protein, 364 aa, Oryza sativa
  unsure (1)..(364): unsure at all Xaa locations
  Clone ID: PAT_MRT4530_62662C.1.pep
MVGPHVILSHLLFLFPSSSLSMSSAARPAREGGSSRQRIVRRGRRRRTSAGKRGVGEGGEEAMAGACWRAVVGATRRGNRPQTAAGGVEGAWLGGRGECSWVHEASTPGGWEGAAVGLCRKAVEYFEGMCDRPDAMSDEFRRLQLIEMAANDGLSDLLWMPYSQHKVFKISDCQLLGIPIEELHMKQKTRKMEDHTSTTSYSQYCQFKQIARPFRAMPNNPTQLEINWQTRALVLDIFGSIVFTDTPGDGLPAMYLQFMVDLTAPTEYNWGXAAALSTLYRQXSIGSEKERSETCGPXLQLWCWSRLSLGRPVNVMQNTQETEGVQEXSQMDCCPVFGAKWGAAHEFRTPRNAGIVIYSLRLII

SEQ ID NO: 163691 - protein, 307 aa, Oryza sativa
  unsure (1)..(307): unsure at all Xaa locations
  Clone ID: PAT_MRT4530_62663C.1.pep
ALIGKGICRQAHKLIMQAIXCFNEAVRIDPGNACALTYCGMIYKDEGHLIEAAHAYQKSKNXYTFYKPAAEFLAIVLTDLGTSLKXAGNTEEGIQKYCEALEVDSHYAPAYXNLGVVYSEMMQFDLALTCYEKAALERPLYAEAYCNMGVIYKNRGELEAAIACYERCLTISPNFEIAKNNMAIALTDLGTKVKIEGDINQGVAYYKKALFYNWHYADAMYNXGVAYGEMLNFEMAIVFYELALHFNPRCAEACNNLXVIYKDRDNLDKAVECYQMALSIKPNFSQSLNNLXXVVYTVQGKMDAASA

SEQ ID NO: 163692 - protein, 109 aa, Oryza sativa
  Clone ID: PAT_MRT4530_62664C.1.pep
PLGPFGGALFWPGVFSLGNFPRAQSLFKFFPFCAPHPPWGKVKFSFSPTGGGFSYGGLFIKPPPLFGKPFPLLGEVKVLGLPNPVWVFFPRRGFFFFFLVAPKLKRVLP

SEQ ID NO: 163693 - protein, 736 aa, Oryza sativa
  unsure (1)..(736): unsure at all Xaa locations
  Clone ID: PAT_MRT4530_62665C.1.pep
MGRPGMDSSEGRESNGVVPERNGGAVPAKQQLDGKDTLRYANILRSRNKFAEALQLYNNVLEKDEANVEALIGKGICLQAQSLPMQAIECFNEAVRIDPGNACALTYCGMIYKDEGHLVEAAEFVVINTRSLKCCICGSLKAKYSNAEAYQKARNADPSYKPAAEFLAIVLTDLGTSLKLAGNTEEGIQKYCEALEVDSHYAPAYYNLGVVYSEMMQFDLALTCYEKAALERPLYAEAYCNMGVIYKNRGELEAAIACYERCLTISPNFEIAKNNMAIALTDLGTKVKIEGDINQGVAYYKKALFYNWHYADAMYNLGVAYGEMLNFEMAIVFYELALHFNPRCAEACNNLGVIYKDRDNLDKAVECYQGKMDAASSMIXNNLGVLYRDAGSITSAVQAYEKCLQIDPXDSRNAGQNRLLALNYIDEGFDDKLYQAHREWGKRFLKLYPQYTSWDNPKVADRPLVIGYVSPDYSSSGHWLCVSXYFTHSVSYFIEAPLAHHDYSNYKVVVYSGVVKADAKTLRFKDKVLKKGGLWRDIYGIDEKKVASLVREDKVDILVELTGHTANNKLGTMACRPAPIQVTXIGYPNTTGLPTIDYRITDSLADPPDTTQKHVEELVRLPESFLCYSPSPEAGPVCPTPAILNGFITFGSFNNLAKGTHKXLNSRLVVKCKPFCCDSIRQKFLSTLAELGLEPLRVDLLPLIHLNHDHMQAYSLMDISLDTFPYAGTTTTCESL

SEQ ID NO: 163694 - protein, 121 aa, Oryza sativa
  Clone ID: PAT_MRT4530_62666C.1.pep
GKSPSFGLLESTILTGWVPTLLRAGRGMTLWNKAGEVPEDKLELFSFENNTYARIVREALCELEVPYILQNVGEGSSKMDLLQKISGSKQVPYLIDPNTGFQSGDHKKILSYLFQQYSTSG

SEQ ID NO: 163695 - protein, 94 aa, Oryza sativa
  Clone ID: PAT_MRT4530_62667C.1.pep
FFLFCRGGGRAAGGWAHPSLSLSRSVRLSLSLSLKYRNGNGLSIFPTVLIPNSHTSSFPCLHICSYRRCALKYKAVYFTIIPGSGLASQVLHTI

SEQ ID NO: 163696 - protein, 123 aa, Oryza sativa
  Clone ID: PAT_MRT4530_62668C.1.pep
THKLNTRTHEHKNTHERSSQAIAESLAAGPTPSLPPPPVAAAPTSPHVGPPLPARSGGGEVLLPPPLSGRHLPSSHHPPPPPPPPLLLGCRSRPDLADRRRRCRLRCLAAAFPPATTADARER

SEQ ID NO: 163697 - protein, 112 aa, Oryza sativa
  Clone ID: PAT_MRT4530_62669C.1.pep
MANCPHRHLRPRLPPRQLHHALPRRAPPLILVPTLVLLNTSNLQIQSGAWCECLANATDGSVCAAASVGGGGGRTSGEVGGLYWEVRRQRVELAYKELLPFQHLPSADCDPT

SEQ ID NO: 163698 - protein, 47 aa, Oryza sativa
  Clone ID: PAT_MRT4530_6266C.1.pep
TLCDTIKHRMDAHVSVGQLGPPTTAAPFFFFFFFFFFFSFFLFFLFF

SEQ ID NO: 163699 - protein, 33 aa, Oryza sativa
  Clone ID: PAT_MRT4530_62670C.1.pep
MENTSYGFYGDLPTYRDAVLEGEIMCTVDQRGA

SEQ ID NO: 163700 - protein, 66 aa, Oryza sativa
  Clone ID: PAT_MRT4530_62671C.1.pep
FGSYLFPLRFCIFSPQCVEFKVVMSCVSMDFLLPLNPSCELGYVVLFCTVSLSTLLGYVICSYSCG

SEQ ID NO: 163701 - protein, 136 aa, Oryza sativa
  Clone ID: PAT_MRT4530_62672C.1.pep
RVQNFRAPLCRGPSFPFLPPHPFFFSVVSFKYISGAPVLPRLVGHSRVPPYFICLRTHPPLPGWFYREEARPVPLSKGPPTFHLNWPPLWVPPFRAGGVVFPLSPPTSFSPPSAPVRCAGFLFFPPTLGVFPRFVL

SEQ ID NO: 163702 - protein, 87 aa, Oryza sativa
  Clone ID: PAT_MRT4530_62673C.1.pep
CEIGNSPLGAPLGGVRGPEPPRLVFPQGISFFFFAKFLGALPCFIWFGTLHGALIFFGSNKGCLGLYPWPSPQLNGPMVHPWAGFLP

SEQ ID NO: 163703 - protein, 79 aa, Oryza sativa
  Clone ID: PAT_MRT4530_62674C.1.pep
TRPRAEFGTRLVLPFDSPGRTKKNTSSTITILAWIDDPIIHKEVCTLHRTSIIFPTIVYKVSIHTSQFFFFISFFYMSS

SEQ ID NO: 163704 - protein, 130 aa, Oryza sativa
  unsure (1)..(130): unsure at all Xaa locations
  Clone ID: PAT_MRT4530_62675C.1.pep
VYVVLIVAGAALQSFIDSSIDRSRRRRSWSTQQPRRRPETGEIDREGGRLSKVDPRVRHGKRPLPAGEEEEEDQPPPPTPPAKQEQQDEEELAAVVISGGGQXAASARKNVRAVLTYAARRXTTASPWSP

SEQ ID NO: 163705 - protein, 68 aa, Oryza sativa
  Clone ID: PAT_MRT4530_62676C.1.pep
GVQIVNCSTSKQIRRVQGWLKRKKKSGCWKAVPLFFFINFRLLLQCYCILVCEYCIQKRRLNEKAILN

SEQ ID NO: 163706 - protein, 85 aa, Oryza sativa
  Clone ID: PAT_MRT4530_62677C.1.pep
MVGRMAPGRDATPPPTTIELHGSPSHPLALPRPICLQTDERRSMAWCANGLVGSRLAHTGNAGGEGAKEKGEGSAASGSSIGREA

SEQ ID NO: 163707 - protein, 135 aa, Oryza sativa
  Clone ID: PAT_MRT4530_62678C.1.pep
MESLASQAKPAAVLWLAGFLQAARLHRVVSFCASSRPLSARIAQCFLLNGFIFLGSLLTLKSVVIPILSWILPGDCSQLQGQHLCDHTVAVATYSFLRSVLIQIFYVLWLYPLYIFSFVLSTLWYGLLFYHTQDS

SEQ ID NO: 163708 - protein, 148 aa, Oryza sativa
  Clone ID: PAT_MRT4530_62679C.1.pep
MADQAKGRFCKVEAPGALTLRFATGVDVPSWKQELWFCSIDLLYYMYSITDYFHTRRLRTCFTSIHTKMDIHSYTNLHIIPFPSSSIGTSHHHHLHQSTKNTKNLQGQMEMGKIDVSLLSVAGACPERRELMKGLGAEGVVEFCYHHC

SEQ ID NO: 163709 - protein, 251 aa, Oryza sativa
  Clone ID: PAT_MRT4530_6267C.1.pep
MKKHDVKDSELSLPDKDCGAAFVFFKTRSNSVEQLQQRLPFLNGILKKKYITQLVTGYLPSVILQIFLYTVPPTMMFFSTLEGPVSHSERKRSACCKVLYFTIWNVFFVNVLSGSAISQVNALSSPKDIPMVLARAVPVQATFFTTYVLTSGWASLSSELMQLFGLTWNFIMKYVLRMKEDSYFVPSFPYHTEVPKVLLFGLLGFTCSVLAPLILPFLLVYFFLGYVVYRNQFLNVYCTKYDTGGLYWPIV

SEQ ID NO: 163710 - protein, 781 aa, Oryza sativa
  Clone ID: PAT_MRT4530_62680C.1.pep
MDEDQLMMMNSECNTPLHEAVKQRRSAVALRLLEVEPNCGHTPNVDMQTPLHIAAREGLTDVVEKILDIPWVPEKFVATANVRGTALHQAVLGGHTRKNSFGAQVCLDIVDPNPRASPADGGASSPRAPPVDGRRLPRVVTACPARRRPDASRASSQRVPPTARRPLPASSLTTARVSSCRPATAVCLPPPPPPASSPPAARASSRRGIAPTGVPPPRPPPRQPTPSPPIPLPPPPSWPTPPTTARRSYWDSGERWGRRENGRRGGGSPNSAPKNGGSGMFGTTPVPGVVEILLIRTAPDLIDITDSAGSTALHYAAQKNDTRMVSMLLDLKPELASRPNDRQQSALHVAAVNGSIAAATEILQHSPDAAESKDKDGRNAVHVAVSNVDTLRGLLKVIGPAEVINQGDSAGNTPLHLAAKMAHVQSTLTLLKDPRVNPCLLNRDGHTARSLVEERLAVGEMDAYVVYLWEKLKKQEESRCKNLQHLPPVATYQSLRRRSHRSAGSGNGDYFELGVGTYTLVATLIATVTFAATFTMPGGYNQTSGLAIHADRAAFDIFLVSNTVAMCSSITVVFCFIWAWRDPVKFNLEHLRWVHMLTVIACLAMIVSLMTSVYQEVAGVPACGRSTSESRYRCGVSVGGNSASAEARAMLARLSTTPPHRSLGATWLESPPPSAIVRHRSRPLPWKSSPPPSKLCLPVSPEAPSWSSSASSGGGGIPSSSSSRGATACLAMIVSLMTSVYLTALPTERWPAYLVITIGACTPGRRDTYWARRCSNFYVPL

SEQ ID NO: 163711 - protein, 402 aa, Oryza sativa
  Clone ID: PAT_MRT4530_62681C.1.pep
MTATSPPMRSVAAAALVLTPTPTLNRLSFPFAHRHCPSTAAPRWRPARCRGKPAVEDVVHDDEEETWRREANPERKDGGEEMLGRGWFMVDEIGMEILTIALPAVLALAADPITALIDTAFVGHVGEEISISQEKAGEQRKFLPAVSTSLALAAGIGLMETVALILGSGTLLDIVGVPVDSPMRIPAEQFLTLRAYGAPPVIVALAAQGAFRGFMDTKTPLFAVVAGNLVNALLDAIFIFPLGLGVSGAALATVTSEYLTAFILLWKLNSKIVLFSWNIVSGDIIRYLKSGALLIARTIAVVLTFTVSTSLAAREGSVPMAGYEICLQVWLTISLLNDALALAGQLFAGAISSAVLLVAAPKFGLGGVWAGLTLFMSLRAIAGFWRLGSKGGPWKIIWSETE

SEQ ID NO: 163712 - protein, 163 aa, Oryza sativa
  Clone ID: PAT_MRT4530_62682C.1.pep
MNSYCDKKEITVAFSKTKRQEEDEVIWRMVEQGATDDEECGGANCSAGENRDPGWPGTSVFRMLIPATKVGAVIGHSGERLRRLCEETKACVRVIGGHFAAAERAVIIFAKEQPDEPKPPAIDALLRVYECTINDDGLDVRYNNIVVARILTPSEQAASLIGD

SEQ ID NO: 163713 - protein, 113 aa, Oryza sativa
  Clone ID: PAT_MRT4530_62683C.1.pep
AAGIGLMETVALILGSGTLLDIVGVPVDSPMRIPAEQFLTLRAYGAPPVIVALAAQGAFRGFMDTKTPLFAVVAGNLVNALLDAIFIFPLGLGVSGAALATVTSEYLTAFILL

SEQ ID NO: 163714 - protein, 123 aa, Oryza sativa
  Clone ID: PAT_MRT4530_62684C.1.pep
KPTVTSEYLTAFILLWKLNSKIVLFSWNIVSGDIIRYLKSGALLIARTIAVVLTFTVSTSLAAREGSVPMAGYEICLQVWLTISLLNDALALAGQALLASEYAKGNYKKARIVLYRVLQIGGF

SEQ ID NO: 163715 - protein, 68 aa, Oryza sativa
  Clone ID: PAT_MRT4530_62685C.1.pep
YLSLYFHFRTTILLKLITRQLQQFGDLYFDRNLAQAQALLAFNVPSRYGIYPRYYGAPSTITTLGGVL

SEQ ID NO: 163716 - protein, 120 aa, Oryza sativa
  unsure (1)..(120): unsure at all Xaa locations
  Clone ID: PAT_MRT4530_62686C.1.pep
IHILFDSTIIFLEIYPTDILAQEYTLFIKLKSWKQSRCPTVWEXIXKLWYIDIIYYAAIEENELNSEKISQITSKYLGNKTITSYFSFSIHQLLKDFMPQVVCFVAIVFFLFFSSRFIEI

SEQ ID NO: 163717 - protein, 204 aa, Oryza sativa
  unsure (1)..(204): unsure at all Xaa locations
  Clone ID: PAT_MRT4530_62687C.1.pep
KSKNSSPIKKKTPKTKPSRNHTGRPSSVEQPTSPLPLGARPHPTPTEGAPGXLDLQEPGLAVPLTPPLPPNTATPPPTRDGRASAGRGEAGRRSWMTGDTPDPPGGEDRQPDPAVPAQLSLHARDEEAAAEWGVVLGTGSPRSGEKEGGREERGGRRGESPVPASVTRADAAWEPSRTRAVCLPCRLGRATRESGVDPIISVLV

SEQ ID NO: 163718 - protein, 124 aa, Oryza sativa
  Clone ID: PAT_MRT4530_62688C.1.pep
HCHNPYDRRVPAQTFFTQHSCLEYMLRYTPQLMIAYQCAVLPNVLAHIRASQLPSLISQITSLTLHPCCCEPNTHHTLAQSTATRHLKEHSTLPLLLPAQHNPLSSRGAYTANVLRFTQGLIHF

SEQ ID NO: 163719 - protein, 76 aa, Oryza sativa
  unsure (1)..(76): unsure at all Xaa locations
  Clone ID: PAT_MRT4530_62689C.1.pep
WIQDWXPISRACLSEHLHVGFDSLVLLATWQLWKEXNSRVFNSALPSVSVVLESIRSEGHLWSLTGIVAFKDFLGV

SEQ ID NO: 163720 - protein, 521 aa, Oryza sativa
  Clone ID: PAT_MRT4530_6268C.1.pep
MAHRIQAHVQDWFPFVLATETRRLGGNSHGRGQSQGQGEYKCASVVPPSSVTTAAKLFFHDARKRVKELDFGNLLNIKLEKLTSRELAARLTDQAEIQTNQDQTELNNKPGESLCITVEVVHLILTMRRGSVQELTSLPTNEASKAFISIYSVLKVRDDKFSKVKPIGMLLLMIDTKREMKICGTTRSVRTRIPGLFSTVNDKRNADINTLSVESRSNMPNNSIREWINHTPMIVTESLQLHVQSSHHHKPKEARPYIYGLLKSLLKQSLKLHVLQAKDPDEDEEVYCIHNAKPSILSLPSHKTATPVSLIPMQTQPMDGDMDDPIPIPWVSEDEKTASTKPEFIPVNRNSAEAPCSSCSSSMPPSNSGDEVHVPDQRGLGWRASCGFSRRRSPRHGMPTVGGVVLQLVAPRRATAAAAEVRGAGEDGEAAVVGEEPEGAGSGWVEQAAEPRRKAGRRGSPRAAGEDRADERAWRDGRARRMSSLREAYGGAGAGAGVRFGSTEAAPPIARIGMDCGGVSA

SEQ ID NO: 163721 - protein, 146 aa, Oryza sativa
  Clone ID: PAT_MRT4530_62690C.1.pep
GTRVKLTDFGLSTGFHRLHDKKYYQQLLQGRSNRPRDRTSVAIDQINLTVSNRSQINDWRRSRRLMAYSTVGTPDYIAPEIFTGHGYTFDCDWWSLGTIMFECLVGWPPFCAEDSHDTYRKIVNWRQTLYFPDDITLGTDAEHLIR

SEQ ID NO: 163722 - protein, 120 aa, Oryza sativa
  unsure (1)..(120): unsure at all Xaa locations
  Clone ID: PAT_MRT4530_62691C.1.pep
VSDDSTHVSGDTCEVLCETYQVSDDFNHLSRDTHEVYVIPVMXSYDFYHVSRDTCEVSDDTYQARTATARAEDGRGDGGGSGGQPRRWXGDSDGSGGGWARRRRLRRQGDGCGDGSGSGG

SEQ ID NO: 163723 - protein, 126 aa, Oryza sativa
  Clone ID: PAT_MRT4530_62692C.1.pep
MASCLSVLLLLCLALAGSVSGQQLSATFYSRSCPRALAIIRAGVRAAVAQEPRMGASLLRLHFHDCFVQASRAFPHYLTYIFISISQLHCGRSLCSFSSLHSFSLSSSLMCCVRTEWTRSTVLTLD

SEQ ID NO: 163724 - protein, 138 aa, Oryza sativa
  unsure (1)..(138): unsure at all Xaa locations
  Clone ID: PAT_MRT4530_62693C.1.pep
MACCGGVRGGVEELTESFAYLEGEALREARELVAELCRLFYXHGWVSEAGSLFTMKDNDPGLPXQQELIVMYTYGVXKVRMVVQDMYALAADGMVLSLPASKAWPHMPXRTDCARLLMKAYLIIGPAADNYSRQRETC

SEQ ID NO: 163725 - protein, 140 aa, Oryza sativa
  Clone ID: PAT_MRT4530_62694C.1.pep
SIQQGELWRNGDGGGDRRDGRLRLQPLQVWLHFQRLLLLVRHLILLWLSPGCLGFFCLGGATVVQSFDRALFLLAFVSSFFVARPCLFLFPFFCAVFFVVCVCFFRPPLDGSLVSLYGSSFLMVFSSCTPAPSPHAYQNY

SEQ ID NO: 163726 - protein, 100 aa, Oryza sativa
  unsure (1)..(100): unsure at all Xaa locations
  Clone ID: PAT_MRT4530_62695C.1.pep
WRGGAPGWLVHGELTGGKTVAGPARRRGGLRSEDLPRDGGTTKIXCYGGGAYKKVKHAHKXGRRGEVAGAVMVDGTRAACGARAERRRDRSAGAAWGSAR

SEQ ID NO: 163727 - protein, 736 aa, Oryza sativa
  Clone ID: PAT_MRT4530_62696C.1.pep
MATTPETLPNSEAVSHAYKFASTWEKNAPLTEQQNAAIAALSRAVSERPFPANLEKSLVKDGGVVVPEKEAALEEGAMDAVLVNTHQFYKWFSELESAMKSEVDDTLNLFEELQSLHLSVATKTKTLHDACDQLLLEKQRLIEFAEALRSRLNYFDELENVSTSFYSQTMNIGNEQFLPLLKRLDDCISYVENNPQYAESAVYLVKFRQLQSRALGMIRSHVLSILKAASSQVQAAIRGNGSAKNVVTEGVEASLIYVRFKAAASELKPILGEIESRSSRKEYTQILSECHSLFCEQRLYLIRGMVQQRISEFARKEALPSLTRSGCAYLMEACQFEHQLFAHFFPASASDVSSIAPLMDPLCTYLYDTLRPRLIYEGSIDSLCELVDILKVEVLGEQLSRRGESVAGLRPILQRILADVHERLAFCARTHIREEIANFRPSDEDLDYPGKLERSVDATTSSNVSGNSDIYVTWYRPLEKTVSCLSKLYHRLEPTVFTGLAQNASKVIAKKATAMDGQLFLIKHLLILREQIAPFDIEFSVTHKELDFSHLLDHLRRILRGQVSLFDWSRSTSLARTFSPRVLENQIDARKELEKSLKSTCEEFIMSITKLVVDPMLSFVTKVTAVKVVLSSGSQGQKLDSVLAKPLKTQAFASPDKVAELVQKVGTAIQQDLPKVMTMMRLYLQNPSTRLILFKPIKTNIVEAHIQLHSLLKSEYTADEIQSIVLDSLRTGPYTL

SEQ ID NO: 163728 - protein, 213 aa, Oryza sativa
  Clone ID: PAT_MRT4530_62697C.1.pep
HEAHAATLLSSSSSSPLPAAATIAGASQSTRPRPAVSPAAAADFVRRSCRVTRYPQVCERSLMPQAPAVGRSPRLLAQAALTVGADRARSCSGYLGGGGSSSSSKRSGGGGRGGAVGDCADTLRDAEERLRQSAAEMSRMGRSGSPRFAWRLSNVQTWASAALTDASTCLDSLATYAAPGIDVDALRKRVGAVSQATSNALALVNNLDPHHHL

SEQ ID NO: 163729 - protein, 761 aa, Oryza sativa
  Clone ID: PAT_MRT4530_62698C.1.pep
MATTPETLPNSEAVSHAYKFASTWEKNAPLTEQQNAAIAALSRAVSERPFPANLEKSLVKDGGVVVPEKEAALEEGAMDAVLVNTHQFYKWFSELESAMKSEVDDTLNLFEELQSLHLSVATKTKTLHDACDQLLLEKQRLIEFAEALRSRLNYFDELENVSTSFYSQTMNIGNEQFLPLLKRLDDCISYVENNPQYAESAVYLVKFRQLQSRALGMIRSHVLSILKAASSQVQAAIRGNGSAKNVVTEGVEASLIYVRFKAAASELKPILGEIESRSSRKEYTQILSECHSLFCEQRLYLIRGMVQQRISEFARKEALPSLTRSGCAYLMEACQFEHQLFAHFFPASASDVSSIAPLMDPLCTYLYDTLRPRLIYEGSIDSLCELVDILKVEVLGEQLSRRGESVAGLRPILQRILADVHERLAFCARTHIREEIANFRPSDEDLDYPGKLERSVDATTSSNVSGNSDIYVTWYRPLEKTVSCLSKLYHRLEPTVFTGLAQAMASNLTYNFDFHQEAVEVCSTSLQRASTVIAKKATAMDGQLFLIKHLLILREQIAPFDIEFSVTHKELDFSHLLDHLRRILRGQVSLFDWSRSTSLARTFSPRVLENQIDARKELEKSLKSTCEEFIMSITKLVVDPMLSFVTKVTAVKVVLSSGSQGQKLDSVLAKPLKTQAFASPDKVAELVQKVGTAIQQDLPKVMTMMRLYLQNPSTRLILFKPIKTNIVEAHIQLHSLLKSEYTADEIQSIVLDSLRTGPYTL

SEQ ID NO: 163730 - protein, 44 aa, Oryza sativa
  Clone ID: PAT_MRT4530_62699C.1.pep
MTTDKIPMAAAPLLSIMRPCPYRLKLDEVAVGSSMEKKAVAVTA

SEQ ID NO: 163731 - protein, 367 aa, Oryza sativa
  Clone ID: PAT_MRT4530_6269C.1.pep
MATAQSSAWSDLRPELLDIVLHRLHSLADRIRFRAVCRPWRHIALAQPLPPLMPWLALGNGDFLIIPDGEIHRMDVPDNACCHGSCDNWLFVVHDNGLCSLMNPFTKASVQLPSLPKVAPHNELLSDAKFHMTVVPPASLNSPSDLLAAVLIRDFRDTLFSFCQPLINSGSFNGCRQGMLISGIAFCHGKLYVANPDFMLYKFDLAVSSGGNRYSSMKKMTLLREELQIWPQDIPLSKEDYHIIRRYLVECDGRLLLVRRRMQIRPFAKCDDLLETACTCWFDVFEADFTVQPCQWRRLNTLGRRALFIGKYCSKSVSSEECEEVKEDSIYFMCDYVKSDQSVDPLRDSVLVHEQLVLVKYVLHEIR

SEQ ID NO: 163732 - protein, 37 aa, Oryza sativa
  Clone ID: PAT_MRT4530_626C.1.pep
MTYRRTLDFVMESIGAIIGDDDSRDDQESLTTQERPV

SEQ ID NO: 163733 - protein, 67 aa, Oryza sativa
  Clone ID: PAT_MRT4530_62700C.1.pep
FFFFSDQNATKNHVQISTKTFLVITKWRDTAWQSKRGSVEIIIGLNVELGSSLILITPRLSYPSAGD

SEQ ID NO: 163734 - protein, 374 aa, Oryza sativa
  Clone ID: PAT_MRT4530_62701C.1.pep
MAGKSLIPFIGSSSNSTYNFDGEPTLANQLIPVEHYTMEGVNTLWAQPLATVPGSPVNLEPVGELPDDGKAAPSPAECYVGTLFTKARDEVLHKYTTPTATPSTPKEERFRIQGVRTTGGGYGKGLLRLLMASEKEGAAESQVVTALEITKVLLVRMINPEVGRAEGQAGRAQPKFGQPCTFEVGVEVVTALKITYVLPVRRRPRTSCLHPPPPLATALGSPSATPPPLVADVDSPFDAAPPVAADEGPSPTPWRIRSRRPYQPLRLRLPPRPPGSSILSHQRAALAPPRAPPFQDRVVHALLLLLLEPAGPKPFAPTATRSVRSHFAALPFGSSLPTSPAVADALSPDTFYFPVVQKTVSDRNAHVWAVFVPP

SEQ ID NO: 163735 - protein, 101 aa, Oryza sativa
  unsure (1)..(101): unsure at all Xaa locations
  Clone ID: PAT_MRT4530_62702C.1.pep
VKPAGXHXXXXXKRXXLHRQDGRXARDTXPXXGHXXGQILXXTXXVVVGXIXXGXDVPQIXXAPRXRGXXGAXXXSGQXADHXXXKXXPPXXXXIRSIYNA

SEQ ID NO: 163736 - protein, 47 aa, Oryza sativa
  Clone ID: PAT_MRT4530_62703C.1.pep
MSYYISPYANVSMIATYPVYGYQPLTVLIEKEGEVDSGIFQVQPRQG

SEQ ID NO: 163737 - protein, 109 aa, Oryza sativa
  Clone ID: PAT_MRT4530_62704C.1.pep
DQAGDDPTNILPISLEDLYEEQRREIEQHLKATQEALLAGCFINTRQGVVGKPGSTPKVTVNKRIVSFMNSKFGSHAINLPSTSVASTSQAPIHHILAKSMGDHATCRE

SEQ ID NO: 163738 - protein, 81 aa, Oryza sativa
  Clone ID: PAT_MRT4530_62705C.1.pep
WYAGRTGSESRIPATTHSCSHAFKAKGSLAFGCVAASYIYTMRRPSWIARLGRTPCSIVTHTGVAGRTYCLASHDSGKNTA

SEQ ID NO: 163739 - protein, 73 aa, Oryza sativa
  Clone ID: PAT_MRT4530_62706C.1.pep
TPGEPPPLPPPPLPPDLAEGRAPSRGRSLPPTGEPSAASPPRACRHLPPASPPPLLPSPLPPDLVEGRTPPRG

SEQ ID NO: 163740 - protein, 489 aa, Oryza sativa
  Clone ID: PAT_MRT4530_62707C.1.pep
MAPSQIRFGHQIPFSRPDSDEEEEEDDEDEEVEEEEEEEEEEEYEGEEEEMEGEVPVSSPLMLPAARGGGGGGVSVVETVAAALRRSLLLCSSVRAAEDEGAAAAAAAAAGMQIGRPTDVRHVSHVTFDRFVGFLGLPADLEPDVPRPAPSASVSVFGVSPTSMQCSYDNRGNSVPTILLTMQKKLYQLGGLQAEGIFRINADNSQELHVREQLNMGVVPDGVDMHCLTGLIKAWFRELPSGVLDSLTPEQVMHCNTEEECALLASTLPPVEAALLDWAINLMADVVEHENYNKMNARNIAMVFAPNMTQMADPLTALIHAVQVMNFLKTLILKTVKGREETAMPSSAFPSSSGSPSDKDEPQALEHLDKPTICSTQQNNDFPMISGATLDHFLFRAEPLRHNDAQGSAGRPKKRDNKDHDNSSREFSPIDSDSSSQASNSASKFSNDNVEGLFDRFKFRKGVGRLCRHPVFQLSRSMKKSGEAGQACV

SEQ ID NO: 163741 - protein, 55 aa, Oryza sativa
  Clone ID: PAT_MRT4530_62708C.1.pep
INLNFPQKKKAFFFFGPGKLTLLHIMEAAKLFFFDPQTQAPRLLHVLLPCYVWTW

SEQ ID NO: 163742 - protein, 52 aa, Oryza sativa
  Clone ID: PAT_MRT4530_62709C.1.pep
LKTGRLAMFSMLGFFDQAIVTGKGLMEILFDDVADAVANKAWEYATNFVPGK

SEQ ID NO: 163743 - protein, 247 aa, Oryza sativa
  Clone ID: PAT_MRT4530_6270C.1.pep
MKPGGQNPRGNNAAPFGRYSNNHGAGFRRGSTGPNAPRNHHHPAAAAPPHVVMTPQQRDEVLLRAGRLAAEYLVNIGELPPDALLQGRHPPPPPHAPFQGYQQRQWPPPRGHPWHEGPHPQHGFQASRSSAVGPIRNIAKRAVVRGGGGGGTFRGRGGRFPSRRPGASGAAAPETAGEPGHGQGVAPGADVGGVVGVRGDGSDATAPAGPSSGRQPSAAAHPGGAAHGQPEKGQPGGHSNSDGSVGL

SEQ ID NO: 163744 - protein, 792 aa, Oryza sativa
  Clone ID: PAT_MRT4530_62710C.1.pep
MGAAILPLPAPDGDGDSHPQQPPPPPPGGGAKPEPPPTVATHTRPLGIIHPPPDIRVIIEKTATFVSKNGPEFERRIISHNAGNAKFNFLQPSDPYHAYYQHRVSELAAAPPSAAASAADAAPEPDESGAAPPPADSAAAPTVDGEAAKADHSAPFRVPPPTKVLVPPKAELYTVHLPEGITGEELDIIKLTAQFVARNGKSFLTSLAQRESTNPQFHFIRPTHSMFTFFTKLTDTYSRVLNPVEGMPALLKDLQDGAKDLTTVLERCLNRLEWDRSQEQARQQAEDEIEQERMQMQMIDWHDFVVVETIEFADDECEGLPVPLTLEELKRRKRIEDLGEEEAAMELAEPAKDVEMEMDEEEIQLVEEGMRAARLEENEGGVQVKLAGDEEPPMRIVKNYKRPEERIPAERDPTKFVVSPITGELIPISEMEEHMRISLIDPKYKEQKERMLAKIKETTLAPDDEISRNIVGLARTRPDIFGTTEEEVSNAVKAEIEKKKDEQPKQVIWDGHSGSIGRTATQALSMGGEEQVDASNVPGPAPLPRPPMPLLRPPQPLPLVNVPRFQPSAMPYPPHQQPHLMQGVPHMMPTMHPPPPPPIPGQPQVLRMPGSMGPMPTNIPPPPPGQNPYMPGPPRPYSMPPPPHMPTMATMVNPIGIPQPPPPLPPQPPAEEQPPQPDEPEPKRLRTDDASLIPAEQFLAQHPGPAHISVSVPNLDEGNLRGQVLEIGVQSLSDTVGSLKEQIAGELQLPANKQKLSVRTSFLKDNLTLAYYNIGPGVVINLTLRERGGRKK

SEQ ID NO: 163745 - protein, 109 aa, Oryza sativa
  Clone ID: PAT_MRT4530_62711C.1.pep
MATVLRSLTTLSSRSSATTAGIVSRRLICNAASDHHQKLAKNSGGTKTEVVSATVNSEVQIVSWGRLFGLAVITFFSCKLGGRYANYQYERSLFEGFQKSKQEMSTPQL

SEQ ID NO: 163746 - protein, 336 aa, Oryza sativa
  Clone ID: PAT_MRT4530_62712C.1.pep
MAGAAATPPAMMRAVQYDACGGGAAGLKHVEVPVPSAKKNEVLLKLEAATINPVDWKIQKGMLRPLLPRRLPFIPVTDVAGVVAGVGPGVNDFAVGDQVVAMLNSMNGGGLAEYAVAAANLTVKRPPNVSAAEGAGLPIAAGTALQALRSIGAKFAGTGEPLNVLVTAASGGVGLYAVQLAKLANLHVTATCGARNAELVRGLGADEVLDYRTPEGAAMRSPSGRRYDGVVHCTVGVGWPAFEPLMAPRGKVIDITPNFSAMLTSALHAVTLRRKRLVPLLLSPNKADLEFLVGLVGEGKLRTVVDSRFPLGDAAKAWQKSIDGHATGKIVVEMEG

SEQ ID NO: 163747 - protein, 56 aa, Oryza sativa
  Clone ID: PAT_MRT4530_62713C.1.pep
RWYLHLCVRLYVLHTPCQLHSHTYTPHILHIYCDTTGLNLTHHLDTTLYTHTHDTT

SEQ ID NO: 163748 - protein, 959 aa, Oryza sativa
  Clone ID: PAT_MRT4530_62714C.1.pep
MASSSSSSTTSVNPFQGHTVSEKLGKNNYALWKVQICAAVRGARLQGYLTGTFEKPKAEVTVTADGKSTKKANPAFEDWEALDQEVLGYLLLSLSRDVLMQVAACETAAEVWATIERMYSTHTRARTMNTRFALTNTKTGKMTLPEFFGKMKALGDEMAASTGRPVDEEEMIQHIIAGLGEGYSKVISAVCARPEPMTLRTDQIASQRARSASSEVTPQPIVGTAATASSSYNVDTNWYIDTDATDHITGELEKLTTKDKYNGNEQIHTASGAGARLRSELLLLSPELTSADEHVFQFLANNPAASNATYQFSQENAADQAATENPTGAHSEEDALQPAITNPTATGSAIPADHGSAPSTPPSSHSGSSTRQPARDYVVLPGSLSRQESGEQHQDTSAATLSPDTDIDSDDDAGSTCASDGADGANGAGSDQEMEVQASPERVRPRTRLQSGIRKEKVYTNGTVRYGCFTSSGEPSDHIEALKNKNWKLAMDFEYDALVRNNTWHLVPPQRGKNIIGCKWVYKIKRKADGSLDRYKARLVAKGFKQRYGIDYEDTFNPVVKAATIRIILSIAVSRGWSLRQLDVQNAFLHGYLEEEVYMQQPQAPRAWFARLSKKLMELGFSGSKADTLFFLHKGDITIFVLVYVDDIIVASSSERATMALLQDLKEEFALKDLGVLHYFLGIEVSKVHNGIVLTQDKYATDLLKKVEMMNCKPITTPMSVSEKLSVHEGSLLGPNDATQFRSIVGALQYLTLTRPDIAFSVNKVCQFLHTPTTIHWAAVKRILRYLKSCTKMGLNIHKSGSTLVSGFSDADWAGSIDDRRSTSGFAIFIGSNLVSWNARKQATVSRSITESEYKAIANATAEIMWVQTLLLELGTKSPQAAKIWCDNLGAKYLSANPVFHARTKHIEVDYHFVRERVSQKLLNIDFVSSGDQVADGFTKPLSTNLLEKFKANLNLSRL

SEQ ID NO: 163749 - protein, 46 aa, Oryza sativa
  Clone ID: PAT_MRT4530_62715C.1.pep
LLEEHRERVAVRAASYQLALHRYHEKRIRVRILSSGDYVLRRVQSQ

SEQ ID NO: 163750 - protein, 51 aa, Oryza sativa
  Clone ID: PAT_MRT4530_62716C.1.pep
PENNFHTGMTAMTMITPSLMTTHYRESSVLPRRYRVRNSPGRPTRAGPTPA

SEQ ID NO: 163751 - protein, 86 aa, Oryza sativa
  Clone ID: PAT_MRT4530_62717C.1.pep
MPSFPPPGAVTICEINRDLVAADAVSDDGAKDAYGDVLSDALVATHEPPAITEAAEPSEIVPRTSLASTIAESFKQMLFPSCDKNY

SEQ ID NO: 163752 - protein, 103 aa, Oryza sativa
  unsure (1)..(103): unsure at all Xaa locations
  Clone ID: PAT_MRT4530_62718C.1.pep
GGGXGXXVEMERXKDXXXKXXGWGXDXXGGCGGGCXXGMVMERXKKINXXPAPTGGGCGGGVAMESSTVGHAKSGGCGSGCGGGCGGGGCGATPQEYLGPPAP

SEQ ID NO: 163753 - protein, 113 aa, Oryza sativa
  unsure (1)..(113): unsure at all Xaa locations
  Clone ID: PAT_MRT4530_62719C.1.pep
MPSFPPPGAVTICEINRDLVAADAVSDDGAKDAYGDVLGXMVFSPIPFQSDALVATHEPPAITEAAEPSEIVPRTSLASTIAESFKQMLFPSCDINGIPDLHIKPRFHSCLIA

SEQ ID NO: 163754 - protein, 193 aa, Oryza sativa
  unsure (1)..(193): unsure at all Xaa locations
  Clone ID: PAT_MRT4530_6271C.1.pep
WARPATPPPPPPAHLRRAAPWPCSSPSLSLPLTNHSHPSRRSSCAAESSSMTSAAPRRVHTTGSRSPPGRSPRPTAPSPPAPGAASTNRCCSSSGRSRWTPRGQGPPARSGPLPAASRRGSAGTRSXSARRSTWTTTAAASSPAPPASTAPPPISRRPSASSPTTPARARDARRVLEEEGRLQEEGSGSGTPP

SEQ ID NO: 163755 - protein, 66 aa, Oryza sativa
  Clone ID: PAT_MRT4530_62720C.1.pep
MPAADSYRRQSDRRVPAGRTVAMLPASALQGVPAPLAEPSCPCSQGTTMTIAAIVAPTLCEAVEVN

SEQ ID NO: 163756 - protein, 33 aa, Oryza sativa
  Clone ID: PAT_MRT4530_62721C.1.pep
MGYIEYDKARDSWGAAHLWLFSLPGEGLGAKAR

SEQ ID NO: 163757 - protein, 123 aa, Oryza sativa
  Clone ID: PAT_MRT4530_62722C.1.pep
NLDKEGLLEQLLQSAALLNKSISVYTFSGVSLKILRGVRGGASYICGLGAGEVTCAVDKCKEELSRLSMMGMRRSRGGLNLMDKILAVWEAFGIWQAPESVVNSLPCKSYKKQTAQCSDNMEQ

SEQ ID NO: 163758 - protein, 122 aa, Oryza sativa
  unsure (1)..(122): unsure at all Xaa locations
  Clone ID: PAT_MRT4530_62723C.1.pep
FLPLAVVLGLHACQSALPIHEGPAAAAGEGAWSAWPGGCGGRSGVIGIVGVALWLREERPESXRRGLAALAAAACGRRSRWAGQRQCCGLWRAGGARRRARARGSATVAQEKATAAACNGMR

SEQ ID NO: 163759 - protein, 98 aa, Oryza sativa
  Clone ID: PAT_MRT4530_62724C.1.pep
KPFYGAPADSWNMKVLNPRVEIVKNFLFNKPILANKNCFSVTETPRMFSKKLWPQNFFKAFKNRVLRGTHYWEQPKQGQSPRKKVQRFNPKASPVISL

SEQ ID NO: 163760 - protein, 282 aa, Oryza sativa
  Clone ID: PAT_MRT4530_62725C.1.pep
MAMVRWRPVGLEVERRGGARGEAGVEDTVDRVEEERDVQRILAISEIYSGDACMTITGEMNQELIYNFSGLYATAQRKAPARRRRRNHAPRPLLVATPLEEGRRARKVKTEREQGKGSFVFLELKDGAVFVQGAGAVEAKKGGAAGGGDDGRHHHRHNQAVQSAVARERRRRISNGRAVATAGKRRQRRTVGHAAHLLLRSSPNSLADVGLLLPAAVLRLLLCPCPLESAASAHELATTERAKATALPALTASSSPALARPPPAPVPWPPLAERKRTREGGG

SEQ ID NO: 163761 - protein, 667 aa, Oryza sativa
  Clone ID: PAT_MRT4530_62726C.1.pep
MKGQGGGAGAPAKRRWRSVAAAAAALALLFLSVGVPLAVLLGLHQRFPSMYLADESAVSVFGGSEGGGWEPNTSQENDRLPVNDTNKFPPSIEKSAFAISWILFHMALFCISTAIKALFLSFWHDWSKTNTGNSDAESNGTNNQPSIDKPISNTSIHPGLPIKQIVIFDDISLLSNTDADPKDNFEQGLPGDESIKSCQLEFGSYCVWSVEHKEVMKDSVVKRLKDQLFVARAYYPSIAKLEGMEKLSHEMKQSIQEHEHMLSEAICDADLPAFHGANMAKMEKTIAAAKSCLIECTNFEKKLRQLLDMTEDEAHFHARQGAYLYRLGVQTLPKSLHCLSMRLTVDYFKSFADMEYSNVQKLENPVLRHYVIFSTNLLASSMTVNSTVINSEESANVVFHLVTDAQNFYAFKNWFIRNSYKEATIGVLNFEDFQATHLDNRRVEHLSPYEEFRIASHSNARIPNTQMRTEYISVFGHSLFLLPELFSNLKRVIVLEDDTIVQRDLSHIWNLDLKGKVIGAVQSCRVRLRHLRPYLVDFPYDASSCIWMSGVSVIDLNKWREHDVTAVRNRVLQKLQHGPEASWRAAVLPAGLLAFQNLVHPIEAQWIQSGLGHDYGVNHGAIKKAGILHYNGNMKPWLELGIRRYRKYWRRYLPRDDPFLIDCNVNP

SEQ ID NO: 163762 - protein, 377 aa, Oryza sativa
  Clone ID: PAT_MRT4530_62727C.1.pep
MATPAPLSGLRPRAPAPAPAARSRLCGQSPPVVAPRLGAFPRRRGGAARCSPRAEAGDVEALRAGVSVYKPRSYDVLVSDAARSLACAMDEGKTRLEIEFPPLPSNISSYKGSSDEFIDANIQLALAVARKLKELKGTRSCIVFPDLPEKRRASQLFGTALDSIETATISSLDEVSTGPVNTFFRSMRDTLDFDFADDVEDRWKSDEPPSLYIFINCSTRDLSTIEKYVEQFASSVPALLFNLELDTLRSDLGLLGFPPKDLHYRFLSQFTPVFYIRQRDYSKTIAVTPYIVNYSGAVFRQYPGPWQVMLKQADGSYACVAESAARFTLGQAKEELLRVLGLQEEQGSSLEFLRRGYKNATWWEENVDQEKSSAWRT

SEQ ID NO: 163763 - protein, 55 aa, Oryza sativa
  Clone ID: PAT_MRT4530_62728C.1.pep
AIPAAEASDANSHIDQVSSYIGEERTGVPNMLRHSGTEDGRSPHASRQDKERAAD

SEQ ID NO: 163764 - protein, 127 aa, Oryza sativa
  unsure (1)..(127): unsure at all Xaa locations
  Clone ID: PAT_MRT4530_62729C.1.pep
RRCRRRAPAASXGVEGXRSPXPAPSWPGSRISRXRTXAPTGPLPLTARRXPWAFPXPXSLPXLPAHRADRPTGPFGRXXPWGSPMSRFFXRVRSXPPNKNRSLXRXXERPKCSTGGWWVVGLAPVVR

SEQ ID NO: 163765 - protein, 66 aa, Oryza sativa
  unsure (1)..(66): unsure at all Xaa locations
  Clone ID: PAT_MRT4530_6272C.1.pep
MXIRXRSXXYXXXXFAXAXALASVXAVAGXVFFXEKFEDGWEXXWVXSEWKKNXNMVREWNHTSGK

SEQ ID NO: 163766 - protein, 74 aa, Oryza sativa
  Clone ID: PAT_MRT4530_62730C.1.pep
WRTTCSSPSSASGYRSSSRTTTRRPTSAPHASPPPPPRPSRDSRSPMCRWARRWWRHRPTRCTTTPPATTTAPA

SEQ ID NO: 163767 - protein, 70 aa, Oryza sativa
  Clone ID: PAT_MRT4530_62731C.1.pep
QALEVLLSEARLRTMSWGSRHGFAASITAPGRHEEEPALLLYGRSVGDVKPDSYMKVTTNAEDTSIEKHA

SEQ ID NO: 163768 - protein, 108 aa, Oryza sativa
  unsure (1)..(108): unsure at all Xaa locations
  Clone ID: PAT_MRT4530_62732C.1.pep
EGRARPPPPPPPLGNRRLRESTASPPYAESTAHQPRRRPRASPPLDPPXPASPPPANDGDEHGGGWIDARKQQPRLGPVVDLAGPSPSTAEPQDPGEHHCRPPWTLGE

SEQ ID NO: 163769 - protein, 180 aa, Oryza sativa
  Clone ID: PAT_MRT4530_62733C.1.pep
MFGVVFPDHSFPLDVTAFAQVAPNSWALDLSTLSLAAAPRSAVVFLLPAAAAALPPGKAVAVYFQPAANRPFAFLGALGPGRPSASLPLPEAGDEPEPPLGPAKLGVAVEDAAALPPPPDGQRAERVALRVGENLFNFMQSFCGADGGKLVVPTDILDRWFRKFQERAKKDPSYLKTFDF

SEQ ID NO: 163770 - protein, 250 aa, Oryza sativa
  Clone ID: PAT_MRT4530_62734C.1.pep
MYSSETGAWSTPVVLDDGLDSWEQRWRDAQSRGEFYRVPYVMPRRVALVGDEIYFTLREDNAIIKYNWGMHCLSEIDSPSPDVYGIALMEMENGSLGFACIEDSSLYVWSRKVNSEGAAEWVQCRVIKLDKMIPVANLSDEAFVVGSGEGMGAIFVSTGVGLFTIELKSRRVKKVAEPEVYFSILPYMSFYTPASIYLISHNITATFVIWIDKGCFVSWHIVIASKDSLIFDVMLKSNLLQNGQIHCLDS

SEQ ID NO: 163771 - protein, 843 aa, Oryza sativa
  Clone ID: PAT_MRT4530_62735C.1.pep
MASGGGGDGEGKPPAKEESTEYRLRKYLLLLATLVATVTYAAGLNLPGGSWEEDAPAPAGLRVVAGDPILRETRYTRYVVFYACNAVAFAASLVVSLIVLVLPKEGGGRLLGAMRAVMVVDLLGLMGAYAAGSSRDGFTTAAASALLLLVFAYVAGAFLASLNLITVRWQLPCQERASPPAAAPRPPPPGDQDPAATKAMKSEHEILLLLAIFAATIAYVAGMNPPGGFWRDAAVGGEHVAGDPVLQGREHPNRYRAFYVCNTAAFAASLLAVMFIVVEDKRLRHWRRAVPYGLVVAALLGLGGAYAAGSCRDGKHTAYVACLVAPVVAYIAILYIACPSRSPSSTSKSPSNTNTTTTTISISDSKQDKEVDKICEYIQLLATLAATIAYQAGIDPPGGVWGESGKGHRVGDPILLTTHPRRFKVFFYFNSAAFVASLVIMALSQNKRLVRRYHAVLEATMILDLFGLIGAYAVGCCRDTSTSIYIIAMAGAVLVYVVIHIVFFTLETKNGGDDQLEEHREVLLLLTVLAATLTYQAGLTPPGGFWENDEKFGYHAGFPVLLNKDPCRYKAFFYCNAASFMASVALIVLLMNKNLYRPGIRSYALIICMVAGMFGVLGAYAAGSSIYLRTFIIVLVLVLVVFVGVICLAINHFRELKKNTQQQQQQQPPPPPTGTNGFSSPKLSMQEEDVIKYLMLVGILAASITYLTGLKPPGGLWRDEGDGHSAGNPVLYDINMRRYNTFFYSNSTSFMASITVIVLLLQRMLSPKTGGEKVFWPMHTVIVLDMLALLVAYAAGSVRDWETSKNVFLLLIPIQLFVGGLFFICKKKQTSPQDDGSAAGTNM

SEQ ID NO: 163772 - protein, 52 aa, Oryza sativa
  Clone ID: PAT_MRT4530_62736C.1.pep
IWGPYKKSITLEGRGRKRGSFKKGGPNVNVLICEIVVFMSAILFFVPGCFLV

SEQ ID NO: 163773 - protein, 115 aa, Oryza sativa
  unsure (1)..(115): unsure at all Xaa locations
  Clone ID: PAT_MRT4530_62737C.1.pep
VTSPNHRGAPRAPIIPPPRRTSGSPSGPRHXKPXTPTAHVLPPPHNYXGRPPDTPPNRPPDPQIXHQTPPQTHSQRYHPREPXTPHINPPGYTPPAVSPPPTRDPRXDFPPRPAF

SEQ ID NO: 163774 - protein, 880 aa, Oryza sativa
  Clone ID: PAT_MRT4530_62738C.1.pep
MGSFSLPFGTIHSIEPAFNLSACNRLYDVSGGGNVPRPGTGTENMKLLFMVVLMAIVGCTLYINGFVQVFFPWVRQIGFQKYSLSIIARFLLNFAFFQFVPLVSATISQSQANSGGNNDGVLRNESELLAALLWLILVELIRKKVQGMLLPTDGSSFSRGIGRLTLMDVSYEVSHLVWVGYLIFANLARQTRTETLEFRYYLLGLTLIYIFTVLWSLCLAKLVLSLLNRRLASCSLHTARNPLVVAAYMQKLMEKQTATSPPAITLSTCKFVVMGEDRLVLHYNKVNNDDDNNNNKRKRRMRRRDNGVLEPVTIHGYGYGVARRVGGDQNEHKHVHLLLTDPDEYLRLTEHDCVEKGRLITVEDVMNMHEQHANLFKGRRRQLLEDLCISFSLFKMFRRRFEHYPMVEVGSAMARGVMLDGVLKLEGCEPVGKAQKLCSKFTLNRVQGQIQRGFQVLQLELDLLVHYYQQAAAPVVMSQPILFVVNFVSSLFLLCLLLGTVVYILFISSQGEPVYCQIIVWTTTGNGPISNVYFYITVLLVLTVIAIETHEFWTVHVFSSWNIVRMVCTYHRAAHRPWLRWLCFLVIRVRFLTFSVGKSEMVIYQMSIFDAASPLQKLYATVRAADVALPAIATGRIIDALRSDAVVSRTTGIVSLPDIDGLDFRTMTTTEIILACHLATELLDNEHDDHPPPAADENDDDQQQQKKKKEKKEDDRKIASVLSRYCMFLVAQIPELLPDDETWVSDRYGDTASALHLASRRVVCPTSRRRKKAIAVAVRSSRWEELFDDDPAARRGARLFHRLRRRGPAFDKAWDELARFWVHLVVYLAPSNDVQGHAKALASWGSGDLLTCLWTLCTHAGITRQPSEQAAELTVDDSNV

SEQ ID NO: 163775 - protein, 89 aa, Oryza sativa
  Clone ID: PAT_MRT4530_62739C.1.pep
MERERGGEAGEEEACARQVFGVFFHGVLRGFEAKPACCDGDGPDARWEVRCSDLAQEFFVFHMFTATGTAQHGKSFDHNWTSSSTFATT

SEQ ID NO: 163776 - protein, 148 aa, Oryza sativa
  Clone ID: PAT_MRT4530_6273C.1.pep
MEIGSKRAELGIRDTVGWLNGRNAILMGTGKRMVPNTGPEEERRKKVVKEEINTLPTKLSYVPTEPLIYNGKKEGYLGSKVTVRGNKKYGKMNERQKYRTYALSQNIYLLSIRQEGQGKDNGYGTQVLALLENEALSVQTYEITYPGF

SEQ ID NO: 163777 - protein, 103 aa, Oryza sativa
  Clone ID: PAT_MRT4530_62740C.1.pep
HSPNNIQRVDETIFGVKESKKIFARYQLVRALRRHTMTASQTPVCGPHVNVSRDYETIVVSTSNAQIDARSGSSPLAARGALPDHHRNLRIAKPHGRGRAKGM

SEQ ID NO: 163778 - protein, 166 aa, Oryza sativa
  unsure (1)..(166): unsure at all Xaa locations
  Clone ID: PAT_MRT4530_62741C.1.pep
MTPGFILASDRTSNSVMMERTSSVTVSRTTPTTAAMPPPLVPPLCLLHRCEEPIRRHYTSSASAATVRXCPPPLCLFLCRHHRFTCPAVARSSSAAATPPPPPVPCYASSATPPLRLHCLHEELVCRCYASSSAGVAALXSTTTARSPVCRCFSLFVAAALPPPPS

SEQ ID NO: 163779 - protein, 87 aa, Oryza sativa
  Clone ID: PAT_MRT4530_62742C.1.pep
KKPNKKKRSGGPRPEAQRARRQGEGPQHTPPAVAAPRSHANLKQERCFECSCVLLLLGHTDPQHRSSHLDINFRRLTFGNIDESLYA

SEQ ID NO: 163780 - protein, 50 aa, Oryza sativa
  Clone ID: PAT_MRT4530_62743C.1.pep
EVSIKEIAILVLKVTQYCELSMMEFRFLLDKLINMVGPLVVCLSEIMLNV

SEQ ID NO: 163781 - protein, 53 aa, Oryza sativa
  Clone ID: PAT_MRT4530_62744C.1.pep
FFFFLGIGYGCFFIGCVCPLIFLSLERMNGRVDKNNRSQNQKKTRLRNQGSFN

SEQ ID NO: 163782 - protein, 338 aa, Oryza sativa
  unsure (1)..(338): unsure at all Xaa locations
  Clone ID: PAT_MRT4530_62745C.1.pep
RQIQREGRQRSPLRQIRGIAAAQAARAEEGVLQEELPQGGGDRAAGGVEPRRRQPGARRQVPPHVLPRLLRQXGCDASVLLDSASNTAEKNAAPNLSLAGFEVIEEVKAAVERECAGVVSCADIVALAARDSVSYQYRRSLWEVETGRRDGTVSSDQEALADIPAPTSTFPILLXNFSAKGLGLQDLVVLSGHMHVXGHTIGIGHCNLFSSRLFNFTGKNNPSDVDPSLNPSYARFLQGQCRRNQQDPNDNSTVVPMDPGSSVSFDSHYFVNLKARQGMFTSDATLLTDGRAAALVDKLRDPGVFLDHFKNSIKRMGQIGVLTGAAGQIRKRCNAVNS

SEQ ID NO: 163783 - protein, 333 aa, Oryza sativa
  unsure (1)..(333): unsure at all Xaa locations
  Clone ID: PAT_MRT4530_62746C.1.pep
RQIQREGRQRSPLRQIRGIAAAQAARAEEGVLQEELPQGGGDRAAGGVEPRRRQPGARRQVPPHVLPRLLRQXGCDASVLLDSASNTAEKNAAPNLSLAGFEVIEEVKAAVERECAGVVSCADIVALAARDSVSYQYRRSLWEVETGRRDGTVSSDQEALADIPAPTSTFPILLANFSAKGLGLQDLVVLSGGHTIGIGHCNLFSSRLFNFTGKNNPSDVDPSLNPSYARFLQGQCRRNQQDPNDNSTVVPMDPGSSVSFDSHYFVNLKARQGMFTSDATLLTDGRAAALVDKLRDPGVFLDHFKNSIKRMGQIGVLTGAAGQIRKRCNAVNS

SEQ ID NO: 163784 - protein, 146 aa, Oryza sativa
  Clone ID: PAT_MRT4530_62747C.1.pep
MPPPPSAATLHRHFRGAAAAASTSRRIAKRRPRPSRRLPTTYISADPANFRRMVHQVTGADDLPPPPPPSLSPTTTELLRHAAPAGSPGPAGALMLPTLDTSAFLLGRRAEPTAAAAPCDVSVALVGGAVLINTPSNSTTAPAPSH

SEQ ID NO: 163785 - protein, 222 aa, Oryza sativa
  Clone ID: PAT_MRT4530_62748C.1.pep
MATTSSMVNPSSSRRISSLPAATIPGVDVAVHGACGGGDSEIKLPCKRHHVSATSDEDRVKLATYAPRQPKPLSKMPRNLVCPVFGLNIPISQKEKNLATVSTLISVGDGNTALLWEDCWIDGASICSFAPAVYAAVPARLRSRRTVAKALHDRSWIRDISSALGVQAILEYINLWMTLRSVQLSDEPNSLSWRWESSDEYSSHLAYQVMFLGRSRFEYKSI

SEQ ID NO: 163786 - protein, 247 aa, Oryza sativa
  unsure (1)..(247): unsure at all Xaa locations
  Clone ID: PAT_MRT4530_62749C.1.pep
MQGGANNKGLVCLIAAAAVVLVFAGSSGIAAAQAXRAEEGVLQEELPQGGGDRAAGGVEPRRRQPGARRQVPPHVLPRLLRQXGCDASVLLDSASNTAEKNAAPNLSLAGFEVIEEVKAAVERECAXGVVSCADIVALAARDSVSYQYRRSLWEVETGRRDGTVSSDQEALADIPAPTSTFPILLANFSAKGLGLQDLVVLSGGHTIGIGHCNLFSSRLFNFTGKNNPSDVDPSLNPSYARFLQGQC

SEQ ID NO: 163787 - protein, 212 aa, Oryza sativa
  Clone ID: PAT_MRT4530_6274C.1.pep
HCLIGVRFWSLALDPSLPRARPFPEPRTAATAPSPSPSRRAVACRRADVAIAACRRRHRCCAALAGLAPCAARRPVAPRRAPYRAASRPEPSARPIAARQSSRPVAVAPRYRRVAARRVPPRAARRRCRRRRQRPVAARPVAASCPAPPLSCRRAATFEAAAPSPRSRRAVRRRLAPPSPSRRPRAAAPPPSCRRTVRRATSSRRRRRHRRW

SEQ ID NO: 163788 - protein, 97 aa, Oryza sativa
  Clone ID: PAT_MRT4530_62750C.1.pep
GGRAARRGGGRLRGHEDDPPPAVGEVGGHDGGAPVQALLRGAALARRRRGCRAPRRRGGGGRHFFFPVRADHGQPLPAAPPGLHHPVGITDLLRRRD

SEQ ID NO: 163789 - protein, 642 aa, Oryza sativa
  Clone ID: PAT_MRT4530_62751C.1.pep
MDDPSSCNHELRLMGMRGDDEDDLEEEHVQVFGITSSPPHFDGSQPETEPDVDGTGGGDGDGGSGALSGTDSSATNKRPRSSKVWDDFEEHFESRNGAKSMLKLNADGTVRPWEYDPDYARTELVKLIAVEDLPLNFGQSPTFEEYIQNVHNPRFQAVSRQTISRDVFKYFDKSRAMLIERFKSVNSVALTSDIWSGNAKEDYLSVVAHFVNSDWQLEKRILGLVLIDVKHTAENITERVLSVVEEYGLTDKVFSITLDNASSNTKAMDFLKPKLSAYVGDLYLHQRCACHIINLIVKAGLEVFKPMLQDFRTAISFVNASNQRIALYKNWCIAKGVRPRKFGLDMDVRWNATYLMLKHLFPHKELFSLFIETHYPRENGRLLLTDLHWTIVETVLLFLEQFYDSTVILSGVYYPTSPLIMHHILEIAGHLNTYENDNNFRNVVVPMKSCTAGKKKIAWGKIFGASDALGHGAGASPGSGLGAGLGASASPGSGLGAGPFSRRTSATALIQAVSSNANLNASELSAYLDSDTVNQFDDDFNILNWWHEHKHTYPVLSILARDVLTVPVSTISSESAFSLTGRIIEERRRRLGPNMVQALALIKDWVQADKKLQHTAENVELIKSFENLCLDDVTSGSATGTG

SEQ ID NO: 163790 - protein, 307 aa, Oryza sativa
  unsure (1)..(307): unsure at all Xaa locations
  Clone ID: PAT_MRT4530_62752C.1.pep
RKKLDYLRSRFYXQGDGHKKKDRLAKWDIICRPLDQGGLGIHDRGLEFMXLEVKNIALLSKWLYKLLTTDGTWQQMLRNKYLGSQPLSQAFWKAGDSYFWASLMKAKQYFLRFGSFRIRDGTQIRFXEDKWLGNASLRDQYPCLYNIARHKQSTISQIFQNNSPSFSWRRDLIGAKLAAWHNLWPRIADLVLTNEQDEFHWNLTPNGVFSVKSHYLALVHTGVPNINRRIWNVKVPLKVNIFLWYLRRGVILTKDNLAKRNXKGSKKCCFCHKEETIKHLFFQCPENKWIFLLARSEAWRVSSKFKP

SEQ ID NO: 163791 - protein, 109 aa, Oryza sativa
  Clone ID: PAT_MRT4530_62753C.1.pep
MLINELKRMCAPLATALAEELSSRPARSPSTVASSSSSSVDLSIEDLLALIYFGSLFDVKPQTEFVATMLVRAKERDCCSTFDYEKHGAVKRYTFPCCMASSYGQGFHR

SEQ ID NO: 163792 - protein, 60 aa, Oryza sativa
  Clone ID: PAT_MRT4530_62754C.1.pep
SSSSMEATSEIAQNRPQTPPPRALPVGVPVTACVEPTIGLAPVVSVTEGSTAIASQTPNR

SEQ ID NO: 163793 - protein, 76 aa, Oryza sativa
  Clone ID: PAT_MRT4530_62755C.1.pep
MSKIEEPLTIEPHSEPSTSASSIDEKIPEQPSVENEEIQTPDRAATLFRDDFDEDYGNTLDEGLAFSVRSTGFRHG

SEQ ID NO: 163794 - protein, 85 aa, Oryza sativa
  Clone ID: PAT_MRT4530_62756C.1.pep
SNYCIPNKKKKKKKKKKKKKKKKKKKKKKKKKKKKKKKKKQPSKEKEKKKKRNKIKLNERKKKNEKTEGGPGFKETQFSLRGGRL

SEQ ID NO: 163795 - protein, 644 aa, Oryza sativa
  Clone ID: PAT_MRT4530_62757C.1.pep
MALAMTSTSPQPPPPSPRRRWRRRPLLRPGVSSPPSRCRPSPSPKAKAALPLLSDVGRDPTAIKYYSRVASNLVGAGRLREFLLAAEGLRAASGDAGFEGRISRRLLSRGVAAALRDQGLPHVLEFLRDAGRVGIRAAVMLDADAYDTVAAACRLLLAERSMTEFVEAVEALAQCGFFVQGIVDPMDVLKIFVKKRDPNMAIRYARIFPQSQLLLCNTMEAFGKRKELKHALTVFGALKDQFGGINMFACRSIIDICGHCGSSVQARIIFEGLLADKITPNVYVFNSLMNVNAHSFSYNFSVYKHMQNLGVPPDLTSYNILLKTCCNAKEYKLAQEIYEEIKKKEQNGLLKLDVFTYSTMMKVFADAKMWKLASDIKQDMQSAGVRLNLVTWSSLINAYANSGLVDRAIEILEEMTRDGCQPTAPCFNIILTGCVKSCQYDRAFRLFYDWKEYGVKISLSPEQKGCFGDNFSYCEEHTSNSSTLLVVPFRPTVTTYNILMKACGTNGERAKSVMNEMRRNGLCPDLISWSILMDIYGSSQNRDGAIQALRRMQRVGMKLNVTAYTVAIKACVENKDLKLALHLFEEMKAHQLKPNLVTYKTLLTARNKYGSLQEVQQCLAIYQEMRKAGYQANDYYLKNLIVEW

SEQ ID NO: 163796 - protein, 81 aa, Oryza sativa
  Clone ID: PAT_MRT4530_62758C.1.pep
MGSGPGQTLGMPLTERGAPHRETAQAPLCRFDRGLRPGIYLTGTNVPSLRGNTLAPSGNERLEALVLTGWGEACVRPPVAT

SEQ ID NO: 163797 - protein, 107 aa, Oryza sativa
  Clone ID: PAT_MRT4530_62759C.1.pep
MSSSNDQAEPQFKRVASYIPRTPSTAIHDSIRCTGRAMTSHPIKASDPQHGHRHCSPNIAPCHRIEPNQRDMRQYSNLESLAPFYNTADESDLLSSPASLLVVVWEP

SEQ ID NO: 163798 - protein, 44 aa, Oryza sativa
  Clone ID: PAT_MRT4530_6275C.1.pep
PHPPLGGPFSFRITKGFGKTLFADRVIPPDWQPNPVSSSIVQFD

SEQ ID NO: 163799 - protein, 446 aa, Oryza sativa
  Clone ID: PAT_MRT4530_62760C.1.pep
MPRTVAVVGAGAAGLVAARELLREGHAVTVFERSARVGGTWAYDPGSDPDPPCLDTAAPGAAAVHGSLYASMRTNLPRELMGFSGFALAGRVFAGDPRTFPGHREVLAFLDAFAVESGVAGRVRLRAEVVRVGPLAGHGERWTVAWPGEGGVEEEEEEGVRRRRGIGNWQGKQMHSHNYRTPEPFQDQVQDAVSVTVSIVVVVGLGASGVDIAREISNVAKEVHIASRYTEDRLGKVDTFQNTWLHSEVDCIQDDGQVRFSEGSASIAADTFLYCTGYRYHFPFLDVEGVTVDGNRVGPLYKHVFPPKHAPNLSFVGLPVKTIMFQSFELESRWVARALSGRAELPGEEAMAAAVEEDYRRMDAAGKPKRHTHALMPDWLTMFRPLVAATIDERQVEYMDWVAAQVGEPPMEARRREIYEKALRCIWSLDDSYRDSWEEEEEEENR

SEQ ID NO: 163800 - protein, 381 aa, Oryza sativa
  Clone ID: PAT_MRT4530_62761C.1.pep
MGFSGFALAGRVFAGDPRTFPGHREVLAFLDAFAVESGVAGRVRLRAEVVRVGPLAGHGERWTVAWRGEGGVEEEEEEVFDAVVVCNGHCTVPLVPKLRGIGNWQGKQMHSHNYRTPEPFQDQVQDAVSVTVSIVVVVGLGASGVDIAREISNVAKEVHIASRYTEDRLGKVDTFQNTWLHSEVDCIQDDGQVRFSEGSASIAADTFLYCTGYRYHFPFLDVEGVTVDGNRVGPLYKHVFPPKHAPNLSFVGLPVKTIMFQSFELESRWVARALSGRAELPGEEAMAAAVEEDYRRMDAAGKPKRHTHALMPDWLTMFRPLVAATIDERQVEYMDWVAAQVGEPPMEARRREIYEKALRCIWSLDDSYRDSWEEEEEEENR

SEQ ID NO: 163801 - protein, 93 aa, Oryza sativa
  Clone ID: PAT_MRT4530_62762C.1.pep
MASLRTAREPETAAMLRAVRATAQACTACGVRWWRTAASRRGCRVASTVVACGGAVRACGGGERGGGVLQRGAGGVACDGAAGAGERRHSPRG

SEQ ID NO: 163802 - protein, 309 aa, Oryza sativa
  Clone ID: PAT_MRT4530_62763C.1.pep
MKATHYPLSTSAPSAYGLRNCDIASRLEFLIPLLGSYEVLLKTVKRSYRILTSDIEEVIKPNFAQLQECGLTVCDIVKTNPRLLSFNPERIKRYVHRADMLGVPRCSPAFRMAVCSTNEGSVTARMEFLSRTLGCSMDNILIAVGKRPTILGLSMDNLRRKIEFLVTEVGLKLECIVECLGILRYSLEKRMVPRHSVMEILRARGLMKKGASLYGLIMQGEADFVARYIDTHKDMVHGLADAYNASCFGKMPVVPDSTVKKRHGRRDIYCRGFAMFEIWNLLSYMLDNYTCRSALHLADTLLEFSELQQ

SEQ ID NO: 163803 - protein, 75 aa, Oryza sativa
  Clone ID: PAT_MRT4530_62764C.1.pep
MWQMDDLSGQKRICVIRDVCGHHRLGFPSGSGLLCCWAAGLWEPINQVEWLWEPRSNDLTREVGTLPNELLKNIS

SEQ ID NO: 163804 - protein, 69 aa, Oryza sativa
  Clone ID: PAT_MRT4530_62765C.1.pep
WPAITYIIIHGHGPDRLPHPVDTYSGDADRRYVAGIIPTHTNASAQNARPGAWCRSVCDHVTHALRMMT

SEQ ID NO: 163805 - protein, 68 aa, Oryza sativa
  Clone ID: PAT_MRT4530_62766C.1.pep
MWEVAELDYRTCQLDLDVSDGCIYSSHGHITSWTGAQQQSHWVSRCLSKLDFGNTKRGRKQAMNVDGL

SEQ ID NO: 163806 - protein, 187 aa, Oryza sativa
  Clone ID: PAT_MRT4530_62767C.1.pep
MQQSYGKKESICDHSNQPVEFLSNPFFTEPVHRIRKLGGFPSNAGVGHAPARALVPSSAMPASLVGPRGEETDPTSRRGKQRPDLDEAEPSDRSTAGGRFLCRRRIVPIFSLAPLLSLHTVHLLHHNTIAFASSGVPTRGRWKGVLKDRVDDSCCSVRAPPQGGGLRCDMLLPIQADWAIVVLRRTW

SEQ ID NO: 163807 - protein, 170 aa, Oryza sativa
  Clone ID: PAT_MRT4530_62768C.1.pep
GRDGNQATSRWSSCRTRSSPSLCIEFASSEVSRPTPASVMPRREHSSLRRPCPRASSGHAGRRRSERRWGGRPSRPPQYAKHRSPPEFPPLTPTPTRDSAGSDEPPREAAARSGRGGALRPVDGWRSVPVPEKVGEAEVGRAPAEVGCVCYRGRGRRSAAAPPRSLVRVC

SEQ ID NO: 163808 - protein, 53 aa, Oryza sativa
  Clone ID: PAT_MRT4530_62769C.1.pep
FVFLNQRVYSHLIIIQLIPTQPWFKPTLFIVTYSTKLKPPLTWLKNHQIPSLV

SEQ ID NO: 163809 - protein, 165 aa, Oryza sativa
  unsure (1)..(165): unsure at all Xaa locations
  Clone ID: PAT_MRT4530_6276C.1.pep
MDTCDARGYSSSSSATTRRLQSLYSLFGGKYTATVQIAQGAAGTSQGTQTTIVDIQIHVLQKYKRLQIQRKRQKRAKPEDLTPATRRLHSTGILDGSDETNFFETSPTEKNFNSGVGEKXSKTEYYPLYSASHTGREGRRTSGRDTWGAAVGVDATYDELECKCP

SEQ ID NO: 163810 - protein, 50 aa, Oryza sativa
  Clone ID: PAT_MRT4530_62770C.1.pep
ELPLPVVNRKDIYLASLREDSSTTDHIIHATLCLSNVQKTTNSIIIRVDG

SEQ ID NO: 163811 - protein, 127 aa, Oryza sativa
  Clone ID: PAT_MRT4530_62771C.1.pep
KEMPSPLRSLLLRLALCGSANPRRCSSSSSSMLRGRRGFRRELAGQTCLCFCCVSGLYRPPRHGMSDVSVMLLVVARLARARQVFDGMPACSDAAQLPCLRLHYAPCQPCLPVAAHQNSEHSVMCQP

SEQ ID NO: 163812 - protein, 276 aa, Oryza sativa
  Clone ID: PAT_MRT4530_62772C.1.pep
MSKGPAPFLNIGKRAKDLLYKDYNFDQKFSLTTTSNSGLGLTATGVKIDELFIGDIQTQHKSGKTTVDVKIDSESRVSTTVTVDEALTGLKTSFSFRVPDQKSGKLDLQYLHDHFALNSTIGLTSTPLIELAATIGTNELSAGAEVGFDSTSASVTKYNSGICYNKHDFSAAVLLADKGETLKASYIHTFNETNGATVAAEVTHKLKTKENYFTIGSSHAIDSSTLLKTRFSNGGKVGVLCQHEWRPKSTVSISAEYDPKVVSSPSRFGVAIALKP

SEQ ID NO: 163813 - protein, 40 aa, Oryza sativa
  Clone ID: PAT_MRT4530_62773C.1.pep
LFSSVCWVYCTARRLIDHISLKVAAEDWILIIHGMIPPLV

SEQ ID NO: 163814 - protein, 70 aa, Oryza sativa
  unsure (1)..(70): unsure at all Xaa locations
  Clone ID: PAT_MRT4530_62774C.1.pep
KIENAIDRAIQXLDGNQLAQADEFHAKMKELEGISNPIIPRSGQAVVRHRLHHMRHVLPPRLVRLGLGQY

SEQ ID NO: 163815 - protein, 723 aa, Oryza sativa
  Clone ID: PAT_MRT4530_62775C.1.pep
MAAAAASQPRSHQPTSLRRAPPPSSAAAKPEPNEKASNSKPASPVQAPSPERTVKKLRLAKALTLPEATSVSEACRRMALKRVDAALLTDSNGMLSGILTAEDISGRVIAEGLRPDETNVAKAMTRNPVFVMSNSPAIEALQKMVKGKFRHLPVVEHGEVIAMLDITKFLYDAISRMEKAAEQGSAIAAAMEGVERQWGNDFPGPHSFIENLRDQLFKPSLSTIITENNSSKDLVLRLVAQSLSPDVTLVEKVEGASEANSMANTMMQKFWDSALALQPAEESDALSESLDELVSAVSYRLGMEKEKINLLQYDDDEGDRVVLTTDGDLSAAIQHARSAGWKVLRLHMDEPWSNGEHTTSLVNTSPVKTGRSFLRLGIAAGAVAVASMGVIFRTAYWLRFWAQLQRCDEDEEFLKVVCRKLESTDSHMEKSRDKVNITPDLNKGKETVYALLQFFFNMNCMPTPSPFLFFLFCNMGSNSRYINRQIIEGWEELRVNGLYHGNICLENVYYCKDNEKITIKLANFQSKGAMSKEAAQLEDINAIGRMLKSISALAKIGVPHQAERYMLVDHLAMNLEFLANTQQIGTIKDVILDHVFFWFKERRKRFFIYDIPKALKDAAFCNNVRRGQTCVLEWDKKPHHGLLGSMNRYRKTNLNLPAYDGNDPIQNVKFVSGAYTHEEEVQDDLTFNGMSSTVDEAVQSEQPMLCLNLYKCLSPEGPLANQS

SEQ ID NO: 163816 - protein, 95 aa, Oryza sativa
  Clone ID: PAT_MRT4530_62776C.1.pep
MSSSKGLSSSVPPQGGSGASKRHADIHHEVTNLPGSKGFTPSRNNNQQPYNGQGAHSLTYGFKTFATKHPRKYIFLSVQTDKVAFLGALESSQSS

SEQ ID NO: 163817 - protein, 123 aa, Oryza sativa
  unsure (1)..(123): unsure at all Xaa locations
  Clone ID: PAT_MRT4530_62777C.1.pep
CNYRWETLSLSLTTTLLDWINNTIIFIIGVGRMHFKRYQIVRLYIAIPLTFLYXVMALFGFIKAIDWYSIVAXFCHPSTVFXFGKSTQETMAKMIETLGFGVIXFERRLSFRLRSRALFPLYC

SEQ ID NO: 163818 - protein, 1484 aa, Oryza sativa
  Clone ID: PAT_MRT4530_62778C.1.pep
MPDAAAAAAAAQDADAVMRDAPADAAAGGGDNDDDDGDDGTEEDEEEDDDEEGDEEELPPAEDPAAPEPVSALLPGSPNQLTLLFQGEVYVFESVTPEKVQAVLLLLGRSEMPPGLANMVLPNQRENRGYDDLLQRTDIPAKRVASLIRFREKRKERNFDKKIRYAVRKEVALRMQRRKGQFAGRANMEGESLSPGCELASQGSGQDFLSRESKCQNCGTSEKMTPAMRRGPAGPRTLCNACGLMWANKGTLRNCPKAKVESSVVATEQSNAAVSPSGIDNKELVVPNPENITASHGEVLHSFKGDWGEIGEIVTRFPRTRFPNYSTVSLRGSSAREITRDALLQKVSEERQLRSHLRRAAAAALSIQQLTKSANHLMWPFQKEVHRVIRHVAVVHMWRVWRRYSVIRIVSEQLHEEWEALINQPDINLTKQWISSMMLRPFLFFVTQPSSWYKGQQDKTLNSISACFKIILNSINSMDASKNLCSFAVGTPEERCNHSCCKDGNMVQITDTAMRLAVSLTDCKTWKKITSEDTRAADASVESLIEFIGASQSGTYSCLRRYIVNLGSHALEKKISSISTDDQFLITASAVTIALRPFHSMRAGRGADLNGASKEYFTLILTIPDLCKRLPPLLLPAIKHISILQPSLDILLISKDKIFEEITKLEKSGVSSGGSGTIPYCGWALGNLVTLATEHDDLSNSGCFVQGLDCCLYVDAINCVSQSLLKFFEENKEMLLSFGDSVDTSFIKENDTSDSCSRTLFMDLLKPIYQQWHLRKLLVLAKEDAVCKRQNNHDPDTQTHSRSLKLLDIVCFYYHMLRIFSLLSPSIGSLPILNMLSFTPGFLVDLWGALEIYIFGQAVHKLQGPKHERESATSSSGEHVSSMRQRRNFKDTSNKWSNVFQKITGKSNDAEDTNLVDNPLNSEQNGEALILWDIEAMRQGSECIGKDLMQMLYLFCATYGHLLLVLDDIEFYEKQVPFTLEQQRKIASSLNTFVYSTFIQNGGSSSKPLIDVTVRCLNLLYERDSRHKFCPISLWLAPARNGRIPIAAAARAHDAAFATLPGNQFFGIPIRSSVLTTIPHVYPFEERVQMFREFIELDKASRRVTGEVSGPGPGSIEIVIRRGHIVEDGYRQLNCLGSKLKSCIHVSFVSECGLPEAGLDYGGLSKEFLTDLSKAAFSPEYGLFSQASASDSSLIPSNSAKLLDNGIDMIEFLGRVVGKALYEGILLDYCFSPVFVQKLLGRYSFLDELSTLDSELYRSLMQLKHYEGDVEDLCLDFTLTEELGGRRIVHELRPGGKNISVTNENKLHYVHAIADYKLNRQILPFANAFYRGLGDLISPSWLSLFNANEFNQLLSGGLQDFDVDDLRNNTKYTGGYTESSRSVKLFWEVIKGFKPTERCMLLKFVTSCSRAPLLGFKYLQPSFTIHKVPCDVTLWATIGGQDVDRLPSASTCYNTLKLPTYKRSSTLRSKLLYAISSNTGFELS

SEQ ID NO: 163819 - protein, 516 aa, Oryza sativa
  unsure (1)..(516): unsure at all Xaa locations
  Clone ID: PAT_MRT4530_62779C.1.pep
TKLSAIDQWIGKEIGGSRLTKFNFLPANGTRGGIAIFWDDSIVNMINFSHRTHYLSATATTIIENLSFVIXVYGPSEDSDKESFLVELIAAKPPTDTPWLIVGDFNMICEARDKNNHNLNRRLMGRFRAALNTLELKDIRLQNMRFTWSSEQGNLILSILGRMLCNSEGDIFISGHSLLALFTSCLDHYPLLLXAPMQDPKRSPRFRFENLWVRVEGFLGVVTQAWSKPIQDGHPCLXLSQKLRNTETTLRQWSKXKFGQLKLQFIMVHELIYWLYIALETRTLLVEEHQFSKYLKIRILGLAAVEKARKKQASRVKWFKEGDANTRFFHIKMNARRRKNFIHCLQQDGNTIHTHEEKAAHLHAHFNSILGTRRPXGCTKLGSPRIKKIQDDSMDEPFTDDEIWAAIKNSLXEKAPDPDSFTGXLFYKSFCQIINKEIMEVLQSFYSLFGGNFGSINRPMIALLPYHDSPCSVNDFRPISLIHSMAKLISKNLAMRLVARLGELVSHAQSAFIKKR

SEQ ID NO: 163820 - protein, 353 aa, Oryza sativa
  Clone ID: PAT_MRT4530_6277C.1.pep
MRRHHLLGLLRRAAASSTSAASSRAGPHPSLHAPGPLRNGGSAPRFFSSRGGAGAASKGLGDDEVELYSLLLGVSIGDEGEASSRGPAASRGGRRGRNSKRQPPRSRFDGDGVGCRLHTLGHGGPRAAEYLKKHLFKNLVKHPKFLKDTKLAISNVFSPSFRLYLFYQTFLKTDADFLQSISSDRYRDDGSTAVAAILIGNRLYVANVGDSRAVALKAGKAVPLSEDHKPNKKDERKRIEDAGGIVVSDDIWRVDGILAVSRAFGNRLMKRYVKAEPNIQEKVVDEGLEYLVLATDGLWDVMRNEDAVSLLKAQDGPKAAAMKLTEVARSRLTLDNVTCIVLQFHHGKSTNSK

SEQ ID NO: 163821 - protein, 1386 aa, Oryza sativa
  Clone ID: PAT_MRT4530_62780C.1.pep
MDGGGGETYGCGGGRREGGWAWAAAAADSVFSRSSSSAREDDEEDLRWAALEKLPTYDRARTALLALPPDGELREVNVRRLAADEQRALLERVAGVADDHAGFLCMFKERLDRVGIKLPTIEVRYENLNVEAESYVGSRVTTLTSKQGLGNALHITRKKKQKISILHNVSGIVKPHRMTLLLGPPGSGKTSLLMALAGTLPSTVKVSGTITYNGHTMDEFVPQRSAAYVSQHDLHMAELTVRETVSFSAKCQGVGHHYDMLMELLRREKEENIKPDPEIDLYLKILGLDICADTIVGNNMVRGISGGQKKRLTTAEMLVTPGRALFMDEILTGLDSSTTFQIVNSIRQTVHILGGTTIIALLQPAPETYELFDEIIILSDGQVVYNGPRDHVLEFFQSIGFKCPERKGVADFLQEVTSRKDQKQYWTHGDSTYRYISAAEIAEAFQSFHVGQAVRTELVVPFGKGKSHPAALRTSKYGVSMKELLQANIDREILLMKRNSFLYIFQAIRLTVMAINTMTVFMRTNMHRDSIENGRIYMGAQFYGMLMIMFNGLAEMGLAIAKLPVFFKQRDLFFYPAWTYSLPSWILKTPISFLNTIVWVFLTYYVIGFDPNIERFFRQFLALFVMSEATSGLFRFIASLTRDPVVASTMGSSCILISMLSSGFILSREEIKKWWIWGYWISPLMYALNTLAVNEFLGNSWNKTISGFSEPLGRLVLESRGFFPEAKWYWIGVGALLGYVILLNVLYTICLIFLTCTVDVNNDEATSNHMIGNSSSGIKGMVLPFVPLSITFEDIKYSIDMPEALKTQATESRLELLKDISGSFRPGVLTALMGVSGAGKTTLLDVLAGRKTSGYIEGNITISGYPKKQETFARVSGYCEQNDIHSPNVTIYESLMFSAWLRLPTKIDSATRKMIIEEVMELVELYPLKDALVGLPGVSGLSIEQRKRLTIAVELVANPSIIFLDEPTSGLDARAAAIVMRAIRNTVDTGRTVVCTIHQPSIDIFESFDELFLMKRGGEEIYVGPLGQHSCELIRYFEAIEGVSKIKHGYNPSTWMLEVTSPMQEQKTGVNFTQVYKNSELYRRNKNLIKELSTPHESSSDLSFPTQYSQPFLTQCLACLWKQRLSYWRNPRYIAVKYFFTIIVALLFGTMFWGIGQKRNNKQALFSAMGSMYSTCLTMGVQNSASVQPIVSIERTVFYRERASHMYSPLPYALGQVAIELPYIFLQTIIYGMLVYAMIGYEWSGAKFFWYLFFMYFTLSYYTFYGMMAVGLTPNYNMSTVVSTGFYTMWNLFSGFLIPLTRIPIWWRWYYWICPVAWTLNGLVTSQFGDVSDKFDDGERVSDFVKNYFGFHHELLWVPAMVVVSFAVLFAFLFGLSLRLFNFQKR

SEQ ID NO: 163822 - protein, 401 aa, Oryza sativa
  Clone ID: PAT_MRT4530_62781C.1.pep
MTPFSPHLVAAAAALLGVLATAVAGGGTGAYTRVFSFGDSLTDTGNALHLPSTGGGGGPASRPPYGETFFRRPTGRASDGRLAVDFIVEALRLRHPAPYLAAGGETAAEFRHGVNFAVGGSTALPPEFYEGRGLKPFVPVSLANQTAWFYKVLQILGSSDHGRRKIMASSLFIVGEIGVNDYLVSLVGNLTVGEVETSVVPHIVAAIRSTVNEVIAAGATTVVVPGMIPLGCEPQLLALYQGGGGVAGDDYDPESGCMTRLNGLAEHHNRELRRAVAELRGAHPGASVVVAYADLYRAVADIVASPGRHGFGGAPLAACCGAGAGAYNFDMAAFCGAAGSTACADPSAYVSWDGVHFTEAANRHIACAVLEAGGGAPPAVATPLATWSAAAEAGRSRIGCS

SEQ ID NO: 163823 - protein, 70 aa, Oryza sativa
  Clone ID: PAT_MRT4530_62782C.1.pep
MWAPQIKWAKLFIWAVASQFLLGQYSCLRVSVWAPHPSGNASPCQLPNTSPSSCLPSAGPITTYESNNEI

SEQ ID NO: 163824 - protein, 96 aa, Oryza sativa
  Clone ID: PAT_MRT4530_62784C.1.pep
MAGSLQAEDTLMHPDKLGMRTLYGELAYCPYMHVARATGLQTSTDGRITFSLQGYILLGSNKCDYAAKLVRLRLCTLMCARLRAPDAEGVTLEDHL

SEQ ID NO: 163825 - protein, 118 aa, Oryza sativa
  Clone ID: PAT_MRT4530_62785C.1.pep
MDSLLCNIWTDPISSTEKCNNGVKLLEPELSIAATNRKRHGKRERVEDCNCSIHPPSSLSFILSSWPKKAPGRACEDDSDCAIVAERRKEAKRDHGCTVRCEKSRESRPPPPWERGKR

SEQ ID NO: 163826 - protein, 71 aa, Oryza sativa
  Clone ID: PAT_MRT4530_62786C.1.pep
MAGEESTASAEAEGSGARGCARWREIASPWLPSPFLRCCAALPHADAGLLRRLNDLLDLLESELGLLDGVR

SEQ ID NO: 163827 - protein, 67 aa, Oryza sativa
  Clone ID: PAT_MRT4530_62787C.1.pep
EQCICWFVTPPKLWETVMCVKKNGRATEQSTSRAKLYMALYSKQSWEPLSFYSSSAPGSCGAPLLQS

SEQ ID NO: 163828 - protein, 117 aa, Oryza sativa
  Clone ID: PAT_MRT4530_62788C.1.pep
MKYLTVMKQWLAAKCFKGPATKRKRKGREPREEEVLLARRRTGDGAWRLRSKTTGDGGAKAAGKSSVVGARRMCGSGVTLWGEEKARLQWTEGSLRARSEVWRESGEIDRVSERARR

SEQ ID NO: 163829 - protein, 200 aa, Oryza sativa
  Clone ID: PAT_MRT4530_62789C.1.pep
MPPRRSYPGEGEIMVGRKPLRRRRHDAPPSPPLFGATPRPTSPRSSSASVAAVAEELDGLLLTAPRPSASSSEPRSFPYVVKQRCWEKAERVAGRDPERWRRDALGNVVFRKLVGCPGCLCHDYDHIVPYSKGGKSTLENCQVLQATVNRSKGNKTELSKSELIQKSAYCRVSGRDMDLLELSAYGNVRRGPDSGGCRIQ

SEQ ID NO: 163830 - protein, 381 aa, Oryza sativa
  Clone ID: PAT_MRT4530_6278C.1.pep
MESNQHKASDPQDSMVHLDLDEDKIMVTSALPCPSMSVGKSVMRKRGRPSRHARGTSLSSVTPEDNPREAVDDILMTFGGLHRRIMQLIDVKMASKQLVFQALNLMRKVGYHVNKDKRVGEVPGVKIGDIFYSRIEMLLVGLHSNINRGIEFMSGAFINKEDKIATCIVSSGMYENGDDDPYTLVYNGQGKVHHKLEREIARVCVVNNIDSEDAPNNFTYSTKLDNGNHMVSANKMCVCKCTSSCLGEDNCSCLKTNGSYLPYNSSGILVCRKTMIYECNDSCACTINCSNRVVQRGSYLHFEVFKTMDRGWGLRSWDPIPAGAFVCEYVGVVIDKDSLVEEDEYIFEVTRPEHNLKWNYLPELIGEPSFYDMNDTFKKLC

SEQ ID NO: 163831 - protein, 65 aa, Oryza sativa
  Clone ID: PAT_MRT4530_62790C.1.pep
YNTGWPRCFNGQPSRGTNSHARGNRPHGLMLLSFKWFVAYLLKVDPTHRPDISCNFYPYHHFNLN

SEQ ID NO: 163832 - protein, 307 aa, Oryza sativa
  Clone ID: PAT_MRT4530_62791C.1.pep
MRAAAAAAGQIDPSPGAPAKSRLKRLFERQLLRVSPAERLPSVAGVGEKDESSEPSSVCLDGMVRSFLEDGVGVERPAGAARCCNCFHGGEASDDDDDGPAAAEAAATSDAAETIKGLVHCASLRERNLLADVSTLVERHRAAGARKRDLLRLLADSLRAAGHDAAVCISRWDKSSSHPKGEHAYLDVLLPPASDRAERERILVDVDFRSEFEVARPTKAYRAVLQRLPSVFVGKEDRLRLLVAAAADAARASLKKRGLHLPPWRKPEYMRAKWLSPYERDVPSPQQPDASAGELAVDGEGGGAWTQ

SEQ ID NO: 163833 - protein, 84 aa, Oryza sativa
  Clone ID: PAT_MRT4530_62792C.1.pep
MAAAGGGGGSGELTWLAAGVARGEEAEEDDDEEENWGWLGYFHPIYRRLLQRVVFKLKLRWPNKFIFSYQIMISNNEYKKVILQ

SEQ ID NO: 163834 - protein, 69 aa, Oryza sativa
  Clone ID: PAT_MRT4530_62793C.1.pep
MRLSWLRKVNPYNAYNYYKKCHMQLKVGVLCIYYTCEFLRVNGTYTTNAEDLPRIEHRTSFDDEGIQNL

SEQ ID NO: 163835 - protein, 81 aa, Oryza sativa
  unsure (1)..(81): unsure at all Xaa locations
  Clone ID: PAT_MRT4530_62794C.1.pep
RXPEIRDEISTACNSLSWNPACSYKFMSTMPHQELLELVLLDSLALKEEKWVRGXIEIIRXYPTLILADTLIPXPSIFFSI

SEQ ID NO: 163836 - protein, 77 aa, Oryza sativa
  unsure (1)..(77): unsure at all Xaa locations
  Clone ID: PAT_MRT4530_62795C.1.pep
MLCLTSSSSSAPAPLLPSLADRPSPGIAGGGGNVRLSVHSSSRRAWPAKVKTTPSXPATAPKNTTMLTVAEEDPTTQ

SEQ ID NO: 163837 - protein, 81 aa, Oryza sativa
  Clone ID: PAT_MRT4530_62796C.1.pep
LAPAPRRPRTAGAARGFGASGCHGTPLGPLRRFAPRPSPSHHVAGKASEEGAQDDITLMRTTPQLPPATFNAVRQTCGVRV

SEQ ID NO: 163838 - protein, 96 aa, Oryza sativa
  unsure (1)..(96): unsure at all Xaa locations
  Clone ID: PAT_MRT4530_62797C.1.pep
WRGLPKPRSLGVVLPSLXKVVNSKPLTTGAGPPPQSSRRALSEGPIGLAGQSDMGWPVRPASARSDSPQLGLTEYGSVGSVSATPSTTIPASRGPV

SEQ ID NO: 163839 - protein, 63 aa, Oryza sativa
  Clone ID: PAT_MRT4530_62798C.1.pep
NAITSTQHQIASFPQQKHCLEAAICLISLVFPSGCSYETCCLIRRGSYGSLNLSVLILAACVV

SEQ ID NO: 163840 - protein, 177 aa, Oryza sativa
  Clone ID: PAT_MRT4530_62799C.1.pep
MARSLAHATLLLVVAVVAAAACWTTAAGENEEVAEICKKTSYPEVCIATAGKQASKYGAAVDPLAVLNMQVDAFALRTEAARKHLTEAVKTATPKAAKALDLCDSLYLDVEDNLGAARRAIGFKDAVTIRAMMGMAAQDMQGCDEQFRKVGEKNPMDHFNRSLLEMSEICRSLSNMI

SEQ ID NO: 163841 - protein, 60 aa, Oryza sativa
  unsure (1)..(60): unsure at all Xaa locations
  Clone ID: PAT_MRT4530_6279C.1.pep
MGGAFIATTCRVVAVKTTYVCHNELWNVPILDIPCAATGLMTMSXELWYXPDKLNNLGTL

SEQ ID NO: 163842 - protein, 369 aa, Oryza sativa
  Clone ID: PAT_MRT4530_627C.1.pep
MDATALAASLVPSWSAVVVLFSYLGYLATAGAVLPGKLVPGAVLPDSSRLHYRCNGLVSLLLLLVLSALGVYMGWMSPTVIADRGIELLSATFIFSVIVTFLLYYSGLRSHHKSSSLKPHITGNFIQDWWLGVQLNPHFMGVDLKFFFVRAGMMAWLFINLSLFAKSYLAGSANLSVILYQFFCAWYIVDYFVHEELMTSTWDIIAERLGFMLVFGDLVFIPFTFTIQGWWLLRNNVELSLLAATVNCFIFVIGYLVFRGANKQKHVFKKSPKALIWGKTPKLVGGKLLVSGYWGIARHCNYLGDILLALSFSLPCGTSSVIPYFYPTYLFILLIWRERRDEARCSEKYKEIWVEYCKLVPWRIFPYVY

SEQ ID NO: 163843 - protein, 99 aa, Oryza sativa
  Clone ID: PAT_MRT4530_62800C.1.pep
MGEHGMRAACGEPAEWVAKLDPHLCPWLLRLSATPVDRSPPRSPAPTPADGSEAAGRADVRGAEATVAALTGDQALYNGFGAAGMHGAAVMQPPTFGQE

SEQ ID NO: 163844 - protein, 59 aa, Oryza sativa
  Clone ID: PAT_MRT4530_62801C.1.pep
GESCPPRGWPTGCPKLKPRGFPFSAGFCRGTQISPGHPARGFLRLGLKISLVPGPCWGN

SEQ ID NO: 163845 - protein, 102 aa, Oryza sativa
  unsure (1)..(102): unsure at all Xaa locations
  Clone ID: PAT_MRT4530_62802C.1.pep
FFFLFSVAGGVSFPLPKSQXLSRRMLVVAAGRGCSFXFLVSSGLRGTHQLSQARGLGRXRSAPGSSARXAARGGTXSGWVXLGWIWXRAMRXLLLLLLCRRM

SEQ ID NO: 163846 - protein, 121 aa, Oryza sativa
  unsure (1)..(121): unsure at all Xaa locations
  Clone ID: PAT_MRT4530_62803C.1.pep
KTSSSRPVLPQHQVLSPYNEFLRQQYGIPASPFLQSAAFQLRTTQVWQQLALVAQQSPYQAINIVQALAQQRQLHQFGVLYFDRYLGRAPALLASNVPSTYGVYHRXYGAPPPPPTLGGVL

SEQ ID NO: 163847 - protein, 82 aa, Oryza sativa
  Clone ID: PAT_MRT4530_62804C.1.pep
MALSSMQRAGRRTPAVEGRQSGTGVEGRESEADVDLADGDEASSAMGKGREEREGSRGTEPVRGPKTRNRVAQLFRHCSALF

SEQ ID NO: 163848 - protein, 51 aa, Oryza sativa
  Clone ID: PAT_MRT4530_62805C.1.pep
SCAVLISFKSHMQCVAALLHFLISSAKLMYRLNLLASYVSFEHLFVERNED

SEQ ID NO: 163849 - protein, 49 aa, Oryza sativa
  Clone ID: PAT_MRT4530_62806C.1.pep
EFKFEDNTVLKYNEVFPDDDKVVAAPMMIDGGGDGDGADGGDGGDPFDN

SEQ ID NO: 163850 - protein, 123 aa, Oryza sativa
  Clone ID: PAT_MRT4530_62807C.1.pep
ISTRRPRRPLPSKAYPPPLLLPPHPPLPVVTAGGLRRCPARPPPPLPPLSYPKPPSPLPRTRAVVSARGRRIHAPSSRRLSPRGGTTCPQRHCLRHVPDGKWRKEEEGKVEGSSTARHGCMTS

SEQ ID NO: 163851 - protein, 354 aa, Oryza sativa
  unsure (1)..(354): unsure at all Xaa locations
  Clone ID: PAT_MRT4530_62808C.1.pep
MWVLHVIESILSRRKCHRCCSNRRKXLPICYIKKAMYQXEDVDEDXGNHWPTVQALISAKPKDFSITQEGWRLLCEHWSKPEFRKKSLNGGRNRLAGGDTVYQCGGSRGLVATKLYLQHKKGRQQGLAAAWQHIHRMKQGKNEQLCNQRAEEACGVINQXILINTEQHTHAAQAQPXLNNHTRLYRTNSKPGAKQIITRYNIHNYCERCETXSRKTLLNPPITAGTAIRIVLLWPEVYHCTXQDTASTSCLPCVAKILKQKSGCDNTLMKQYALELGPSTSNVGSAPDHQEAEYQHDQSAFDQEGGNEIGKDEGNDFYQEGGNEIPKEEGNSDDADGEYGMSESDYEDIDLWLI

SEQ ID NO: 163852 - protein, 512 aa, Oryza sativa
  Clone ID: PAT_MRT4530_62809C.1.pep
MADGYFYLGLALVSLLVVLFARRRRSAAAAHGDAGLRLPPGPWQLPVIGSLHHLAGKLPHRAMRDLARRHGPVMMLRLGEVPTLVVSSRDAAREVMRTHDAAFASRPLSASVRAATKGGRDIAFAPYGDYWRQLRKIAVTELLSARRVLSFRPIREEEVAATLRAVAAAAADGRTVELRAALCALVADSTVRAVVGERCAGLDVFLRQLDRAIELAAGLNVADLWPSSRLAGRLSGAVRQAERCRDTMFGVLDGIIQAHLEKTGGAGEDILDVLLRIHKEGGLEFPLDMDAVKCVVVDVISGGCETSATTLGWAFAELIRNPAAMKKATAEVRRDFEAAGAVSESALAVGELPYLRLVVRETLRLHPPLPLLLPRECREPCRVLGYDVPRGAQVLVNAWAIGRDERYWPGGSPEEFRPERFGDGEAAAAVDFKGADFELLPFGGGRRMCPGMAFGFANVELPLASLLFHIDWEASGVADPTEFDMTEAFGITARRKANLQLRPILRVPVPGV

SEQ ID NO: 163853 - protein, 63 aa, Oryza sativa
  Clone ID: PAT_MRT4530_6280C.1.pep
GQRERDSAVTAAGGVPEVTGSGGQKGLRLRSRSRAGRRSAGATGQLSASRTEVGARKSGCAGR

SEQ ID NO: 163854 - protein, 714 aa, Oryza sativa
  Clone ID: PAT_MRT4530_62810C.1.pep
MADGYFYLGLALVSLLVVLFARRRRSAAAAHGDAGLRLPPGPWQLPVIGSLHHLAGKLPHPAMRDLARRHGPVMMLRLGEVPTLVVSSRDAAREVMRTHDAAFASRPLSANVRAVTKGGRDIAFAPYGDYWRQLRKIAVTELLSARRVLSFRPIREEEVAATLRAVAAAAADGRTVELRAALCALVADSHRARRGGRALDRAIELAAGLNVADLWPSSRLAGRLSGAVRQAERCRDTMFGVLDGIIQAHLEETGGAGEDILDVLLRIHKEGGLEFPLDMDAVKCVVVDDIIGGGSETSATTLGWAMAELIRNPAAMRKATAEVRRAFAAAGAVSESALAVGELPYLRLVVRETLRLHPPLPLLLPRECREPCRVLGYDVPRGAQVLVNAWAIGRDERYWPGGSPEEFRPERFGDGEAAAAVDFRGADFELLPFGGGRRMCPGMAFGLANVELALASLLFHFDWEAPDVADPAEFDMTEGFGITARRKADLPLRPTLRVPVLVSGGKLDRKNPAPAPLRVHSALAPVNNGVKSVPAPESFWVALLPNTRTLERIRDASRDKERAAAGAVSEDALGELRYLQLVIRETLRLHPPLPLLLPRECTIGRDERYWPGGSPEEFRPERFDDGEATAAVDFRGADFELLPFGGGRRMCPGMAFGLANVELPLSSLLFHFDWEVPGMADPTKLDMTEAFGITSRRKENLHLRPLLRVSVPGV

SEQ ID NO: 163855 - protein, 80 aa, Oryza sativa
  unsure (1)..(80): unsure at all Xaa locations
  Clone ID: PAT_MRT4530_62811C.1.pep
FGXXNFQPYNDXRNXLAXXXHIKXKNTIAXPXDXXXXXKXXXXXRRLGHRRIETRXKIXSAYXSMXXXXDXWXDCVXXXV

SEQ ID NO: 163856 - protein, 88 aa, Oryza sativa
  Clone ID: PAT_MRT4530_62812C.1.pep
QHGTIHTLIRTDTSLQEKSSRKCITAAALIHQCAGLFYTRINLVQLNHPSCICAEEENSTYSTNTWDSFCSCSTLLYSNSCWQLVLNW

SEQ ID NO: 163857 - protein, 145 aa, Oryza sativa
  Clone ID: PAT_MRT4530_62813C.1.pep
YTSQATARTEAAATPTFQTPRRPELLPLPLQPPPPPPGTAGIIGGMKRRPDSVPPAPREPELEPPPLPREPPPEPIELPPPREEPPEETPPPREPPPPLNDGSISSLRCSCSWSLRLATCSTGTVTPPPPTPPPRPMRGTPRRPR

SEQ ID NO: 163858 - protein, 300 aa, Oryza sativa
  Clone ID: PAT_MRT4530_62814C.1.pep
HKALGSPKPRLANFHIHREANQRIRYPNPFPEGSSSQQQQQQQPRSAPRLHFVVRVPQPQHKQSQQGTRAPRPLTPAAQSGQGRRDVQGPQRLCFTCFEPGHFADKCPKQRRQQGQAPPRSNNGGKDVIRGRVNHVTAEDVLTTPDVIVGTFLIHSIPATILFDSGASHSFISVPFVGRNQLGVERLRNPLLITTPGGVMTAKYYSPAVPIEIQGIPFPSDLVRLITKNIAQPAHNRGHGYSNSFTLARGVPLYPQDTIPHMLLCPEIPPRHCKGGNRDNTLCTTQLKTVHRSWIIVTPL

SEQ ID NO: 163859 - protein, 96 aa, Oryza sativa
  Clone ID: PAT_MRT4530_62815C.1.pep
IEIQYELNSDKDPNRSPTGLGGPSDGSYIFVRGVTGGGIASLREYGEENARGGEGRAGAIDARYFARVPSTSQRLFPLHSASSGNAGNARTGTYNV

SEQ ID NO: 163860 - protein, 368 aa, Oryza sativa
  Clone ID: PAT_MRT4530_62816C.1.pep
MGDGSSTGWTDEKHMLYINSLEESFVTQLNDGKVSSKGGHDICEGNRTDTIVAQLHVIGIRKIANPILWVVMHQLLSQDKKESVTMQNKRAMEPLLPPVSTGTGNLLLGQQIRGGPVAPPQGRRGRRNLTVAPSLPLLSHASPPPEQLQRRRRRGSPFPSLLVKWLGAPMRPEHEGRNSARTARSGAVEFGSGPPLAGSRLDARVGGEGGGRGARAARRRRLRWRRPRREGHAEEAIAAATAVRGAHGGGGGGGRGARAARRRPRREDLAVTVAAARGRASTAASLACVHGEAVGGGDVSSPSRLKKPISWSSSPPMARSYPGRGELRERVDAAACAEDDGAMATCGSRPRAYLSRGVVNWANWWLMR

SEQ ID NO: 163861 - protein, 307 aa, Oryza sativa
  unsure (1)..(307): unsure at all Xaa locations
  Clone ID: PAT_MRT4530_62817C.1.pep
MAISPPPSSPSSMSSRFFADFSLRSSSMSPPPSISSSSPSPSILGIPSGSHPAAPKVSENSGSSPSSSSSSSSSSVVSVGGSGEELGLGGGEVSAGEGAASAAASASSGGGGGGEGLVGGEGNXARVSSSNGGGGGGDGGGGDPTTGWAAVAIWDDFFSRLSRRGGDATGEAGSARSSASSKGSVSMTSSPPPPPPPPRVLSLSLSLSPFHQTPNRDAASRGAESGTPDSRARDGGRGRKEMKKMRMKSKSSSAGDVSSFPLGFALLLYCTAFPTIFFPVLAALPALRCAAPRRNCHAETARATCEL

SEQ ID NO: 163862 - protein, 111 aa, Oryza sativa
  unsure (1)..(111): unsure at all Xaa locations
  Clone ID: PAT_MRT4530_62818C.1.pep
RTAGDGVVGGGXRVDQICGAVSVVGGWPAREGGHIGRLEAVIAAEHGEAEVRLAAALGSPSSFHGLLAREAGKRSARTATIVGANDVSTISHVWYSAYTHPRLWRHSALPP

SEQ ID NO: 163863 - protein, 174 aa, Oryza sativa
  unsure (1)..(174): unsure at all Xaa locations
  Clone ID: PAT_MRT4530_62819C.1.pep
SRECGRAPSRARPPTSGTPRGRRRRPLPPVEAKLPAPPAAAPRRRRTALEEEEEMPAIIVVVVRLTXTAATVVMTATVVVATXDRRRSRQGVARRXWFSRHXLRPLDRLGFXGGVGGGDEPRIVCRPSLHPLFMXAQGDGGPPANGLGAPNHSAVKFNPLTIGPSVALHLYIVE

SEQ ID NO: 163864 - protein, 131 aa, Oryza sativa
  Clone ID: PAT_MRT4530_6281C.1.pep
MDPHHLNRPTADDAAAADDDWDNDGFVIPSLSVEESDLGDWEAAQVSRPQPPPKATKDTEKIYLGPHGAPPSRAKKQEDTAAAATGYRDKSKVKEADQKVLGTGRDNKGGNNFNRYNNAGHHVKEPYKRST

SEQ ID NO: 163865 - protein, 163 aa, Oryza sativa
  Clone ID: PAT_MRT4530_62820C.1.pep
MMVMRLKGLMVMMSCQKYGSNVIEKCLTFGSIHDRLVIAADIAGAGEDQILMMMMDEHGNYVIQKMLETIADEWVVDLIVTVVNRNFFRLIHNIHGRHVTIPGSGKNKATSWSFDPTRVHRTQNIVQLHENYPELKDKIYEEKEAYIKKLHKEKKVEEATYLG

SEQ ID NO: 163866 - protein, 155 aa, Oryza sativa
  Clone ID: PAT_MRT4530_62822C.1.pep
MGDQSGEKTTPEVAFAAELTGERGEGSSGVEWRSGVVARLARGAVKLAVVAVRLEVYGNGGKRLPEAVKVRLLGCGGGSGAPAIELENGAEAGVWRGTAKPVVATAQRGNVGSGGSNRLEGVQAAVARPHDGKVVPAVQEGDGVDAEVRWGAAML

SEQ ID NO: 163867 - protein, 165 aa, Oryza sativa
  Clone ID: PAT_MRT4530_62823C.1.pep
SLILEMEGAVQSKVDYWQFGTEGGKTGSKGGWRRRLACKMKPVVQRCGHWTVLHASIHGRARAWPLLRRPGTPTASSMIDKTVPGRFPAVTLPHAPGHVTLLHSQSRRAPARHSPHPYSAPAASLPTLTRCPPRPGCYTHTTRPRLRPRVHVPRAREASKLRLLA

SEQ ID NO: 163868 - protein, 118 aa, Oryza sativa
  Clone ID: PAT_MRT4530_62824C.1.pep
MPAVGRSPSPEQYQPIPRAIELASIGSYLSPRAGGKFMPRRAIVIFTEAQFSLKTSGTPELLSLLITLRSERMGTRVHGTVDTVKHVGFQIISSGTRHAAARQILDTMERRTRNRVIR

SEQ ID NO: 163869 - protein, 269 aa, Oryza sativa
  Clone ID: PAT_MRT4530_62825C.1.pep
MEALAGTAAASLPALPSHQPRSRLAPRSLALPGGRSCCGPLRAAAAGGGGGAKDDAQAGVTPNGSPVIKSATFAHGLPPPALAVRNLMEQARFAHLCTVMSGMHHRRTGYPFGMELPDMFYWGSIEEWAHKQYVAKHQQWASQQWGNFYYYRMQNISDIYFIGGFGTVAWVDVKEYEAIQPDKIAVDGGEQSLKELNAIFSKPLREFLSSEGEVDDAALISVDSKGIDIRVRQGAQFNIQRLAFDVPHKVETLEEAKRALHKIIKTTSK

SEQ ID NO: 163870 - protein, 251 aa, Oryza sativa
  unsure (1)..(251): unsure at all Xaa locations
  Clone ID: PAT_MRT4530_62826C.1.pep
KIKTDWNNIRTPHKFSSLPRKAQSDLGENALSYGLQRGRXALISKANAADKEGKNAILADSYIGKLNLGFEFGELPKFAKQVKDGKVXEQDIQNIASFNDETAKLARRSEPKNRINDANVDDNQRIIRELINNEAAVDALKRIATLSDQEKAMHSTLRANEKFDMDELEESPNYTTAENKSIRDYKDTQKALNDARMDFFTEKTKFIAKETLERGGQLYFALDGLVTNSPGFRADTQINMDKLKGTELEFA

SEQ ID NO: 163871 - protein, 124 aa, Oryza sativa
  Clone ID: PAT_MRT4530_62827C.1.pep
MPSSMAAIAVATMLRALAQLIQRPESHSLSHTNTTKKASTEQRNAKLKYMGSWGDELTALNLIWQELIIGLPRPETQQNLWTKFYNTRICSLSGCSTSASSHGNKTCKPLKQQQQQQNEIKTLV

SEQ ID NO: 163872 - protein, 442 aa, Oryza sativa
  Clone ID: PAT_MRT4530_62828C.1.pep
AATFTCTECSCSAGDGRNRRPRPAVAVTTGSSLSTASAAAAACAKQQLSSEHSREQRWKRKRATTSWIGDFNAIAVWIDATTATRNDEPPPPPGMTSRRRLDFNSAGTGNDEPLPPGVSGSTSASLGAGKKSSISARRNDEPSSPRSTVPPPGLQLHRHREQRAAAAWINDVAAWTSTPSPPGLQRCRCLDRQRGPATLAHFFSRSYPCRIQQFDDFGTGRPKTTTRSGSGPRPPRAQFLSDDSGSCVPPVILLSARRHCYNHIEVEKEEERQCLRFLPPQPYPPLLLLRILHLLQDWAQKKNPAAIAVVIFLCLKEEVPSMRPDIVKSDLDDHAYMLSKTGTTEPTLPPIIIKASKPKGKRLNLLLQLTSPISRGKKTRKFEQGSTEDIIARTSLISRNVQAQLTQSGGALSVKRIHIDIERWGPKLPSVHDAEEASLMDQ

SEQ ID NO: 163873 - protein, 183 aa, Oryza sativa
  Clone ID: PAT_MRT4530_62829C.1.pep
MVLFGAPEWLAPSSNMVVPATLAPSPCHRGTRAYVQCMMWQRGAPAILAPYLIPRRQPGWRTPPGWAARSPFYLGLEAGATPPTTAPGWLAPPTSPKHVLPRAGSTYWPATCIGRGAPASLAPWYEGRRQCGWRPPLPRHPFHICPTTTVSLRRRHGGWCRHVGGRRQPLWRTKKDHSWNKFF

SEQ ID NO: 163874 - protein, 55 aa, Oryza sativa
  Clone ID: PAT_MRT4530_6282C.1.pep
NDQVSISRHQSSNSAGCNVYHILLIYTKSFLVFHNDLLVKQSNNQVRNRAKFHKY

SEQ ID NO: 163875 - protein, 92 aa, Oryza sativa
  Clone ID: PAT_MRT4530_62830C.1.pep
MAPLYLSGATEFLRWSDDDTTGGARHVQGGGGGEHGRDGTPREKTLTTPGVRRVLPPPDFSDDTGGLRDGRASAASRGEGSPAAATAGRGGE

SEQ ID NO: 163876 - protein, 85 aa, Oryza sativa
  Clone ID: PAT_MRT4530_62831C.1.pep
FLYTSSPNFYIYLLLTRRPSSPHYHFPFRKKYIFGCKGGSQMDSLTPHVLSLFQKARELVMGWWQIHHSSLLLLKEYRGKMNGLD

SEQ ID NO: 163877 - protein, 36 aa, Oryza sativa
  Clone ID: PAT_MRT4530_62832C.1.pep
MGHLSLTFEAPTGTNLHLTRAHQFSIHPPNFAIKPV

SEQ ID NO: 163878 - protein, 49 aa, Oryza sativa
  Clone ID: PAT_MRT4530_62833C.1.pep
MDFVSRRNRTHSEKNEIYMTMKKIWDEIKKMGYVPDTGSVLHDLDEEVE

SEQ ID NO: 163879 - protein, 224 aa, Oryza sativa
  Clone ID: PAT_MRT4530_62834C.1.pep
MLEPVKAEIKRLYDASFIRHCRYAEWVSSIVPVLKKNGKVRVCIDFRYLNKATPKDEYPMPVADQLVDAASGHKILSFMDGNAGYNQIFMAKEDIHKTAFRCPGAIGLFEWVVMTFGLKSAGATYQRAINYIYHDLIGRLVEVYIDDVVVKSKEIEDHIADLRMVFERTRKYGLKMNPTKCAFGVSAGLFLGFLVHERGIEVTVTFQNPSESLQKLKCAKLKVK

SEQ ID NO: 163880 - protein, 97 aa, Oryza sativa
  Clone ID: PAT_MRT4530_62835C.1.pep
GCRNSARGKRGTFRHKFLRMLLPFWSSALPTLPVTAPPRKESDAPEGRSRHQKSSRMDPTKILLALAIMACIATMGILYYRLTQRSLSENFIEDEPQ

SEQ ID NO: 163881 - protein, 108 aa, Oryza sativa
  Clone ID: PAT_MRT4530_62836C.1.pep
LGTNNSTFTLIPAISLYIRCLMAGRGAKLYMLISKTQLKMASRSPVLLFALMVCLVIVSQGVLAARELVETTKVVVDGMKVELPEGRKGAAAVSGYGGGWPGTYGHYP

SEQ ID NO: 163882 - protein, 90 aa, Oryza sativa
  unsure (1)..(90): unsure at all Xaa locations
  Clone ID: PAT_MRT4530_62837C.1.pep
RTLTPCPAPPSGXCTRRRSSSXGPTAXPPVTXHPXXXPXPTTTNQAGXRINHXXXLLLLLXRDVAGSGAQAWGLLDGDGSLCCCWWWWWW

SEQ ID NO: 163883 - protein, 105 aa, Oryza sativa
  Clone ID: PAT_MRT4530_62838C.1.pep
MRGSIAWRAALPYGRGRPDVYPRGAWTARNKPRKLNARSIDHMRMAGAAAAGIARSPPRPAPCLLRVEREIYGCVGQPRTHTHGRCGGAPCPYGRMASTWPSTAS

SEQ ID NO: 163884 - protein, 94 aa, Oryza sativa
  Clone ID: PAT_MRT4530_62839C.1.pep
MEALKRRLDELHSRAHTDLDASLSRASKRFKIQDHACQQLTDEVDKEYKKMSDSINENTEMIKAKYKQIMAEAQSSTSRGIRSILGISYPQYSP

SEQ ID NO: 163885 - protein, 125 aa, Oryza sativa
  unsure (1)..(125): unsure at all Xaa locations
  Clone ID: PAT_MRT4530_6283C.1.pep
LIVHGAQGGGHGGDGAAGGVVRARLRGHAHRHAALPVPGAAGLRPRRQVAGAVLHLQRPAAAALRRQWNGAAPPVIARGGEEANITGKPPTTATAVAEEQPPTKPPATSTASSPTHHIXATSTDL

SEQ ID NO: 163886 - protein, 202 aa, Oryza sativa
  unsure (1)..(202): unsure at all Xaa locations
  Clone ID: PAT_MRT4530_62840C.1.pep
MAVAATTAHDTAQRGGFVAAARRLEGGGTTXRRRVETRGGTHTGRRTDGDWSGERGGWWAFTGEREDKGEREXREVTGGEGGCECDGGDVTARGARVEMTTARRGSGCKAARHVAVAXREAAGARREATGRRAARQRHGSRRRWNAHAAAGGDSGDATARRGARRGTARGSARRRRRGDDDARRGAGREAARRARLRRLRRG

SEQ ID NO: 163887 - protein, 106 aa, Oryza sativa
  Clone ID: PAT_MRT4530_62841C.1.pep
SFSRIGKIELQIKSAKQILRAKQQASIQTILSATHKRMRRKREAKSRTTAAVRPCRRAPAPPLLRRRSRGAHSPHRRRGRADGAAGGGVAARFERRGRREEGCASC

SEQ ID NO: 163888 - protein, 264 aa, Oryza sativa
  unsure (1)..(264): unsure at all Xaa locations
  Clone ID: PAT_MRT4530_62842C.1.pep
MAAAAAAAKRKPVFVKVDQLKPGTGGHTLVAKVLSSKTVVQKGRAAAGAGPAARPTRIAECLIGDETGCILFTARNEQVDLMKADSTVIIRNAKIDMFKGSMRLAVDKWGRIEVTEPASFNVKEDNNLSLVEYELVNVEGSYVFQAYLVKFYLLSWLKKVKDEGDSENXHLIYSTLQSSNKQMRSITQSQCTAIGKAVNGIEIREKLLPSESQPKLLHAGAARSDVMSADAVALCMGISVSKQTLLISTGDLQNPKGNKKKHKH

SEQ ID NO: 163889 - protein, 67 aa, Oryza sativa
  Clone ID: PAT_MRT4530_62843C.1.pep
MEDGETDIRYKTAATVVMTATVVVATSIVGGHGKAWRGGDANGLGAPNHSAVKVPVVLLGPMGKRSI

SEQ ID NO: 163890 - protein, 56 aa, Oryza sativa
  Clone ID: PAT_MRT4530_62844C.1.pep
RWSVGASLLLGLCVGDVGVWVVVFFFFFLVTTLRGYNLVIFSVKLALKQWARSSRD

SEQ ID NO: 163891 - protein, 510 aa, Oryza sativa
  Clone ID: PAT_MRT4530_62845C.1.pep
MALLLLLVSSSCLVVAASIAVLCYVNNDADERLPPGPRVRLPLIGNLFLHAPTMAFLPSALRRLRRSHGPVVTLWAGNRPAVFVIGRDFAHRTLVLAGAALAHRPPSPFASSRALSFNRHGVNAAEYGDRWRRLRSNICSCLAATEALRRRSVDRLVATLELEARAGAGATGVVAPTDAFRHGVFSFFAVLCFGEWVRDGEHDAVLRDLRRAHADILALTVELGAFHLVPAVLMVPYLHRWWKLSGLQRSHRDIVAALISVRRLRREKADGDVADSATFCYVDTLLELELGEDEMVSLCWEFMNAAAKTTSTALEWTMARLVHHSDIQRKLRHDIAKTTNSGGVGVSPSPYLKAVVQESLRLHPPAHYLLAHTVDRDVPLGAGGYVIPKGAIVNYAVAEIGRDATAWTDPDEFVPERFMEGGEGAMVDAVSCGGAEIRMMPFGAGRRACPGASFAVSVLHLFVGRLVEQFEWWPVAEDEKAAAVDFSEKTGLVTVMKTPLRALLVPITSS

SEQ ID NO: 163892 - protein, 88 aa, Oryza sativa
  Clone ID: PAT_MRT4530_62846C.1.pep
GQITLLQQPLVIHQFRPKSISGEEDICHAHELGSRSASGLVGVDSGSAASAPTAERQADGCLHTWQACVSPIFGRGGDRVAWGRGRKS

SEQ ID NO: 163893 - protein, 100 aa, Oryza sativa
  unsure (1)..(100): unsure at all Xaa locations
  Clone ID: PAT_MRT4530_62847C.1.pep
MTVMVVGKVSNTLQPPXGVNLHRSLKTXIHRLHGRFGRTTRFGRTWGWPNLPTFWLVALSAASLRRHVNFGLIHRVKSAFLXHSYTSLVLDIIRLIYRLS

SEQ ID NO: 163894 - protein, 46 aa, Oryza sativa
  unsure (1)..(46): unsure at all Xaa locations
  Clone ID: PAT_MRT4530_62848C.1.pep
PTALPALPTTTPTRATAEASHRAEEASQSALDGSXDTKVPSLRFCK

SEQ ID NO: 163895 - protein, 104 aa, Oryza sativa
  Clone ID: PAT_MRT4530_62849C.1.pep
LSHVAQSESKITYSKIAPRVQSIVPYRRSSVRLFLSPPAPLHPSPPYHHLLSIPFRRHSNTIQATGAVHPRPGRTGGPLSDELKVCRIRGRTNDGHYPRRPWSP

SEQ ID NO: 163896 - protein, 156 aa, Oryza sativa
  Clone ID: PAT_MRT4530_6284C.1.pep
MTAVRQRLTPAVREKGSVVEGGRTWFRGDRAAPLRRTKPFARRRCTGPSRSYGVGPSRSCSTIAWDRAGCTRYCPPPRYRSLGMWERGGTTRPSCATAGGRFNRKTCGRTLRLIEAGGQCGWILEVALGGVDKMVRVGLLHRQCMDDKHTNWAENV

SEQ ID NO: 163897 - protein, 91 aa, Oryza sativa
  Clone ID: PAT_MRT4530_62850C.1.pep
NYNIGSNWYLILGLLGHIYIYIRERLGSSKGKKPKINWLKFRGGDKCLKRGGEEGCKQTPSFFYSGYQKLCRGGDGFFIQGTEHNLYIYKL

SEQ ID NO: 163898 - protein, 64 aa, Oryza sativa
  Clone ID: PAT_MRT4530_62851C.1.pep
GATVWVCFFPPDSTLFCFLPPPPCCPPPRPVQDRSIPETSSPVLSPLSCCTIPAVVSKKRWGFA

SEQ ID NO: 163899 - protein, 275 aa, Oryza sativa
  Clone ID: PAT_MRT4530_62852C.1.pep
MASDVPMSPELEQIDGEVQDIFRALQNGFQKMDKIKDSSRQAKQLEDLTAKMKECKRLIKEFDRILKDEESNNPPEVHKQLNDRKQYMIKELNSYVTLRKTYQSSLGNNNKRVELFDMGAGSSEPAAEDNIQIASAMTNQQLMDAGREQMTQTDQAIDRSKMVVAQTIETGTQTASALSQQTEQMKRIGNELDTVHFSLKKASQLVKEIGRQVATDKCIMALLFLIVCGVIAIIVVKIVNPHNKNIRDIPGLAPPAQNFQISNRRLLSVEIIRGL

SEQ ID NO: 163900 - protein, 50 aa, Oryza sativa
  Clone ID: PAT_MRT4530_62853C.1.pep
LTKQTTIKAVIVKVAGRLAGKEIAHAKCIKKGILPLQPILATIDSSCYPI

SEQ ID NO: 163901 - protein, 54 aa, Oryza sativa
  Clone ID: PAT_MRT4530_62854C.1.pep
MEVCIDGALGAKATGRLPLVKSGRFKRLWQDAEKQDVPRPHGLHIYEDVEVWID

SEQ ID NO: 163902 - protein, 149 aa, Oryza sativa
  Clone ID: PAT_MRT4530_62855C.1.pep
IDTENSRDERGGEGEARKEQRGEGGRGSNGGEGRSTPPARVLAPHLRSVEGAPTRLPPVAVVAEGDRLRGLHHLPRGDEGPRGGRHHVLLREDVPPTLLRGLESGDNNEISSLPVPGLLRPGPPVAAAAAADVIFGFRVLRILTLSSPL

SEQ ID NO: 163903 - protein, 691 aa, Oryza sativa
  Clone ID: PAT_MRT4530_62856C.1.pep
RDAVVSPPPWFFPWLVRCLDETIPPQRGPCWADEHKLLFRSVSGHKQVTLRVSRASCLGEKLAVRDTDGPGGRVLAVGSGGASRVNPLTGAATHLPRCFPENMAGYLGSVDGVVTGDGTVLLYYLSMSSCTFYRAAILRAGDDAWTSVHTCIDSETMSFWQQWSATYHDGKVINAGRQFYRVGMLSIAPGDVFTGRLEKRSLPQLYDEPASYSYFFELGGELMWAYVHVAAAALLDHGHYPLKGGDLVGSGAVSLWVYSREKKSGRWVKREGRRLLGSSVLFLGWTSSFAVEAGQLAGEVDGGCAYLMIDSVGRGLGRRGFLLLDRSLRGMPRLWFSRRRPRARTETAVSERSFPSTPRVLWWTLPSLAAVEARCRECGAGAGVCSFCAGVKIWTLPWKGHISTTEEASVMEISKDMADCMGIKPKTSVRITLLDDLPHITKAIITPMDDDADLSASLTPHHIATQTPTFYLHRCASILITHLLAIPSLPISTEIGVMYPGMSFPLLVNKEKIGIFKVLGTLPMTTGQITSGTKIMIWKGSDEKTVGETLYPPILHPVIATPLQMKMVDDPALSNVVGRASKMIGNFMSYYTHLPHEATKGKMTFLLHGPCDKKAVVEGIGRTLGLPVASVDASSLIKDFPSDSVSQINTCIQRPESRDGPLLIFLDRFDELVPHNRCGSTVMTDITTTQL

SEQ ID NO: 163904 - protein, 112 aa, Oryza sativa
  Clone ID: PAT_MRT4530_62857C.1.pep
PPSPLIFFPPPFSPVVSPNLSPLSILFCLFQPPPNKLKIPPPSIKKCLIFSFGGSYPWVSVVISLGLFFSILPRPRWGKKSPPPYAPFIFVSPTSLFFFIPPWFLSKIGNFI

SEQ ID NO: 163905 - protein, 427 aa, Oryza sativa
  Clone ID: PAT_MRT4530_62858C.1.pep
MAGSSGGATSSSSRNSVERFYLPPHSRRQQQQRLRSPTSPSLSPSPSPRSGRHKAAAAAPPAVVAAAAVGAGVLTDGDSRVDSDDSSSTSSKPSVASTATATTTAADVNVTAVEESGNLERFLTSTTPSVPFQYLPKTSLKMWRTGDCTNTSPYFCLEDLWESFREWSAYGAGVPLLLNGSDSVTQYYVPYLSAIQLYADPSRSVSRTRRLGDESDGEYLDASSESSSETDVDRLRVSSVEATHGMANGSLRTDDADGYASASSPIFQYMERDPPFCREPLTDKVSILASRFPALKAFKSCDLLPSSWMSVAWYPIYRIPTGPTLEDLDACFLTFHCLATPSKDSDSTTPACPGFGGISPCANATGKLSLPAFGLASYKLRSSIWASDGTQGQRVTSLMEEAGNWLSCVQVEHPDFRFFVSRSGTWR

SEQ ID NO: 163906 - protein, 65 aa, Oryza sativa
  Clone ID: PAT_MRT4530_62859C.1.pep
SNLFIFDQVSRKIYQHLQHQISFIKYNIKYILIICLFYVNMLLYFSINLIELKEVRLGKKSKLII

SEQ ID NO: 163907 - protein, 680 aa, Oryza sativa
  Clone ID: PAT_MRT4530_6285C.1.pep
LEAYGKCGGEERKGDGDFLRSFGHITFWMVDMEKKREKLVAGLTRRHMIRSGSSSSSSPTAAAAAADNNKNMSEGGDLNLISRQKKGKAKVLKWRLSNTDMDMKGEEGGSDGDYDDTVLSSLTTASFSSLISRKRVKSLGKVAEDCDAIDPPVPRKLRSAINKRASQTVSTSPRHVKKRRHLSAISSQTFLMDRETRCNAIPQLANHFSKEEEVVVDALLSLSQIPHLCELSSDRGMAEDNLDLNVTSVSYSAGATKVDEKISALPTAGTEVANQPALDEPVERTGNVSQINHVPCGGTCNNTNPTLSNDGQIHDISLGIVTNLPSQSKDYNNSRKQLKVQFDNSTIHPTKIEAPRCLENSKKPDILEHDRKNVKNNTAQEIVPPVQTSKPCASHRPSSNTLASCNNTAAETVKGTGEHENLSLVNKNGTPSKTWKRSITHVYMCHLIQMHLDKEKASQNRVKPEEVCHSHISRSPDGSTISKNGAQDEKFYALHFDVRLPVQPSCSVCDTTIARQKMVSGNFLNLPTSAALSGVQHVQYLHPPIAPRGAMPYPIQHLPYTRGNLTHTALLLQQQMPQYMCNPNPAIMKIQQQLMPNQHQHQQQQQMWQFQFPQYHHPRPDAAAAAVSAAWQHSSRLHDVSSLRPVAVLPAPPPPPPPQMELFCSPYHGGSRQPPQLRLI

SEQ ID NO: 163908 - protein, 89 aa, Oryza sativa
  Clone ID: PAT_MRT4530_62860C.1.pep
SWGAIKVELFATSLMAVIEAISGAQLSESDMRFTDMQSQREVQDSLLYACQQELNRQLTTRERLQTMLRLPDSLALRIHRFQQLQDLSR

SEQ ID NO: 163909 - protein, 101 aa, Oryza sativa
  unsure (1)..(101): unsure at all Xaa locations
  Clone ID: PAT_MRT4530_62861C.1.pep
VLSWRRKLDKLECLKWRRGGRRRKSGDPTPRSCSSPRRPTTPPRPSPGPPPSRTSSPGTAPPPPPPPSPPXTALAPPPPPPPPLHPAPPPPPPPASPSSSP

SEQ ID NO: 163910 - protein, 247 aa, Oryza sativa
  Clone ID: PAT_MRT4530_62862C.1.pep
MEDVVTDAPPPSRFSPDDLDNFAAPPPQPTPILVVSPANPSPAPRRLLILLISPTSLALLPHLPSPPPLHASLLLPELPLGRSQPPIRVYLHAPSGTLLAAAHGPAPVPAHRARAVARSLVSALQPEEVLVLDAVRSGAYRGRLAADEPVEGKLETRAARGRGGVGAARGVAALAPPGSVVDGLGAAVLAECEMRGKAASMVVTWPEGARPAEFGVMRRVAAELGVDPAKAAAGRVAGRAELDALYT

SEQ ID NO: 163911 - protein, 68 aa, Oryza sativa
  Clone ID: PAT_MRT4530_62863C.1.pep
FVQNHFFTDYHFCMGKINQAPRGERTEFLKGTQTGRNINGFPPHSNYNKSHRLSKPRQNLGVRSCQTW

SEQ ID NO: 163912 - protein, 115 aa, Oryza sativa
  unsure (1)..(115): unsure at all Xaa locations
  Clone ID: PAT_MRT4530_62864C.1.pep
IQSRRHRRTLARPTSLPAAAGGARARDRRPPAAAFVRGGVGRRRKTDATLILSTGTTVLSYGSKVLTGGEDAYSICCDGRGGAAGXAGHWAFEGINACLLARELMDRVKICCVVS

SEQ ID NO: 163913 - protein, 74 aa, Oryza sativa
  Clone ID: PAT_MRT4530_62865C.1.pep
MRRRMMNNKICNAPPDYKSAINGSTLDALLYDATPANAEICKIIKSFLDKDMGRGFITCGIKVPRRKMRGPHHT

SEQ ID NO: 163914 - protein, 75 aa, Oryza sativa
  Clone ID: PAT_MRT4530_62866C.1.pep
LLQFCFAANSDSFLFWKRSEKSGACKRRGVRISYARLIRFDYAQWRSCGRPDQATLLYINQPAVFTQYTRNQSRV

SEQ ID NO: 163915 - protein, 223 aa, Oryza sativa
  Clone ID: PAT_MRT4530_62867C.1.pep
MAMTLRPTCNAPHPGLPDPMWVARGHRMPLLGGRHPAYWVFDEEVEMLMTSKWTVPWLDVDDLKVDSQVAYFLICSHSLNNMHVEGLQVSETLWTSKEPTLNTNLPNTSSINVFSHYTLSEKRSHNAHQPVSTAPAGSLPATAPPAPLVAPIITVNMEALAMLPHISIKKQLKARTTIFVKWREYLVLIKEKRVRQAIDLVTNKGDIINFSSRREPFEDVTSA

SEQ ID NO: 163916 - protein, 681 aa, Oryza sativa
  Clone ID: PAT_MRT4530_62868C.1.pep
MAAAQLLLGEDGRGYDLARRLEACGAWRAWLGDAAHAALAQHLQTPSTWDAFLFPSSGGGSAAPPPRPLLLLQLRVRALLFDKASAALLPRAPPPAGLNSVNANYLQLHADDIYFSLEDEQEDINQHHMQSRTSFSPSRENTMLSQRHNRYEELPDTWYKQYAEKFRTWHGKFRSGDKDIPKRTSEGMSNYLKVCSVHKRKRAVFMDDQGHNISVPMSENGPSSKNAGDYSNLTDDTFIPEIRFPADCVPESAIPRTSETSRIYKIEVHGVLDNLPAPVSRNTAMLERFGMMPEYYKKGNKYRGKDGSRVEGKSLSQEQAMLMTRKLVARYLANAGFESGTAVCIDVLSEIIIKHISKLGRNLKLLTDSYRKQFSSIELLKMFLQTVGYSNIGPLMEITKTTNRGANYPMQQDAQVQNQNALLHAQQLSRQFAPQMGINTQNLTPQQQQQLLQQQWLRRNQLASPRGPLTMADKNQAMVNVKIENTVDSQIDSPYGSLTRQQLQQLRHHQLLQQQQQQFQQQQQVQQQQQQQQQQFQHQQQQQQQQFQQQHQQQQQSQQLQQQHQQQQQPQQLQQQHQQQLAMSGGQNAQLAQQLAMSGGQNAQLAQQLAMSGGQNAQLAQQLAMSGGQNPQLAQQYKQMPSMSAYGMRMPPVKVEAFHELVSGDSSLKPDSDSNKLMSPK

SEQ ID NO: 163917 - protein, 69 aa, Oryza sativa
  Clone ID: PAT_MRT4530_62869C.1.pep
MRLRLAAVGALAPLLREALAFAYALVRRGAVRVSLGRLARAPVDERGAGVLRRALGQLAANPTQTLQIT

SEQ ID NO: 163918 - protein, 39 aa, Oryza sativa
  unsure (1)..(39): unsure at all Xaa locations
  Clone ID: PAT_MRT4530_6286C.1.pep
SGKFGDSTKETIVAYNRGYQNMXKERSDNFPFTWLVDMF

SEQ ID NO: 163919 - protein, 24 aa, Oryza sativa
  Clone ID: PAT_MRT4530_62870C.1.pep
MNVHYECILLDDTLEYEWTEGCGA

SEQ ID NO: 163920 - protein, 65 aa, Oryza sativa
  Clone ID: PAT_MRT4530_62871C.1.pep
WIFWVGPFVGTALSGFSPQYILRGGAIKALGPFRSKRVISKEFDHPLLGDNGWKGFINQLAIIMS

SEQ ID NO: 163921 - protein, 94 aa, Oryza sativa
  unsure (1)..(94): unsure at all Xaa locations
  Clone ID: PAT_MRT4530_62872C.1.pep
AYRKLVRSYLPVVNKDPGAEQKFMDFGYAYEVLPEDXKRPSYAKSGESRSRGAGWGTGDYRYPCEKCVTVVKGFAGMEGNGRPCWHKHCMSPVD

SEQ ID NO: 163922 - protein, 62 aa, Oryza sativa
  Clone ID: PAT_MRT4530_62873C.1.pep
HIKEQTKFEQGHPWDGMTGRVISPGIFLIEWGEETLFFKRALFPFEQGSSSPFFLRNGGLKR

SEQ ID NO: 163923 - protein, 75 aa, Oryza sativa
  Clone ID: PAT_MRT4530_62874C.1.pep
MADQLTDEQIAEFKEAFSLFDKDGDGNARHPPLPPLSLSLLLVFLPPRWGTRAVSGRRGRIGRRGARSGRIAVSR

SEQ ID NO: 163924 - protein, 72 aa, Oryza sativa
  Clone ID: PAT_MRT4530_62875C.1.pep
LNIIITEYNFFFLNITSHRLCQVMGWTPATCTCFVVARLASPETSWRWTRRILFFLLPSPGQVTWPVCHSSP

SEQ ID NO: 163925 - protein, 38 aa, Oryza sativa
  unsure (1)..(38): unsure at all Xaa locations
  Clone ID: PAT_MRT4530_62876C.1.pep
AGEEAGXSESGSLLCKSRETRTSVYSSGVKAXRRITSR

SEQ ID NO: 163926 - protein, 45 aa, Oryza sativa
  Clone ID: PAT_MRT4530_62877C.1.pep
MEALVGNYPPSLAKGWQAAEIHLDLGQEEHPYDYYYDDPDYLENP

SEQ ID NO: 163927 - protein, 215 aa, Oryza sativa
  Clone ID: PAT_MRT4530_62878C.1.pep
RRRRPPFPCPARRGARAVPGEAAPAQVVGGQPWACSYLPHPPGQPTPLPVARSPGRAASTPARRLAASAPPRAAPAARSKVSRRLQPSSPPVHAPAAPSGAPDEARRTKLKILGPSLGACRGAGAAQRRLRQGRALGATTGGTACQAGSRQQVRPWNKNGKEKFPLACILTIIILTVGLMSMKSMLRGADSGFCCHTLAWFSFSQVSANCICQRK

SEQ ID NO: 163928 - protein, 148 aa, Oryza sativa
  Clone ID: PAT_MRT4530_62879C.1.pep
NKENVHDPYIPAKFQVSNVLSPTLQLNNSYGIHINVSAANVNDSIILADVQCTDTVMPPIYSISTATDHTPPPKSIKESFRKVDKDKREREEQLVKVIKKRRESDNQITTNLFNFLLSLLLTGKFSVFLVTCCLRCMHVLVENNRLPN

SEQ ID NO: 163929 - protein, 112 aa, Oryza sativa
  unsure (1)..(112): unsure at all Xaa locations
  Clone ID: PAT_MRT4530_6287C.1.pep
TWNVFLLLLRXXNDGSPXGGAGDGXGXIXPGXVVGAGIKRAGFXAXXVADGRGGARERXPAXRXXXRXXXXAXGGAHAVDXDGTTPAINIYTIXHXLXXXSARTXAESCSPR

SEQ ID NO: 163930 - protein, 86 aa, Oryza sativa
  Clone ID: PAT_MRT4530_62880C.1.pep
MGSTRRGPTFRVLGGKTPFLGHSRPFNGPGRDIGGGGTGRINMSKGLGYRPDWVKYLGAFLGQTPAYLRGEVPGEFRWDTGGLFAD

SEQ ID NO: 163931 - protein, 380 aa, Oryza sativa
  Clone ID: PAT_MRT4530_62881C.1.pep
MGRRRRHRRHHRRDGTDLLEAEPLLDDSHLMTVRDPLPAAYIAVCRRDWYSHSYYRLYKVEDDSSSSSSPSSPVTKQVLHRFAHLPTDVACKTVVSVRSRWIVSVGGNPGGTVLFDTETRRVITGPKLLSAKLSPVAAAVGDRIYVLSSRPQYFEPWFEVLDLSRATVVATADGRHTLDGCSWEALPDPICFPCVLSPAGYLAPPLILVTSYVLFLPYLLVSVNNMGKMTTYAFDTGTHRWHKLYDYGLPFFGSATPLVGIRLVSSAPHLKLSVTEFPVKTEAREEVGVGEALCLASMEDEGSFSCITFRLDDREHHMSYDKDIHEFYPRKMYLNLTTYKIVEGEKTDMDIVVRCKRDKALKIFSSHGFSSPPIAFALSI

SEQ ID NO: 163932 - protein, 74 aa, Oryza sativa
  Clone ID: PAT_MRT4530_62882C.1.pep
MAEQWRLHHASMSISSSPLVAGRFIAIHHLLSHRPHWRSWRGALGLRLLFLLSSLIINTILACPPSIPNPQLDW

SEQ ID NO: 163933 - protein, 213 aa, Oryza sativa
  Clone ID: PAT_MRT4530_62883C.1.pep
MTTTERIPKTKMIGALQGEETRPPGQCLQEDHDAKVAAMTHLNGLGFHLESPVRRERVIARQRPKGGRRRLKDVPACTDVALARTEPSLQPTTPCILPVGPLAAPLASITWAPSGISSSHCHIASAAHVAAATPPTKSSYICRFQIHSWRAAASSSACHGLMANKIEAKKDVDTINADQSVVPTALISLPLLIVEAGQVGPSGHDDLSLYMIP

SEQ ID NO: 163934 - protein, 780 aa, Oryza sativa
  Clone ID: PAT_MRT4530_62884C.1.pep
MRRGKKIKEGKRETVSTAPPFRSASATRTATAGVHRLHPPRHCNAEKRGEDEKEVDEKDHKEKVAVAEATEMEDHVSPVSEAKAREMRGVKGDDGVGVGDDGVSSATEVIRDWENNMATSLRRKRRGEGEVSGPRYHRYWVTGITSIEYHATDTTTGIRYQLYCILSGGEQRAATAPSLRGDDAEPQGPRRAASCGGRRPQRAEAAGMAQRERKGRTPHTEANDRPRPQPRTPPHNAPNPAPRGAQRSREGAPEGSREPKAPRGGPRGRGEPRRRAAPRGAAGGTGTARRPAAASSGGGGWRRRAEAASGGGWRAMRWRSKAGGRRARPLFVLLPCLSLVARVGMELWKSVLMENGGGDASAAAWRFGAANPAMEAARSQSIRALVYRVYACLDGSGDARSVAPLGHGDPAAFACFRAAPAATDAVAAAAASGAHNSYAPAAGIAPACSAVAAHLSRELPYAVSPADVVLTAGCNHAVEIMMSVLASPGANVLLPRPGYPLYASRAALSGLEFRHFDLLPDSEWEVDLAGVEALAVANTVAMVIVNPNNPCGCVYSRDHLAKIAETARKLGIMVISDEVYDHFAFGSKPFVPMGVFGDVAPVMTLGGISKRWMVPGWRLGWIAATDPNGILRNKKIIDSVIDYRAISVDPVTFVQGALPDILAKTDDAFFTNALGVVKKAAEICYEKLKEIDCITCPHKPEGSMFVMAKLDLSSLDGIEDDVDFCSKLAKEESVVICPGSGLGMKNWLRITFAVDPQLLEDGLERTKCFCKRHGKIKEAS

SEQ ID NO: 163935 - protein, 338 aa, Oryza sativa
  Clone ID: PAT_MRT4530_62885C.1.pep
MNKRFNPQYRAWRPPTGPQGHRAGPESGIVPPTRDYVVEEEDEERHPHPHHRLLLDDDAAGFDHDETLAAPAPAPGSPFSFASDPDPDPDIDLELRLSSRSPPFWDCLEDDLADEEMVGGGFEWEEIADAAVPAPGAVAAGGGGGGGGGDGGLVGDGDVFGFLDEREILGAMEGLDSGDDESGFSDEPFDFGDEGDDIGDIFRSVGWEVLPVPLDEDDFEVLPGHVADAAAGGAPPAARAAVERLQVVPVGGGGEEAAAASRGCAVCKDGIAQGELATQLPCAHLYHGACIEPWLAIRNSCPVCRYELPTDDPEYEKRRVKRRSSGDSVAQLGTPMQI

SEQ ID NO: 163936 - protein, 133 aa, Oryza sativa
  Clone ID: PAT_MRT4530_62886C.1.pep
VGKSLPQRLMDQINWHANTSEGELWTCTGVKQIYQATCFQSTATPAWKGGGGVARHQLGKGRSRAGVWMGGFSWEGRGRRPAGKGGAGAERGQTGGGRPAGGQRRRKPRCDDARGRVRLARRRREENSEPFFS

SEQ ID NO: 163937 - protein, 456 aa, Oryza sativa
  Clone ID: PAT_MRT4530_62887C.1.pep
MAEAEAEAAGAGAGAGPARRTTRVGRYELGKTIGEGSFAKVKVARDTRTGDTLAIKVLDRNHVLRHKMVEQIKREISTMKLIKHPNVVQLHEVMASKSKICMILEYVDGGELFDKIVNSGRLGEDEARRYFHQLINAVDYCHSRGVYHRDLKPENLLLNRPGALKVSDFGLSAFAPQTKEDGLLHTACGTPNYVAPEVLADKGYDGMAADVWSCGIILFVLMAGYLPFDDPNLMTLYKLICKAKVSCPHWFSSGAKKFIKRILDPNPCTRITIAQILEDDWFKKDYKPPLFEQGEDVSLDDVDAAFDCSEENLVAEKREKPESMNAFALISRSQGFNLGNLFEKEMMGMVKRETSFTSQCTPQEIMSKIEEACGPLGFNVRKQNYKMKLKGDKTGRKGHLSVATEVFEVAPSLHMVELRKTGGDTLEFHNFYNNFSSELKDIVWKSESDAKAAKKR

SEQ ID NO: 163938 - protein, 234 aa, Oryza sativa
  Clone ID: PAT_MRT4530_62888C.1.pep
MAADSSMGFHQGITASMYNHHMLSFQSNSDLGGGAGAAAGMVMAPRSMNGTSSSAGLFVSPNTGVLGNASVAGPSRSSSGDAFSSTVAPKYKFVTGSPSDWNDRELNTLKEGLGRERRKKPDGFYTGKKIRDMKVYDGGKVHTSHKVPVVDSATQHLLEENNHLLNQIATNIETFKTGENTDLFFRTNNNFKNILSRMSETPGIMGQMPQLPVQVNEDHLSSLLQLDRMVRGDP

SEQ ID NO: 163939 - protein, 52 aa, Oryza sativa
  unsure (1)..(52): unsure at all Xaa locations
  Clone ID: PAT_MRT4530_62889C.1.pep
XFFLFFFFNQNXFFFKDVFLKRANPQHLIDKFXQNSDIHSLSTIKLSMNLLP

SEQ ID NO: 163940 - protein, 414 aa, Oryza sativa
  unsure (1)..(414): unsure at all Xaa locations
  Clone ID: PAT_MRT4530_6288C.1.pep
MAEGAKFHGIVGAVGAHDVGGNFCDMGYYQKLGEGSNMSIDSLNSMQTSIYGGSVAMSVDNSSVASSDSRTGMLKHPGLRGPVIVSSYSVGNSIFRPGRVSHALSDDALAQALMDSRFPTETLKDYEEWTIDLGKLHIGMPFAQGAFGKLYRGTYNGGDVAFKLLAPQGLHVKYYSLINTLVEXSSISDSKNEXVDDRGAMIAXRNKQVVINHXLGYQLYKSVNPTSNQNNRSHKIYISVEQLCXVSAHNLVNPPRQILLXNLSCTSKSFLLTVGLCLARTFSKSVLEIGGGRIFAARPLDASSCMVVCTAPDCFGPLMDPHITISLKRRTIVXNMTAVQAAFAVVNKGVRPAIPHDCLPALAEIMTRCWDANPDARPPFTEVVRMLEQVEMEVVNTVRRARFRCCISQPMTLD

SEQ ID NO: 163941 - protein, 87 aa, Oryza sativa
  Clone ID: PAT_MRT4530_62890C.1.pep
ICINANRWLSSMFLFCLTISMTPYHSSLRVYISLHSLIISSFHTYELNLVDCCYLFIYFCSYKHTTSLLFAFCMAVLGALDKLLTMN

SEQ ID NO: 163942 - protein, 186 aa, Oryza sativa
  Clone ID: PAT_MRT4530_62891C.1.pep
MGTAREEADGLGHNLGKRWLEMVRSGSRRWESLAGEGEMVELTSRGGDGVRRVRGMVRMAGVDPEWLHSMAHALALDTRTWPRGDVPGLGLIDAGYAGMVRMAGVDPEWSHSMAHALALDTRTWPRGDVPGLGLIDAGCAGMVCMAGVDPEWSHSMTHALALDTRTWPREDVPGLGLIDASRARMS

SEQ ID NO: 163943 - protein, 68 aa, Oryza sativa
  Clone ID: PAT_MRT4530_62892C.1.pep
KTGRYATANSMMILASRRIIYGDDTTTSWTTTRTGTVAGAASRTTTNPTMTHYIPTSTAIATYTPVPG

SEQ ID NO: 163944 - protein, 361 aa, Oryza sativa
  unsure (1)..(361): unsure at all Xaa locations
  Clone ID: PAT_MRT4530_62893C.1.pep
MQASNKTFQNSVSHTPQIHDFPNESLYSAYLVIQRFKSTITADPKNVTSTWTGHDICGETDYLGFNCTTLPGPDKKLTVTEVFFNGFGLHAPKLQGFIDQLPDLAFFHAASNSFGGDIPCLSSLEYLYKLNVANDLPAHPAYSELVGTGAVDGKAGSCVTTNINFTFRIKIPDMKGWGXARALFLVLRDAKTLLLNYNNLAGPELGMLSIAALIDAGMNHIKGPIPFSFSCPNRLEQLNLGRNRLYGEIPDAPCKLAAVPAGPLSATSRCRATTFTSVGPACLSVINERRPQRHGTTRIPGFANQRRPAECASFPSQPKACPAASATHVACPAGAANAAAAPADRVVKDYSSYVTYATLHE

SEQ ID NO: 163945 - protein, 163 aa, Oryza sativa
  Clone ID: PAT_MRT4530_62894C.1.pep
PQATSNELRISQKCLLVFLMTTDKSASARNTAIAVHLRMTPKGYQTQRMITGTGFRAVATCRLPLTNPWDTQLKKRSFSEPRAECIDSSGTPPELLLEGKLLPGTPPELPLTLYLILMNKRYNRASCSSAQSCVLEMRVSSSFYRLQMMVTLMGIVGNAPQPP

SEQ ID NO: 163946 - protein, 438 aa, Oryza sativa
  Clone ID: PAT_MRT4530_62895C.1.pep
MACHLRLFPFTQLLVLVLYKIAAVGADPANAELSTKITQHSPLYNPQPQDFPNEELYRNYLVIQRFKKTITSDPKNITATWTGHDICGNTTYLGFYCAALPGRTKKPTVTVVIFNGYGLRAPKLEGFIDHLPDLALFHAASNDFGGDIPYLTGLAYNYKINVDSNLQIQDDFSRDMVGSHVTTKVHGYCVNLDLDITFHLRPGKDDKKGRSIPGATDSKALLLNYNHLSGPLPVNIGFSKLSYLALANNRLTGAIPPSILHLQDSLLEVLLLNNQLSGCLPHELGMLTKAAVFDAGMNQLTGPIPSSFSCLTSVEQLNLGGNRLYGEIPDALCKLAAVPAGRLANLTLSSNYFTSVGPACLSLIKDGVLNVRNNCIPGFANQRRPAECASFHSQPKACPAASATHVACPAGAANAAAAPADRVVKDYSSYVTYATLHE

SEQ ID NO: 163947 - protein, 151 aa, Oryza sativa
  Clone ID: PAT_MRT4530_62896C.1.pep
HLLFLALLQHWSQPQFSSEAGRTVRGAVSVTGYCSQQSVSPAQMGVRLFRQHTALAAHNTEHKQGTSQPIVGHCKGCRDSVKRYSTRSRQHFASTLSTAAAVAAAILAATRQLKPSLLASAASFRDHKLRRVEWRRHSVVYVTVIITVWGG

SEQ ID NO: 163948 - protein, 182 aa, Oryza sativa
  Clone ID: PAT_MRT4530_62897C.1.pep
MASPGVVCTTVTPTSSAGSDQVVAGGGEAARRPVAPAVMEERKRKRKESNRLSAQRSRARKQQQLDELAGQVAALRARNGALGLAAREAARRCAAVRAENELLRARSVELAARLDSLTDLAQCLHDAAAASSFAAAPPMMMAGAATAFPTGAVGAAAGFMMPQLPPPLLDATTMGMHCNYYY

SEQ ID NO: 163949 - protein, 39 aa, Oryza sativa
  Clone ID: PAT_MRT4530_62898C.1.pep
IMEFVPSLDTYIAKKLINPCSCCLCRLPPTIHYYSLLLS

SEQ ID NO: 163950 - protein, 86 aa, Oryza sativa
  Clone ID: PAT_MRT4530_62899C.1.pep
LIQFMWLALQQEFVYNLLRLRFCFVYKIVVVALCTGMTDTGFVMLLHPHEFPSACYISALCVFKNGPNMHLFAKCGCLLELVSSYK

SEQ ID NO: 163951 - protein, 43 aa, Oryza sativa
  unsure (1)..(43): unsure at all Xaa locations
  Clone ID: PAT_MRT4530_6289C.1.pep
QGPEPPGEEHRNFXAVMSSPELPEFLSQKLPGNRENRNLGKQN

SEQ ID NO: 163952 - protein, 124 aa, Oryza sativa
  unsure (1)..(124): unsure at all Xaa locations
  Clone ID: PAT_MRT4530_628C.1.pep
LIPSNSVIXQLRIGYKVVPKRELNDPENALIGAFAGAITGAITTPLDVMKTRLMVQGSANQYSRNCNCAQTILREEGPGAFLKGIEPRVLWIGIGGSIFFGVLEKTKSMLAERRSREPPAGKDE

SEQ ID NO: 163953 - protein, 57 aa, Oryza sativa
  unsure (1)..(57): unsure at all Xaa locations
  Clone ID: PAT_MRT4530_62900C.1.pep
SGRLEKKGFYLKAMKLINVEKSIAEEHYTHLSFKPFFGGLVXYIVIGAVFFLVSEGK

SEQ ID NO: 163954 - protein, 428 aa, Oryza sativa
  Clone ID: PAT_MRT4530_62901C.1.pep
MARRIIFLLFLIACVVDRSVNVHCEKQLVSSFDKHDNASSSLAELFSGKRIPLFRYITNKTSRLSTKAVQVGWDRGLQTSLYVISVGLGTPAKTQIVEIDTGSSTSWVFCECDGCHTNPRTFLQSRSTTCAKVSCGTSMCLLGGSDPHCQDSENYPDCPFRVSYQDGSASYGILYQDTLTFSDVQKIPGFSFGCNMDSFGANEFGNVDGLLGMGAGPMSVLKQSSPTFDCFSYCLPLQKSERGFFSKTTGYFSLGKVATRTDVRYTKMVARKKNTELFFVDLTAISVDGERLGLSPSVFSRKGVVFDSGSELSYIPDRALSVLSQRIRELLLKRGAAEEESERNCYDMRSVDEGDMPAISLHFDDGARFDLGSHGVFVERSVQEQDVWCLAFAPTESVSIIGSLMQTSKEVVYDLKRQLIGIGPSGAC

SEQ ID NO: 163955 - protein, 119 aa, Oryza sativa
  Clone ID: PAT_MRT4530_62902C.1.pep
ILDYQEFVAVSIHVRKIGNDEHIQKAFSYFDQNKSGYIEIEELREALVDEIDGNDEDIINSIIRDVDTDKDGKISYDEFAVMMKAGTDWRKASRQYSRQRFSNLSLKLQKDGSISDDTQ

SEQ ID NO: 163956 - protein, 57 aa, Oryza sativa
  Clone ID: PAT_MRT4530_62903C.1.pep
SVSRCAATPLSPLTPSPSRGCGHPRPEEHRRRPPSLLPYPSRANGENTLLVYSRATS

SEQ ID NO: 163957 - protein, 661 aa, Oryza sativa
  Clone ID: PAT_MRT4530_62904C.1.pep
MGNCCGTPATAEEGGKRRRRGKQKKANPFTVAYNRAPSSAGAAAGRPGLMVLRDPTGRDLGARYELGGELGRGEFGITYLCTEAETGDRYACKSISKRKLRTPVDVEDVRREVEIMRHMPSHPNIVSLRAAYEDEDNVHLVMELCEGGELFDRIVARGHYTERAAAAVTRTIVEVVQMCHRHGVMHRDLKPENFLYANKKDSSPLKAIDFGLSVFFRPGERFTEIVGSPYYMAPEVLKRHYGPEVDVWSAGVILYILLCGVPPFWAETEQGVAQAIIRSVVDFKREPWPRVSEPAKDLVKRMLDPNPMTRLTAEQVLEHPWLHDSKKMPDIPLGDAVRARLQQFAAMNKLKKKALKVIAEHLSAEEAADIKDMFDKMDVSKNGQLTFEDFKAGIRKLGNQMPDSDLKILMDAADIDKNGILDYQEFVAVSIHVRKIGNDEHIQKAFSYFDQNKSGYIEIEELREALVDEIDGNDEDIINSIIRDVDTDKDGKISYDEFAVMMKAGTDWRKASRQYSRQRFIGSGDSERSPRVRPGMEEASKWRPTAERELRRAGKKRERGRGGGRRQRRGERRPARSPMRPQRQERRPAPPLPIRRRERVEQAGGARPEQAEHRRQRAALAGERGRGAASEHRLRARPEQCGGRAADEVVGDGEEYFNKLH

SEQ ID NO: 163958 - protein, 59 aa, Oryza sativa
  Clone ID: PAT_MRT4530_62905C.1.pep
HSLSRPDLFQCHIDTNQSLIKSLCYHHPIQVIHSNPHILVFYSRTDCVDVTNGCYLRHK

SEQ ID NO: 163959 - protein, 76 aa, Oryza sativa
  Clone ID: PAT_MRT4530_62906C.1.pep
LVLKTGVFSPQSPQRGTNGRFFRLFGEQKGLGVPVIFQQIPGAFLGFAIMGHVFLFANVRGPLYIFYAFRGINLGV

SEQ ID NO: 163960 - protein, 382 aa, Oryza sativa
  Clone ID: PAT_MRT4530_62907C.1.pep
MAMGGSSPAAGGGLGGRRGGGGAVEAAGLGAGGGPLARPGGGTVGRQRRRWRCRRRAVLRGALERCAAAGRKKEKCDVRTAVDSSLSPAAAVAAAAGKKAAASLAVLVKMCPSCGHRARYEQETTTIQDLPGLPAGVKFDPTDQELLEHLEGKARPDSRKLHPLVDEFIPTIEGENGICYTHPERLPGVSKDGLVRHFFHRPSKAYTTGTRKRRKVHSDEVDGGETRWHKTGKTRPVMANGRPRGYKKILVLYTNYGKQRKPEKTNWVMHQYHLGSDEEERDGELVVSKVFFQTQPRQCGSTAAAAAAKEASAAVAAAVVNSNYSIVHGHQGGGGGSFLKEANVVHEFYDPAATMGYRPPAPAAHFAPNFAVHAARNSFGGP

SEQ ID NO: 163961 - protein, 202 aa, Oryza sativa
  unsure (1)..(202): unsure at all Xaa locations
  Clone ID: PAT_MRT4530_62908C.1.pep
TAGDSPDATPHSLDGPPPTSALPSSSPATPPARRRRCRRGTTRAGTVDRGRSTYRRSLVPPTSGDCSVGGHASTNGLQGLASSTAVDPLPRPLRQTPVSTDRQNSPGTHWKATDVAFLNHPVGRACRPLRMXWAGLLTTCTFPFHSTAWTEPGGEPTKQPGRGTSWLRERSTLDSQALSPELLQGXTRGHPPLASTYWXDXN

SEQ ID NO: 163962 - protein, 51 aa, Oryza sativa
  unsure (1)..(51): unsure at all Xaa locations
  Clone ID: PAT_MRT4530_62909C.1.pep
HCMLSSKIFATLMIXKQPYLFYXXXHGXAGRTFPVQVPNPTLEPLPFQQAF

SEQ ID NO: 163963 - protein, 82 aa, Oryza sativa
  unsure (1)..(82): unsure at all Xaa locations
  Clone ID: PAT_MRT4530_6290C.1.pep
RLDLAXTRSTGRKMMSWRHRSGARSRXPWVGXAWHGMXRRSFAGXGGSAVRWCVVRXXXGGSAWKRNGGSGLVAQKETNFVQ

SEQ ID NO: 163964 - protein, 119 aa, Oryza sativa
  Clone ID: PAT_MRT4530_62910C.1.pep
MAWPQTRRRGASSMGVAMASIRPQQQPDGGRLKPSSHLQYVVIVLWISPLSSSVSDGDQGWVNGACWAAAGNLSPTSICTEEARRLDGEGGRVEEARRLILPSLTNVVVLVVNLHSRVS

SEQ ID NO: 163965 - protein, 87 aa, Oryza sativa
  unsure (1)..(87): unsure at all Xaa locations
  Clone ID: PAT_MRT4530_62911C.1.pep
MGVATNRSSSCTSESADTAQPQAYKFLIYSRTGWIGGLFGXVCAARSIPFSYESQTHXEPRTDLXNIDEVPPTHAFNAARVTGRPTF

SEQ ID NO: 163966 - protein, 66 aa, Oryza sativa
  Clone ID: PAT_MRT4530_62912C.1.pep
MSVSSASTNRAVKVFFDGRRITGLTQERLDFETVVSAKRRISEGPQLVFNEVVSIGKAHRTLRWIA

SEQ ID NO: 163967 - protein, 161 aa, Oryza sativa
  Clone ID: PAT_MRT4530_62913C.1.pep
SRVFFFFFFIDTIKNHHYLTPFGSVWHWSSPDVLSERTHRMRATTLLSSRGVPSPRDHSSAARWKITARSVAVASSGTFTGSHTKFCTASSSKKSRSHASPSPISLVQPMRLRRFTLTTKRHSRSISTDATASIDTCIALQDGAILLSAFVGVTSMASGFR

SEQ ID NO: 163968 - protein, 55 aa, Oryza sativa
  Clone ID: PAT_MRT4530_62914C.1.pep
RASAATSSCSSRTSPTSRETKALSLISPGTNSRRKTTLLSTTSQTFKPPCRQQLD

SEQ ID NO: 163969 - protein, 345 aa, Oryza sativa
  Clone ID: PAT_MRT4530_62915C.1.pep
MAASTSRQQPEALPCLVFDYGEDGGEQRRPTTLYSVADGVHRPCEFEELRDKRSWVTSHGWVLTWDPTTLATFLWNPHAAGRRRIVLPSFGQTTTTPPPADSFCALSGKPTDDDGGGGFTVVMVEPPGSCFILFCHVGSSSSSPAAWVRHEYDIGTRKMDIEGRQRMKRSIHCITSCGGKLYHFIRSTAYGVLELSPEPVFTTVRMKPASPFTTTDMFVASIFSVDVDGKLHLVFIFESGGGVVADVAVYRVDLEKRKHVRIGSIGDRAILVGGRRNDMGAAGWCRARRHGLLPNSIYWMNPGDRRLRVYELGKRTEEVRDPFKGVAESADGTWCRPYWMIPART

SEQ ID NO: 163970 - protein, 146 aa, Oryza sativa
  Clone ID: PAT_MRT4530_62916C.1.pep
MTSLTCSSSHILISRARLPLVPPWGSVSAEAAVRHSRCRHRRCRATSRLVEPPDRPRQIVSSLLSHHDRLSFVAVCSQWHLGTLWQHLLLPLPLPWLLNLMHPRTYQNLAAGVVHQIPRRARTCSGVSSYDNGWLMGSNMTGTYYD

SEQ ID NO: 163971 - protein, 527 aa, Oryza sativa
  unsure (1)..(527): unsure at all Xaa locations
  Clone ID: PAT_MRT4530_62917C.1.pep
TARTASYETAISRAARARPKGRRRLGQAIWAGAGAXRRPIXGARKGEGAVRXDRVHLAGSRVGPTCRRQGSWWGERTXGAVLGFGGCGSRLVRRVDGWRRAHVQPHGLPWTARTGGXRREEADWARLDPVKRAXAEVAATWPATQAGTNGEEEEEEXGGARDRTADDARGVPASGGEPERAATAGSXRRWIPGSVAAGGIDVRGADDGGLRRRPSPAERRGNLRGAMRTQLKAAGASPVFKELISGVGWVXAAPWRSGDERRPPGVGGNGGGAMPGGGGPWGGVYARSAGEQGRGTGGRHYRAETGAVTSGRQRGSELSGLGPGKGRKMGARSPASRVLARTGLPGARRRTATARAEEGRQWGEPTLAVKRSAGGSGGFVGDAKAATAWMHWTAKAVDRAAEIXEPREREEQRRLARGELTLGQGGGGELAVAPVVQAVAGGDADACSCSATGQRGRXRRRGRADXGGDRAVGHARARVRGCEGAAGFRTAAAGNRRRWESFYGRERETEREKEDERASAREGGRSG

SEQ ID NO: 163972 - protein, 119 aa, Oryza sativa
  unsure (1)..(119): unsure at all Xaa locations
  Clone ID: PAT_MRT4530_62918C.1.pep
AHLSVGFSDLTFPLLSPATEAATGGAAGKKGAARGCRPAGGEERHACTGCGWRGEEQDAHARAAAGEERSSTRVGEASLTTPGRRGRRPWPRXEGGVGHRARELGGGDEVVAAAGLPAP

SEQ ID NO: 163973 - protein, 25 aa, Oryza sativa
  Clone ID: PAT_MRT4530_62919C.1.pep
ETHRSDIGHLLNAMDERAHVRSSIV

SEQ ID NO: 163974 - protein, 64 aa, Oryza sativa
  Clone ID: PAT_MRT4530_6291C.1.pep
MRYGAKGSGLIRQGSLKRVFGRNVGRKGAPHAILHLGRRAYGELQRLRHDEFGIKEAQQAAPDL

SEQ ID NO: 163975 - protein, 276 aa, Oryza sativa
  Clone ID: PAT_MRT4530_62920C.1.pep
MASLTGARRGWGSGGEPRRRRDGRGGPRPRESNGGDGATTESSPPHRSKSGVEIQYAPGLIPNGGGLAPPVIGYHAPKTSTLLHGLSRVLIAADVGKKRKTKSAAAPSAAKKKPKKQKTAIDDLPTVDPDIEEFLEGEELAEAVDEAAKNLSETRVQTPPPEIPAPQRTPSPPVRPSYKPRVCMASINEEKAKLDELEAGPSSTQANINRLNARTIELLAELEQCSAQITLEEQKLVDLPKAIEDQKSKLKAYVKHLTDLTKSLKVLNRAFRFKAI

SEQ ID NO: 163976 - protein, 752 aa, Oryza sativa
  Clone ID: PAT_MRT4530_62921C.1.pep
MATTAIGGWIASACISKLVDKVCSYAGDQYEYQREDTKDKLRSLKESLLTVQELVCRAERLQGRETNIANQLRGIKDAAYQAEDVLDLFDYRVLEAQAEVMDKVTTKAQVMGKVTTNSISSAIAGSSSSCSSSSSSITTLSSDSTVKRSVRALKRFLFCDEDLTKLAAAVTIFNEIDSRMKTLLELLKLENRAPEHPVQWRTTTSMLDTTKFFGRVSEGKHLKKLLIQKNKKSSQPYDVISIVGIAGVGKTALAQKVYSIFYDKEKHFDFMAWLHVSNKFDVERLIKELVQSVHLCTAAELSSISSLDQAQRILKDKLKGSRILVVFDDVWNEMSSQWENLCKPLQSTSKGSKLIVTTRSQNVANINGATEIVHLDGLEDEDYWEHFLQCAFHDANPSQFPQLESIGQELVKKLAGSPLAAQTVGNLLKFKLDEKHWETVNGRKLWQIEQKEDGIMPALRLSYVRLPDHLKQCIIYFALFPKNYQLRGDALIRMWRAHGFVNKETPDETAYRYINDLLQISFIRKVANIEDHYVVHDLLHDFAESISNGEHFRIEDDFHVSIPTNVRHLYVNASNISTVYASLEENIEIKKNLRSLIICKADVASWSWTRTSNFNYALEETLKELGSLRVLVLRHPAGVLPNNIQHMVHLRYLDIKESREFTFLPTSLFGLYHLQALSLQSRHKIDWQAHIPPGIQPWQCKEKKKNSIIIEKLNQECICVHSAFYGQLGHCKKLVRPGTSHQKKVHTAPCYF

SEQ ID NO: 163977 - protein, 102 aa, Oryza sativa
  unsure (1)..(102): unsure at all Xaa locations
  Clone ID: PAT_MRT4530_62922C.1.pep
MAFMRILMELQDLRKDRPTSCIAGHAVEDMFHXQATIIGPSYKALAGRVFYENIHFPPDYPFKPPKVCFRTKGLHPIINRNGSMCLDILNEQXSPLLTISKV

SEQ ID NO: 163978 - protein, 124 aa, Oryza sativa
  Clone ID: PAT_MRT4530_62923C.1.pep
MGGGHDMHGGGQNGGVKGLVSKLVGGGGHGGGHGGGHGYEQGYGGHGYPPHAGAAHGAYPPQHGAYPPQHGAYPGHGYVPGAYPSNAAPHGGHMGSYHTGHGGGGGRHYGGKHKGGMFGGGKWK

SEQ ID NO: 163979 - protein, 381 aa, Oryza sativa
  Clone ID: PAT_MRT4530_62924C.1.pep
MLTAAPLLSPAPAPPPPPPRCHVAIPLRCHAPTQQVAAAAADRGLLLRGAGSPVVKRAPGGWLLWYQCGARVALAASTDGLRWGPPVEPDPLVASTDWWAFDTAAVRPSDVLLFSGPDASARSGFPSSAVYWLYYSGSTDERFGSPFPAAAAAAAAEDVPALPGLAISQDGRHWARIEGDHHTGALLGVGEEEEGGEPRRGWEARCVAAPKVVLHAEGDLRMYYHSFDEMSQRHAIGLARSKDGVRWRKAGKVLEGGKAGSFDEGGVRHGHVVRDRAAGRYVMVYEGVDANGRVSIGMAVSEDGLKGWRRSSELPILRPSDDDEGWDSTVVGSPCLVQMDGAYDWRMYYTGVGRDGEAAIGMAYSEGHGLQKFEKWDAVLM

SEQ ID NO: 163980 - protein, 370 aa, Oryza sativa
  Clone ID: PAT_MRT4530_62925C.1.pep
EILSSLLLLLLSSLVAATMSGGLYNHQGFSPARTLSPQIRSNPEADSQYLSELLAEHHKLGPFMQVLPICSRLLNQEIMRVSSMVNDHGFNDFDRRRYRSPSPMSSPIMRPNLHGNGFGPWNGIHQERLGFPPPPPPGTSMDWQGAPPSHGSYIVKKIVRMEVPVDAYPNFNFVGRILGPRGNSLKRVEASTGCRVFIRGKGSIKDADKEEKLKGKPGYEHLNDPLHILIEAELPANIIDTRLRQAQEIMDELLKPVRYHPIQVMVTSPLPLIRSPVAALFIGPDVLIVATVDAVCLYIWHCGTHRPKLQWICNVKFMMKGPKDESQDYYKRQQLRELAMLNSTLREDSPHPGSVSPFSNGGMKRAKPSH

SEQ ID NO: 163981 - protein, 96 aa, Oryza sativa
  Clone ID: PAT_MRT4530_62926C.1.pep
FFDPRIASCSWLRALFSICLGDWLCDFLGFVSFCSQYLSELLAEHHKLGPFMQVLPICSRLLNQEIMRVSSMVNDHGFNDFDRRRYRSPSPMSSPL

SEQ ID NO: 163982 - protein, 113 aa, Oryza sativa
  unsure (1)..(113): unsure at all Xaa locations
  Clone ID: PAT_MRT4530_62927C.1.pep
SWWWWGWFSPDADAEXXXMXXXSTAAGGGGXDXGVELDPXSAGGMAAPDASXXSTDXSXVREXSSPRFXXSTTLXARLFRSNSITKQASNRSNTFRSXDHSPNVVRNSAREXG

SEQ ID NO: 163983 - protein, 33 aa, Oryza sativa
  Clone ID: PAT_MRT4530_62928C.1.pep
ATYAAIAKTYAYLTPDLWRDIPLTKSPYSEFKA

SEQ ID NO: 163984 - protein, 27 aa, Oryza sativa
  Clone ID: PAT_MRT4530_62929C.1.pep
FKTQTAHCLSWATVTGTSFPNYKPRPI

SEQ ID NO: 163985 - protein, 53 aa, Oryza sativa
  unsure (1)..(53): unsure at all Xaa locations
  Clone ID: PAT_MRT4530_6292C.1.pep
KAFSHLTVKEIKIARLPMFTMLGFLVQAIVXGKAPPDSLAALLADSVSINACP

SEQ ID NO: 163986 - protein, 135 aa, Oryza sativa
  unsure (1)..(135): unsure at all Xaa locations
  Clone ID: PAT_MRT4530_62930C.1.pep
EKILVFALLAIAACSATAQFXVLGQNLRXYQVQSPLLXQHQVLIFFFEFVGXXXGGAGGAFLPXAAFXLXGSRVLSQLLLVALLSLFQVFIVVLAFSHQLHLLLFGGLFVXRVLALALALLAFALPFSSGVLPWS

SEQ ID NO: 163987 - protein, 199 aa, Oryza sativa
  Clone ID: PAT_MRT4530_62931C.1.pep
MEMEMEVEVELTWMALFQRRVVMADAHCHKLHGLLRGLFGVLDGQAWREMVAVAEETRRMLESASTELGLAIANMGAATLLAPGGEAPRAWAPAVPLRSVDDGGIDVPRVWLVHFRLQVAAETARRLHDRLEATRVHVCAAEHLVALEEDDDGGDDDMAPWMHGLSASEQIDGLMELRETLNLAVDLVAMTAMAREEVF

SEQ ID NO: 163988 - protein, 67 aa, Oryza sativa
  Clone ID: PAT_MRT4530_62932C.1.pep
KDKGVAPKGLVENPFQRVGPRPPQTGTKKNFNRKTPGGFGKTSYKKKRGAFSQTPPRVPNPPLTQKR

SEQ ID NO: 163989 - protein, 122 aa, Oryza sativa
  unsure (1)..(122): unsure at all Xaa locations
  Clone ID: PAT_MRT4530_62933C.1.pep
HTIRXFKIELGYYNYRGGDSPLSGGAHSPSSSXHQALLPPNSEFQSAASRIWSIXHPPQTVSTQHISQFPIPAPXHLQAHSCASVGINIPSQPRIGLHHAFNTQXSSVTYIISPIPQSILLL

SEQ ID NO: 163990 - protein, 374 aa, Oryza sativa
  unsure (1)..(374): unsure at all Xaa locations
  Clone ID: PAT_MRT4530_62934C.1.pep
HIRKLREVDLQSLVYKDGARIXIPGWNRKFFTATGREVLVKTTLSATPIYHLTMLPQIKWVFKRIGRFRRALMWKGEDPENYNWKDDPKPWANMNLPCDDLDICLFRVGTKIELGDGNRISFXSDNCLDGQXPDIAPSIFKLTKRKXNSLRSELNNNHWLAMLNPITTVEEIHELVQLGGRLQNVIPENGVPDDVIWKWTENGHYSRKFAYLAQFQGLTTNTNYEPLWTTIAEPKRCFFGWLVLHQKTLTAENLLRQYWPCDWIFSLCTNAFEDTTHLAKECSCTVVVWNHVCNCMDILVPQPQMAHTIEDWWSELCKVVPKARRTQVLGALLTTWWNVWLKRNXRIFQHLSKNELQVTLLVKDLILLELLLSV

SEQ ID NO: 163991 - protein, 57 aa, Oryza sativa
  Clone ID: PAT_MRT4530_62935C.1.pep
TKFSLQPERPFRQLAHGKPEGPYCSDYGIETYNLLIFLGGLYMNLNDYNLYRCTRIF

SEQ ID NO: 163992 - protein, 356 aa, Oryza sativa
  Clone ID: PAT_MRT4530_62936C.1.pep
SSKTQETSTRQQYQIYYSLYLMRRAKIPIAAPKLEATIALFSFLYAAICSSVRRASSLTNWAKIRDRSSKYLSPSNSKQLSSTGVLVLEDVMLLSFSSGWKELDAGARRRVAATGGLSFPARERSAIAMPMASGCWASRSREGDACLALGFRSSPPFPFVFSFLILPLAAGDLEGELAAAEGSTGGTTLGSAKGELAAAEGSRGARHRLRRRARPRPARRARRMPARLGAVRRHRCRARRCITSADMGQLSSLSSSSNCRHGRLSHPTTPLPPRASTLPRACRRGPPHVLPFLHFLPHFPPKNRRRSSPTRPRRRSSIRRPLPPATATISPSGAPTTLQSRAVAASVAPALRRCHL

SEQ ID NO: 163993 - protein, 119 aa, Oryza sativa
  unsure (1)..(119): unsure at all Xaa locations
  Clone ID: PAT_MRT4530_62937C.1.pep
RGRVRSLIAIGKLIYAQVSELASDXYINGGTCNLSLGHNPRXDYGFMGTEIGIASYXSKLQVLDKPLTKHVQSAXQHSQNVGLVGMIXSMTTRKAIDILELMASTLLSALCQTINLRHR

SEQ ID NO: 163994 - protein, 227 aa, Oryza sativa
  Clone ID: PAT_MRT4530_62938C.1.pep
MTSSAVENAATGELRRGAWSHGRRRILRGDRDGAGDELWRGAWTAEDPAGYHPIPARYQDLIPRRYHPIPARYQDLIPRRDALSSLGYARRQMMPFVAPPIGDSEAELALPPMRRRDANRSHGLTRAARVDRPTGFDGDCQAMQRRGGVGGVDGVGGARLGGVASCAGQRGELGEARPDAAPSAGQEARARRVGGGREKDAVEELFGEVADAVVAAMEVAHDINLLV

SEQ ID NO: 163995 - protein, 158 aa, Oryza sativa
  Clone ID: PAT_MRT4530_62939C.1.pep
MAAEVWKAQFGRLVEEAAIRVDGVRESLHALLPQLTSSSSSMVAGDANTVRDTIQLALDALGLGDESSVNYLAEQSAAIKLSYAESDARKAYALVDGCRGHLDAALLLLDHVGRLPDVQGMINAERLAAVADLEAAIVAVQRSAEMATAARQDVSGAS

SEQ ID NO: 163996 - protein, 473 aa, Oryza sativa
  Clone ID: PAT_MRT4530_6293C.1.pep
MASLAVSASASASGEEVTHLAQREAAEIDEQLMGPLGFSVDQLMELAGLSVAAAVAEVYKLGEHTRVLVICGPGNNGGDGLVAARHLHHFGYKPSVCYPKRTPKPLYSGLCTQLESLTIPFVPVEDLPANLSEEFDIIIDAMFGFSFHGTPRPPFDDLINRLVSLSAIDNSAKRPAIVSVDIPSGWHVEEGDINGGGFKPDMLVSLTAPKLCAKKFTGPHHFLGGRFVPPPIVSKYKLHLPPYPGTSMCVRIGKAPSVDISSLRENYISPELLENQVMPDPFDQFVRWFDEAVTAGLREPNAMALTTADKEGKPSSRMVLLKGVDKQGFVWYTNYGSQKAHDLSENPNAALLFYWNEMNRQVRVEGSVQKVPEEESEKYFHSRPRGSQLGAIVSKQSTIIPGREVLQQAYKELEQKYSDGSVIPKPDYWGGYRLTPKLFEFWQGQQSRLHDRLQYSLREVDRSTVWHIERLSP

SEQ ID NO: 163997 - protein, 176 aa, Oryza sativa
  unsure (1)..(176): unsure at all Xaa locations
  Clone ID: PAT_MRT4530_62940C.1.pep
PKQRRKGNGRRRRRGRSGGGEADEDGGDLTTTMAATATDDGGCNGGATRLNRRQRRRRLGLRGGGARRDGRLRQRWRRIEESSGVLLKGLASGDGGPRRPAXRRKARVRRREESDSTSIPSSFQTELGXRFQKRKGRGNQEDHFPSINSAGDGKERXELESDGGAARLGFAGGGGR

SEQ ID NO: 163998 - protein, 274 aa, Oryza sativa
  unsure (1)..(274): unsure at all Xaa locations
  Clone ID: PAT_MRT4530_62941C.1.pep
MTSAMTAAMTSAPAATRAARARMLAGERRHVGANGGHQRVEGDAANSPVTKTTAEGQRTAPATRKKRRRRSGRGRRRLDDHDGGDGDXRRRLQRRRDAAEPTATTAATRATRRRRXTRRQAKAKEATGRGELGDPYIGVGRRRRRPTATGDGEGNFGKNESKTNSNPSIXQTEVEDDSKREKVEEIPEIVSPQSIRPEKERIDRIWKAAAXGSARVSGGGRREEDDGSDRRAPPVSDSERERRAAARQTGPDWAEEERESGFGPAFGPKPKEDF

SEQ ID NO: 163999 - protein, 86 aa, Oryza sativa
  Clone ID: PAT_MRT4530_62942C.1.pep
LACITVDFSTAVCQAVSKITNSFGPFHNIEVVWSLSPASAWLLDKETLFVATSKHVSNPQRTSLDPNKSFVLLHAKNRRISVHFQQ

SEQ ID NO: 164000 - protein, 189 aa, Oryza sativa
  unsure (1)..(189): unsure at all Xaa locations
  Clone ID: PAT_MRT4530_62943C.1.pep
GRHWRPPARRSGGRERRGKGERRRRSTAHPEATAAMAGVEGGGGAARVDGVNGXDRNGGVDEGGEDAAKPREAAPRREEVXGDDSGGPELGGGGGGERERRGLDSGEERGRRVAETVVGSSGRPKLRRATIPSSDVPRPQASTGRCLRGHPPSKLELPSSRSILQDPPSHRPPPPANLVATHLALLAAP

SEQ ID NO: 164001 - protein, 181 aa, Oryza sativa
  Clone ID: PAT_MRT4530_62944C.1.pep
GAGTRRTTTPGPAAAAAGAGARSSGGRGWRARRGRRWRGRRRGRRRARRRGRSRRRAGASGRASPPARGASRRRAGGAAGGPRCRSSPRARRTGRARRQRRRRSRTRGTGRRGPTPTPTAAPTRATGSTCGPPPSAAAASGCRPGSPAAGTAECPSRRRPTPPPAVAAAATAARRMTSTWP

SEQ ID NO: 164002 - protein, 73 aa, Oryza sativa
  unsure (1)..(73): unsure at all Xaa locations
  Clone ID: PAT_MRT4530_62945C.1.pep
LIQQQKKKKKKKKKKKKKKKNKKKKXNKIKKKKNNKIKKKNWGSLFRGSIFTFPCCGCFCFFFVTLNFISWAF

SEQ ID NO: 164003 - protein, 78 aa, Oryza sativa
  Clone ID: PAT_MRT4530_62946C.1.pep
SLLKAVAAVHIVAVVLVVVGAGRFAQEREGAPGSPLPLLPPLVLIAVAARDGESDPPPPRLPTTAVTSPAHHYRIRLP

SEQ ID NO: 164004 - protein, 1737 aa, Oryza sativa
  unsure (1)..(1737): unsure at all Xaa locations
  Clone ID: PAT_MRT4530_62947C.1.pep
MSWHRAGVLLLGAQSCLPVPGVPAVGGIGSVLLSMARMGWKLCHVFRLYTVVMAGSVTRRGLDMTGFVLELRGMCVVLGYPHGVDYQGRPLPEQEGDDAEPHAAWEVTAVILAGSPERTSLAVTAGGDSFPATCQSAALLAIGTLHQRYPDELQHSPFRYHPRRGGARDYATFRDASSEDDATIMHLARMVEAYDAARIDFHQMVRRGMVENNMKILELRQENLQLKKDLDAVEAQLHQLKIAQGEVCRPKRRRVCRSQKITARKSTSRPELVRQSLAWTCFVETPRAEPAPVVPQEGEASGVGSTEDALLLTFRPGPSQRRSAATGDGNQPEGSNHHHQGSPPPPPPPPPPPPPDTNAILSQILAQQANMMTAFLHHLQNPPQHNAPPPPPQHSKLAEFLRIRPPTFSSSNNPVDALDWLHAVGKKLDTVQCSDEEKVIFAAHQLQGPASLWWDHFQATQPEGQPITWARFTAAFRRTHVPAGVMALKKREFRELKQGNRSVMEYLHEFNNLARYAPEDVREDEEKQEKFLAGMDPELSVRLVSGDYPDFQRLVDKSIRLEAKHKELESHKCRLANFRNQQGANQRVRYTNPYPGGSSSQQQQQQQQPRSAPRPQFVVRVPQPQQQQNQQGTRAPRPPTPTVQPGQGRRDAQGPQRLCFNCFEPGHFADKCPKPRRQQGQAPPRSNNGGKDVIRGRVNHVTAEDVLTTPDVIVGTFLIHSIPATILFDSGASHSFISVPFVGRNQLGVERLRNPVLITTPGGVMTAKYYSPAVPIEIQGIPFPSDLILLDTKNLDVILGMNWLAQFQGVVDCARRTVTLYRGPEQPVVFFAPPTSVSSSELHQIGLSEIPIVREFGDVFPEELPGMPPKREIKFRIDLAPGTTPLYKRPYRMAANELAEVNKQLEELALNEVTIKNKYPLPRIDDLFDQLKGATVFSKIDLRSGYHQLRIRDEDIPKTAFTTRYGLYEFTVMSFEEDHQHHLRLVLGKLREHQLYAKLSKCEFWLSEVKFLGHVISAKGVAVDPETVTAVTDWKQPKTVTQVRSFLGLAGYYRRFIENFSKIARPMTQLLKKEEKFVWSPQCEKAFKTLKERLVSSPVLILPDTRKDFMVYCDASRQGLGCVLMQDGHVVAYASRQLRPHEGNYPTHDLELAAVVHALKIWWHYLIGNRCEIYTDHKSLKYIFTQSDLNLRQRRWLELIKDYDVGIHYHPGKANVVADALSRKSHCNTLNVRGIPPELNQQMEALNLSIVGRGFLAALEAKLTLLDRIREAQKNDPDMHGLLKNMKQGKAVGFTEDEHGTLWNGNRVCVPDNRELKQLIFQEAHESPYSIHPGSTKMYLDLKEKYWWVSMKREIAEFVALCDVCQRVKAEHQRPAGLLQPLQVPEWKWDEIGMDFITGLPKTQGGYDSIWVVVDRLTKVARFIPVKTTYGGNKLAELYFARIVSLHGVPKKIVSDRGSQFTSHFWKKLQEELGTRLNFSTAYHPQTDGQTERLNQIQEDMLRACVLDFGKTWDKSLPYAEFSYNNSYQASIQMAPYEALYGRKCRTPLLWDQVGESQVFGTDILREAEAKVRTIRDNLKVAQSRQKXYADNRRRNLEFAVDDFVYLRVTPLRGVHRFQTKGKLAPRXAYQLELPASLGNMHDVFHVSQLKKCLRVPSEQADSEQIEVREDLTYVERPVKILDTMERRTRNRVIRFCKVQWSNHAEEEATWEREDELKAAHPDLFASSSESWGRDSV

SEQ ID NO: 164005 - protein, 38 aa, Oryza sativa
  Clone ID: PAT_MRT4530_62948C.1.pep
RYNYTMKLAFLISLPLPPQVSPPPLKNSPAFSILSHDP

SEQ ID NO: 164006 - protein, 1538 aa, Oryza sativa
  Clone ID: PAT_MRT4530_62949C.1.pep
MSWHRAGVLLLGVQSCLPVPGVPAVGGIGSVLLSMARMGWKLCHVFRLYTVVMLTTRRSAATGDGNQPEGSNHHHQGRPPSPPPTPPPPPPDTNAILTQILAQQANMMTAFLHHLQNSPQHNAPPPPPQHSKLAEFLRIRPPTFSSSNNPVDALDWLHAVGKKLDTVQCSDEEKATQPEGQPITWARFTAAFRRTHVPAGVMALKKREFRELKQGNRSVMEYLHEFNNLARYAPEDVREDEEKQEKFLAGMDPELSVRLVSGDYPDFQRLVDKSIRLEAKHKELESHKRRLANFRNQQGANQRVRYTNPYPGGSSSQQQQQQQQPRSAPRPQFVVRVPQPQQQQNQQGTRAPRPPTPTVQPGQGRRDAQGPQRLCFNCFEPGHFADKCPKPRRQQGQAPPRSNNGGKDVIRGRVNHVTAEDVLTTPDVIVGTFLIHSIPATILFDSGASHSFISVPFVGRNQLGVERLRNPLLITTPGGVMTAKYYSPAVPIEIQGIPFPSDLILLDTKNLDVILGMNWLAQFQGVVDCARRTVTLYRGPEQPVVFFAPPTSVSSSELHQIGLSEIPIVREFGDVFPEELPGMPPKRQIEFRIDLAPGTTPLYKRPYRMAANELAEVKKQLEELKEKGYIRPSTSPWGAPVIFVEKKDKTKRMCVDYRALNEVTIKNKYPLPRIDDLFDQLKGATVFSKIDLRSGYHQLRIRDEDIPKTAFTTRYGLYEFTVMSFGLTNAPAFFMNLMNKVFMEYLDKFVVVFIDDILVYSQSEEDHQHHLRLVLGKLREHQLYAKLSKCEFWLSEVKFLGHVISAKGVAVDPETVTAVIDWKQPKIVTQVRSFLGLAGYYRRFIENFSKIARPMTQLLKKEEKFVWSPQCEKAFKTLKEWLVSSPVLILPDTRKDFMVYCDASRQGLGCVLMQDGHVVAYASRQLRPHEGNYPTHDLELAAVVHALKIWRHYLIGNRCEIYTDHKSLKYIFTQSDLNLRQRRWLELIKDYDVGIHYHPGKANVVADALSRKSHCNTLNVRGIPPELNQQMEALNLSIVGRGFLAALEAKPTLLDRIREAQKNDPDMHGLLKNMKQGKAAGFTEDEHGTLWNGNRVCVPDNRELKQLILQEAHESPYSIHPGSTKMYLDLKEKYWWVSMKREIAEFVALCDVCQRVKAEHQRPAGLLQPLQVPEWKWDEIGMDFITGLPKTQGGYDSIWVVVDRLTKVARFIPVKTTYGGNKLAELYFARIVSLHGVPKKIVSDRGSQFTSHFWKKLQEELGTRLNFSTAYHPQTDGQTERLNQILEDMLRACVLDFGKTWDKSLPYAEFSYNNSYQASIQMAPYEALYGRKCRTPLLWDQVGESQVFGTDILREAEAKVRTIRDNLKVAQSRQKSYADNRRRNLEFAVDDFVYLRVTPLRGVHRFQTKGKLAPRYVGPFRIVARRGEVAYQLDLPASLGNVHDVFHVSQLKKCLRVPSAQADSEQIEVREDLTYVERPVKILDTMERRTRNRVIRFCKVQWSNHAEEEATWEREDELKAAHPDLFASSSESRGRDSV

SEQ ID NO: 164007 - protein, 172 aa, Oryza sativa
  Clone ID: PAT_MRT4530_6294C.1.pep
MKRQRSKVQTTQSKSAPAPSDVHEPERGKRHTIVCVFARIARVTRDGSRQRERARGRIADEMVLAEQERRPGRALVDEMAAAAGRHGARDRIKRRQGSLHLSPSGIGAASFALFLSLRLQMDADHFRATLMRSGSGPGEADGYGHMDMDAPARRWLLAKLVSGVRVGAQLLR

SEQ ID NO: 164008 - protein, 1270 aa, Oryza sativa
  Clone ID: PAT_MRT4530_62950C.1.pep
MVTTRRNANTGDGNQPEGSNHNHQGNPPPPPPPPPPPPPDTNAILTQILAQQANMMTAFLHHLQNPPQHNAPPPPPQHSKLAEFLRIRPPTFSSSNNPVDALDWLHAVGKKLDTVQCSDEEKVIFAAHQLQGPASLWWDHFQATQPAGQPITWARFTAAFRRTHVPAGVVALKKREFRELKQGNRSVMEYLHEFNNLARYAPEDVREDEEKQEKFLAGMDPELSVCLVSRDYPDFQRLVDKSIRLEAKHKELESHKRRLANFRNQQGANQRVRYTNPYPGGSSSQQQQQQQQPRSAPRPQFVVRVPQPQQQQNQQGTRAPRPPTPTVQPGQGRRDTQGNFPGRDKRLCFNCFEPGHFADKCPKPRRQQGQAPPRSNNGGKDVIRGRVNHVTAEDVLTTPDVIVGTFLIHSIPATILFDSGASHSFISVPFVGRNQLGVERLRNPLLITTPGGVMTAKYYSPAVPIEIQGIPFPSDLILLDTKNLDVILGMNWLAQFQGIGLSEIPIVREFGDVFPEELPGMPPKREIEFRIDLAPGTTPLYKRPYRMAANELAEVKKQLEELKEKGYIRPSTSPWGAPVIFVEKKDKTKRMCVDYRALNEVTIKNKYPLPRIDDLFDQLKGATVFSKIDLRSGYHQLRIREEDIPKTAFTTRYGLYEFTVMSFGLTNAPAFFMNLMNKVFMEYLDKFVVPRRAAVAAAVVSRRRHHRVRKVAAVPVHRFAAAEDRRRTGDAVDPIFSAAFSSTPPPSVGLPPTFWSSVSSPRRDLRLGALRLCRRAAVRRRACAVRAVRAAEPPPVLTSSLTPFPRYRGGTEAHGDMMWGCVLWVQWYTSGQRYYRRFIENFSKIARPMTQLLKKEEKFVWSPQCEKAFQTLKEKLVSSPVLILPDTRKDFMVYCDASRQGLGCVLMQDGHVVAYASRQLRPHEGNYPTHDLELAAVTTGNNPTGIPHVRALILVPGGKTEPQTKPYPLDMWKYGSALQQRPEDRRGRGRADRVHGSGAHASASRSTADREHAAGGGRRRGSHASAVPAGAVGLRPAPYWEAWGPPLRLAPPFVGPLTVCVAGAGWGSGYCVGGLNVPSWESGVGRAGVAGGSGGWRGRGGVGGVWDDGGAWLRVGFAGALRSVRLRSAHVPMAAFINYRLALFDVLGLLGGCVAVVGCLCDGFWGSPGWRATTGTAAETEEAGGAFGTTRTTAFRRSASEAEGRTRSTTTRRSRRRRRREGRKSGATAAANRSSAATAERRCDGASTIPTGRASGERRKRRRRARGTFK

SEQ ID NO: 164009 - protein, 1357 aa, Oryza sativa
  Clone ID: PAT_MRT4530_62951C.1.pep
MSWHRAGVLLLGAQSCLPVPGVPAMAGSINRRGLDLTGFILELRGMCVVLGYPHGVDYQGKQLPEQEGDDAEPHAAWEVTAVILTGSPERTSLAVTAGGDSFSATCQNAALLAIGTPHQRYPDELQHSPYRYHPRRGGARDYATFRDASSEDDATIMHLARMVEAYDAPRIDFHQMSWVISFNSQLSLFAGSVWDFHMVTTRRSATTGDGNQPEGSNHNNHGSPPPPPPPPPPPPPDTNSILIQILAQQANMMAAFLHHIQNPPQHNAPPPPPPPQHSKLAEFLRIRPPIFSSSNNPVDALDWLHAVGKKLDTVQCNDEEKVIFAAHQLQGPASLWWDHFQAMQPEGQPITWARFTAAFRRTHVPAGIMALKKREFRELKQDNRSVMEYLHEFNNLARHAPEDVRMDPELSVRLVSGDYPDFQRLVDKSIRLEAKHKELESHKSRLANFRNQQGANQRVRYTNPYPGGSFSQQQQQQPRSAPRPQFVVRIPQPQQQQSQQGTRAPRPPTPAVQPGQGRRDIQVQQRLCFNCFEPGHFVDKCPKPRRQQGQAPPRPNNGGKDVIRGRVNHVTAEDVLTTPDVIVGTFLIHSTPATILFDSGASHSFISVPFVGRNQLGVERLRNPLLITTPGGVMTTKYYSPAVPIEIQGIPFPSDLILLDTKNLDVILGMDCEFGDVFPEELPGMPPKREIEFRIDLAPGTTPLYKRPYRMAANELAEVKKQLEELKEKGYIRPSTSPWGAPVIFVEKKDKTKRMCVDYRALNEVTIKNKYPLPRIDDLFDQLKGATVFSKIDLRSGYHQLRIREEDIPKTSFTTRYGLYEFTVMSFGLTNAPAFFMNLMNKVFMEYLDKFVVVFIDDILVYSQSEEDHQQHLRLVLGKLQEHQLYAKLSKCEFWLSEVKFLGHKQPKTVTQVRSFLGLAGYYRRFIENFSKIARPMTQLLKKEEKFVWSPQCEKAFQTLKEKLVSSPVLILPDTHKDFLVYCDASRQGLGCVLMQEGHVVAYASRQLRPHEGNYPTHDLELAAVVHALKIWRHYLIGNRCEIYTDHKSLKYIFTRSDLNLRQRRWLELIKDYDVGIHYHPEDEHGTLWNGNRVCIPDDRELKQLILQEAHESPYSIHPGSTKMYLDLKEKYWWVSMKREIAEFVALCDVCQRVKAEHQRPARLLQPLQVARFIPVKTTYGGNKLAELYFARIKKLQEELDTRLNFSTAYHPQTDGQTERLNQILEDMLCACVLDFGKTWDKSLPNAEFSYNNSYQASIQMAPYEALYGRKCRTPLLWDQVGENQVFGTDILREAEAKKCLRVPSEQADSEQIEVREDLTYVERPVKILDAMERRTRKRVISFCKVQWSNHAEEEAT

SEQ ID NO: 164010 - protein, 1751 aa, Oryza sativa
  unsure (1)..(1751): unsure at all Xaa locations
  Clone ID: PAT_MRT4530_62952C.1.pep
MSWHRAGVLLLGXSVLPACPGGSGRRXGIGSVLLSMARMGWKLCHVFRLYTVVMAGSVSRRGLDMTGFVLELRGMCVVLGYPHGVDYQGRPLPEQEGDDAEPHAAWEVTAVILTGSPERTSLAVTAGGDSFPAACQSAALLAIGTLHQGYPDELQHSPYRYHPRRGGARDFATFRDASSEDDATIMHLARMVEAYDAARIDFHQMVRRGMVENNMKILELRQENLQLKKDLDAVEAQLHQLKITQGEVCRPKCRRVCRSQKITARKSTSRPELVRQSLAWTCFVETPRAEPAPVVPQEGEASGVGSMEDALLLTFRPGPSQRKSAATGEGNQSEGSNHNHQGSPPPLHLPLPPPPPDTNAILTQILAQQANMMTAFLHHLQNPPQQNAPPPPPQHSKLAEFLRIRPPTFSSSNNPVDALDWLHAVGKKLDTVQCSDEEKVIFAAHQLQGPASLWWDHFQATQPEGQPITWARFTAAFRRTHVPAGVVALKKREFRELKQGNRSVMEYLHEFNNLARYAPRFSGDYPDFQRLVDKSIRLEDKHKELESHKRRLANFRNQQGANQRVRYTNPYPGGSSSQQEQQQQQPRSAPRPQFVVRVPQPQQQQSQQGTRAPRPPMPTVQPGQSRRDAQGPQRLCFNCFERGHFADKCPKLRRQQGQAPPRSNNGGKDVIRGRVNHVTAEDVLTTPDVIVGTFLIHSIPATILFDSGASHSFISVPFVGRNQLGVERLRNPLLITTPGGVMTAKYYSPAVPIEIQGIPFPSDLILLDTKSLDVILGMNWLAQFQGVVDCARRTVTLYPGPEQPVVFFAPPTSVSSSELHQIGLSEIPIVREFGDVFPEELPGMPPKREIEFRIDLAPGTTPLYKRPYRMAANELAEVKKQLEELKEKGYIRPSTSPWGAPVIFVEKKDKTKRMCVDYRALNEVTIKNKYPLPRIDDLFDQLKGATVFSKIDLRSGYHQLRIREEDIPKTAFTTRYGLYEFTVMSFGLTNAPAFFMNLMNKVFMEYLDKFVVVFIDDILVYSQSEEDHQHHLRLVLGKLREHQLYAKLSKCEFWLSEVKFLGHVISAKGVAVDPKTVTAVTDWKQPKTVTQIRSFLGLAGYYRRFIENFSKIARPMTQLLKKEEKFVWSPQCEKAFQTLKEKLVSSPVLILPDTRKDFMVYCDASRQGLGCVLMQDGHVVAYASRQLRPHEGNYPTHDLELAAVVHALKIWRHYLIGNRCEIYTDHKSLKYIFTQSDLNLRQRRWLELIKDYDVGIHYHPGKANVVADALSRKSHCNTLNVRGFPPELNQQMEALNLSVVSRGFLAALEAKPTLLDQIREAQKNDPDMRGLLKNMKQGKAAGFTEDEHGTLWNGNRVCVPDVREHKQLILQEAHESPYSIHPGSTKMYLDLKEKYWWVSMKREIAEFVALCDVCQRVKAEHQRPAGLLQPLQVPEWKWDEIGMDFITGLPKTQGGYDSIWVVVDRLTKVARFIPVKTTYGGNKLAELYFARIVSLHGVPKKIVSDRGSQFTSHFWKKLQEELGTRLNFSTAYHPQTDGQTERLNQILEDMLRACVLDFGKTWDKSLPYAEFSYNNSYQASIQMAPYEALYGRKCRTPLLWDQVGESQVFGTDILREAEAKTKGKLAPRFVGPFRIIARREEVAYQLELPASLGNGHDVFHVSQLKKCLRVPSEQADSEQIEVREDLTYVERPVKILDTMERRTRNRVIRFCKVQWSNHAEEEATWEREDELKAAHPDLFASSSESRGRDSV

SEQ ID NO: 164011 - protein, 1767 aa, Oryza sativa
  Clone ID: PAT_MRT4530_62953C.1.pep
MVTTRRTAVTGDGNQPEGSNPNHQGNPPPPPPPPPPPPPDTNAILTQILAQQANMMTAFLHHLQNPPQQNAPPPPPQHSKLAEFLRIRPPTFSSSNNPVDALDWLHAVGKKLDTVQCSDEEKVIFAAHQLQGPASLWWDHFQATQPEGQPITWARFTAAFRRTHVPAGVVALKKREFRELKQGNRSVMEYLHEFNNLARYAPEDVREDEEKQEKFLAGMDPELSVRLVSGDYPDFQRLVDKSIRLEAKHKELESHKRRLANFRNQQGANQRVRYTNPYPGGSSSQQPQQQQPRSAPRPQFVVRVPQPQQQQNQQGTRAPRPPTPAVQPGQGRRDAQGQQRLCFNCFEPGHFADKCPKPRRQQGQAPPRPNNGGKDVIRGRVNHVTAEDVLTTPDVIVGLSEIPIVREFGDVFPEELPGMPPKREIEFRIDLAPGTTPLHKRPYRMAANELAEVKKQLEELKEKGYIRPSTSPWGAPVIFVEKKDKTKRMCVDYRALNEVTIKNKYPLPRIDDLFDQLKGATVFSKIDLRSGYHQLRIREEDIPKTAFTTRYGLYEFTVMSFGLTNAPAFFMNLMNKVFMEYLDKFVVVFIDDILIYSQSEEDHQHHLRLVLGKLREHQLYAKLSKCEFWLSEVKFLGHVISAKGVAVDPETVTAVTDWKQPKTVTQVRSFLGLAGYYRRFIENFSKIARPMTQLLKKEEKFVWSPQCEKAFQTLKEKLDGHVVAYASRQLRPHEGNYPTHDLELAAVVHALKIWRHYLIGNRCEIYTDHKSLKYIFTQSDLNLRQRRWLELIKDYDVGIHYHPGKANVVADALSRKSHCNTLNVRGIPPELSQQMEALNLSIVGRGFLAALEAKPTLLDQIREAQKNDPDMHGLLKNMKQGKAAGFTEDEHGTLWNGKRSLWPYVMCASVSRQNTNDRPVFSNLSKYQNGNGMKLGWISSPDFQKPKVDMIPYGTAYHPQTDGQTERLNQILEDMLRACVLDFGKTWDKSLPYAEFSYNNSYQASIQMAPYEALYGRKCRTPLLWDQVGESQVFGTDILREAEAKADSEQIEVREDLTYVERPMKILDTMERRTRNRAGPPATLADGWDPPVISFLAPRPPPARALAPPPPRIPPHPAVPARIKEGEITPRDSLSRFPLFSLSLSLGFVRFESRNRRRRLQWRPRSPRPIPPSPAAFSPSRCYIFVPRAPLFRFRRSPLALAVGFVLAPCTSLSAVAVDLRFAADVAPGFLPTRRHLHRLRRVVADPVRPFASPADRRSSVVLAVPNRAAAFLRFGRRFRRRCSPGVSRGLPFAFPLPFSLSGAAPPRRWSPAATIGARVRRLPSAVPARPPSGRAPRLPGGPGRQPPAPAGAADAWDPRRRPPPAACSRSTVDREADAWAPPPVDPMADRDEEQILYDTIAEGSSQYWNEEEGNKDPNQYLNEEGNVERDAEGNQEGNVQRDAEGNEEEEASGRQTRGKGVIPWKIGFKEDIHTYRSRMRSKRDTEAKIADLEYRVSSYELSMQEEVASRASTGQVGSQSMDAMQTLDETTCLVDDITQRTPCELYIPFKNLSIKVASGMAIPMDPSGTYHCRLIPAGYSKVEVELVEGATSSSLGDKRRLVHHLLRLRHLLLRLLHRLLRRLLHRLLRKLLVRLLPSQGPPKLHHLPPQATKKAKVDTAKNKDLGYDCTQEELDAYVALEVRRQLKPRSPEKKIPIVPSVRNFFRGMSAPAKEAIKLSDYERTLKKASSEKSKPVPQLGEQPNQEIEPLVTVKILEYKNLLMTPG

SEQ ID NO: 164012 - protein, 642 aa, Oryza sativa
  Clone ID: PAT_MRT4530_62954C.1.pep
MSWHRAGVLLLGAQSCLPVPGVPAVGGLVTAGGDSFPAACQSAALLAIGTLHQRYPDELQHSPYRYHPRRGGARDYATFRDASSEDDATIVHLAHMVEAYDAARIDFHQMVRRGMVENNMKILELRQENLQLKKDLDAVEAQLHQLKIAQGEICRPKRRRVCRSQKITARKSTSRPELVRQSLAWTCFVETPRAEPAPVVPQEGEASCVGSTEDALLLTFRPGPSQRRNAATGDGNQPEGSNHNHQGNPPQPPPPPPPPPPDTNAILTQILAQQANMMTAFLHHLQNPPQLNAPLPPPQHSKLAEFLRIRPPTFSSSNNPVDALDWLHAVGKKLDTVQCSDEEKVIFAAHQLQGPASLWWDHFQATQPEGQPITWARFTAAFRRTHVPAGVVALKKREFRELKQGNRSVMEYLHEFNNLAGYAPEDVREDEEKQEKFLVGMDPELSVRLVSGDYPDFQRLVDKSIRLEAKHKELESHKRRLANFRNQQGANQRVRYTNPYPGGSSSQQQQQQQPRSAPRPQFVVRVPQPQQQQGQQGTRAPRPPTPTVQPGQGHRDAQGQQRLCFNCFEPGHFADKCPKPRRQQGQAPPRPNNGGKDVIRGRVNHVTAEDVLTTPDVIVGSSETCFRKNYPVCRPSERLSSG

SEQ ID NO: 164013 - protein, 1703 aa, Oryza sativa
  unsure (1)..(1703): unsure at all Xaa locations
  Clone ID: PAT_MRT4530_62955C.1.pep
MDISRANEGYTSCGPVVEMSWHRAGVLLLGXSVLPTCPGDSGRRXGIGSVLLSMARMGWKLCHVFRLYTVVMAGSINRRGLDLTGFVLELRGMCVVLGYPHGVDYQGRQLPEQEGDDAEPHAAWEVTAVILTGSPERTSLAVTAGGDSFSAACQNAALLAIGTLHQRYPDELQHSPYRYHPRRGGARDHATFRDASSEDDATIMHLARMVEAYDAARIDFHQMVRRGMVENSMKILELRQENLQLKKDLDAVEAQLHQLKIAQGEVCRPKRRRVCRSQKITARKSTSRPELVRQSLAWTCFVETPRAEPAPVVPQEGEASGVGSTEDALLLTFRPGPSQRRSANTGDGNQPEGSNHNNHGSPPPPPPPPPPPPLDTNAILTQILAQQANMMAAFLHHIQNPPQHNAPPPPPQHSKLAEFLRIRPPTFSSSNNPVDALDWLHAVGKKLDTVQCSDEEKVVFAAHQLQGPASLWWDHFQATQPEGQPITWARFTAAFRRTHVPAGVMALKKREFRELKQGNRSVMEYLHEFNNLARYAPEDVREDEEKQEKFLAGMDPELSVRLVSGGSSSQQQQQQQPRSAPRPQFVVRIPQPQQQQSQQGTRAPRPPTTAAQSGQGRRDVQGPQRLCFNCFEPGHFADKCPKPRRQQGQAPPRSNNGGKDVIRGRVNHVTAEDVLTTPDVIVGTFLIHSIPATILFDSGASHSFISVPFVGRNQLGVERLRNPPLITTPGGVMTAKYYSPAVPIEIQGIPFPSDLILLDTKNLDVILGMNWLAQFQGVVDCARRTVTLYRGPEQPVVFFAPPTSVSSLELHQIGLSEIPIVKEFGDVFPEELPGMPPKREIEFRIDLAPGTTPLYKRPYRMAANELAEVKKQLEELKEKGYIRPSTSPWGAPVIFVEKKDKTKRMCVDYRALNEVTIKNKYPLPRIDDLFNQLKGATVFSKIDLRSGYHQLRIREEDIPKTAFTTRYGLYEFTVMSFGLTNAPAFFMNLMNKVFMEYLDKFVVVFIDDIMVYSQSEEDHQHHLRLVLGKLREHQLYAKLSKCEFWLSEVKFLGHVISAKGVAVDPETVTAVTDWKQPKTVTQIRSFLGLAGYYRRFIENFSKIARPMTQLLKKEEKFVWSPQCEKAFQTLKEKLEGHVVAYASRQLRPHEGNYPTHDLELAAVVHALKIWRHYLIGNRCEIYTDHKSLKYIFTQSDLNLRQRRWLELIKDYDVGIHYHPGKANVVADALSRKSHCNTLVVRGIPPELNQQMEALNLSIVSRGFLATLEAKPSLLDQIREAQKNDPDMRGLLKNMKQGKAAGFTEDEHGTLWNGNRVCVPDVRELKQLILQEAHESPYSIHPGSTKMYLDLKEKYWWVSMKREIAEFVALCDVCQRVKAEHQRPAGLLQPLQVPEWKWDEIGMDFITGLPKTQGGYDSIWVVVDRLTKVARFIPVKTTYGGNKLAELYFARIVSLHGVPKKIVSDRGSQFTSHFWKKLQEELGTRLNFSTAYHPQTDGQTERLNQILEDMLRACVLDFGKTWDKSLTYAEFSYNNSYQASIQMAPYEALYGRKCRTPLLWDQVGESQVFGTDILREAEAKVRTIRDNLKVAQSRQKSYADNRRRDLEFAVDDFVYLRVTPLRGVHRFQTKGKLAPRFVGPFRIIARRGEVAYQLELPASLGNVHDVFHVSQLKKCLRVPSEQADSESNGATTPRKKLPGSVKTS

SEQ ID NO: 164014 - protein, 41 aa, Oryza sativa
  Clone ID: PAT_MRT4530_62956C.1.pep
TITALQLEFSMNDLSSLHHFLWISVSRHPSGLLLSQHILTG

SEQ ID NO: 164015 - protein, 73 aa, Oryza sativa
  unsure (1)..(73): unsure at all Xaa locations
  Clone ID: PAT_MRT4530_62957C.1.pep
TSPAVPGGRRPPGSSAAXEPGLQPGPYSLKPPPSSMASVPERGGPRPPGYSAGLEAGLHPGFFHLTSLDRSGE

SEQ ID NO: 164016 - protein, 2246 aa, Oryza sativa
  unsure (1)..(2246): unsure at all Xaa locations
  Clone ID: PAT_MRT4530_62958C.1.pep
MAAGSSAPVSISSGRPLSLPTLYNRSSCFAPPFPPLAAHSPRRIRARAVFLSLRRRRRAPVRRRRRSGPPPDSASPPSASPRSRRPRPPLRFARRLSERRRPRRSEPRRRLPPLRLSFPPSSSSRGEPWTASFASPFPPLSRPPLRRAVGRRRRPSGRGCAASRRPCRRGRLRARPAAARWXPAVSRPRPRVRLTRGTHGAGRRQPRAPGPPWTERLTXHLGHIRTGLRASVAKHYRXFHMSSGANEGYTSCGPVVEMSWHRAGVLLLGAQSCLPVPGVPAVGGIGSMAGSVTRRGLGMTGFVLELRGMCVALGYPHGVDYQARPLPEQEGDDAEPRAAWEVTAVILAGSSERTSLTVTAGGDSFPAACQSAALLAIGTLHQRYPDELQHSPYRYHPRRGGARDYATFRDASSEDDATIVHLARMVEAYDAARIDFHQMVRRGMVENNMKILELRQENLQLKKDLDAVEAQLHQLKIAQGEVCRPKRRRVCRSQKITARKSTSRPELVRQSLAWTCFVETPRAEPAPVVPQEGEASGVGSTEALSVAGSVWGFQMVTTRRNAVTGDGNQPEGSNHNHQGNPPPPPPPPPPPPPDTNAILTQILAQQANMMTAFLHHLQNPPQHNAPPPPPQHSKLAEFLRIRPPTFSSSNNPVDALDWLHAVGKKLDTVQCSDEEKVIFAAHQLQGPASLWWDHFQATQPEGQPITWARFTAAFRRTHVPAGVVALKKREFRELKQGNRSVMEYLHEFNNLARYAPEDVREDEEKQEKFLAGMDPELSVRLVSGDYPDFQRLVDKSIRLEAKHKELESHKRRLANFRNQQGANQRVRYTNPYPGGSSSQQQQQQQQPRSAPRPQFVVRVPQPQQQQGQQGTRAPRPPTPTVQPGQGRRDAQGQQRLCFNCFEPGHYADKCPKPRRQQGQAPPRSNNGGKDVIRGRVNHVTAKDVLTTPDVIVGTFLVHSIPATILFDSGASHSFISVPFVGRNQLGVERLRNPLLITTPGGVMTAKYYSPAVPIEIQGIPFPSDLILLDTKNLDIGLSEIPIVREFGDVFPEELPEKKDKTKRMCVDYRALNEVTIKNKYPLPRIDDLFDQLKGATVFSKIDLHSGYHQLRIREEDIPKTAFTTRYGLYEFTVMSFGLTNAPAFFMNLMNKVFMEYLDKFVVVFIDDILIYSQSEEDHQHHLRLVLGKLREHQLYAKLSKREFWLSEVKFLGHVISAKGVAVDPETVTAVTDWKQPKTVTQVRSFLGLAGYYRRFIENFSKIARPMTQLLKKEEKFVWSPQCEKAFQTLKEKLVSSPVLILPDTRKDFMVYCDASRQGLGCVLMQDGHVVAYASRQLRPHEGNYPTHDLELAAVIHDLKIWRHYLIGNRCEIYTDHKSLKYIFTQSDLNLRQRRWLELIKDYDVGIHYHPGKANVVADALSRKSHCNTLNVRGIPPELNQQMEALNLSIVSRGFLAALEAKPTLLDQIREAQKNDPDMHGLLKNMKQGKAAGFTEEEHGTLWNGNREKYWWRVKAEHQRPAGLLQPLQVPEWKWDEIGMDFITGLPKTQGGYDSIWVVVDRLTKVARFIPVKTTYGGNKLAELYFARIVSLHGVPKKIVSDRGSQFTSHFWKKLQEELGTRLNFSTAYHPQTDGQTERLNQILEDMLRACVLDFGKTWDKSLPYAEFSYNNSYQASIQMAPYEALYGRKCRTPLLWDQVGESQVFGTDILREAEAKVRIIRENLKVAQSRQKSYADNRRRDLEFAVDDFVYLRVTPLRGVHRFQTKGKLAPRYVGPFRIIARRGEVAYQLELPASLGNVHDVFHVSQLKKCLRVPSEQADSEQIEVREDLTYVERPVKILDTMERRTRNRAGPPATLADGWGPPVIAYLAPRPPPARALAPPPPPPNPPHPAVPVRHKEGEITPRDSLSLFPRFSLSLSLGFVWNLSRNPRRRNQWRPDPPRRFPSPPAALSHSRRYIIAPRASLLRFRHSPHTLPVGFVPAPSSSLSAVAAELRFAAVVAPDLLPTRRHLLRLRRVPVDLVHPFVSPADCRSAAVLVDPNRAAAFLRSGCRFRRPRRPGVSHGPPPSLPPSLPSLGRRSAAPLVAGGDHRGAGAPPPVGRAGEAAFGRAPRLPGGPGRQPPAPAGAADAWDPRRRSASAACTRSTVDREADAWAPLPWTRLGSGCMVLMVAPRPYKDRSSGLCCKALPYFHMSSGANEGYTSCGPVVEMSWHRAGVLLLGAQSCLPVPGVPAVGGIGLAQFFPSP

SEQ ID NO: 164017 - protein, 227 aa, Oryza sativa
  unsure (1)..(227): unsure at all Xaa locations
  Clone ID: PAT_MRT4530_62959C.1.pep
MPLALAQLQDIGDRITDRLRPWSRSAEFWVRAADIYTSYKVCQLRAGFVKDEEEREAMWEQQHELGAQKMYSLCSELGGLFLKAAQILGKPDLAPMAWVKRLVTLCDNAPATPIDVVRDVVEKQFGKSFDDIFECFDVEPVGSASIAQVHRARLKLSKTDVAVKVQHPGAEKLMMVDIRNMQAFALFLQKYDINFDLYSATKEMEKQICXYEFDFVREAKAMGKNTR

SEQ ID NO: 164018 - protein, 96 aa, Oryza sativa
  Clone ID: PAT_MRT4530_6295C.1.pep
RALYVKRIHSCVTNTVHITVREKIFVSGHEKFYAAADKQYWGSLFSLIPHEIATTVKRRKKDTDNKPSITVIHGPQYGWHADLSLMSPILLKVKHA

SEQ ID NO: 164019 - protein, 505 aa, Oryza sativa
  unsure (1)..(505): unsure at all Xaa locations
  Clone ID: PAT_MRT4530_62960C.1.pep
MPLALAQLQDIGDRITDRLRPWSRSAEFWVRAADIYTSYKVAPPDPVPLLHWLVCQLRAGFVKDEEEREAMWEQQHELGAQKMYSLCSELGGLFLKEAAQILGKPDLAPMAWVKRLVTLCDNAPATPIDVVRDVVEKQFGKSFDDIFECFDVEPVGSASIAQVHRARLKLSKTDVAVKVQHPGAEKLMMVDIRNMQAFALFLQKYDINFDLYSATKEMEKQICYEFDFVREAKAMERIREFLRVTNKKKPPVIVPRVIPEMVSREVLVMEFIEGTPIMNLGNEMAKRGIDPGGKIATMAKQKILTDLTLAYGHMILKDGFFHTDPHPGNILICENTEARLLFLFLFLAMVALLDYGQVKAMPEDLRLAYANLVIAMADDDFLRTKESFREIGIETWSIADNELEELFQLSLRMFDTSLPPXLTAMSPFAEDSSLNKVGVQNCLLNGVSILFFYLKSFPEELFSVLRTIQLLRGLTVGMGLRFSCAQQWKPIAEEALLKSGRLKDY

SEQ ID NO: 164020 - protein, 105 aa, Oryza sativa
  unsure (1)..(105): unsure at all Xaa locations
  Clone ID: PAT_MRT4530_62961C.1.pep
RRSRRLCTSXRAWPPPGLRASTQAQHQLGSHGWRTCFPFTSADMASGRSGSTVRRSWRSRRRRSGVVPHLSLCTMQMAPVISQCPAPCGSNKYGLIDQLLYKLGK

SEQ ID NO: 164021 - protein, 81 aa, Oryza sativa
  Clone ID: PAT_MRT4530_62962C.1.pep
MAYYLTEKAMNTRCHPTHMQPPSLDLPERLSIVRHAKSWPNHNDDALVGGTAAVGANIAGNVVSKLEKLLDDGHLWRGEGK

SEQ ID NO: 164022 - protein, 35 aa, Oryza sativa
  Clone ID: PAT_MRT4530_62963C.1.pep
MASFGALGVGLHVLEVVARGGGGIEGGLGIAVGVR

SEQ ID NO: 164023 - protein, 92 aa, Oryza sativa
  Clone ID: PAT_MRT4530_62964C.1.pep
MEATSRSDHILWNPDKQNIDEAIIASNAWGIYKGTKHASKEEDEPSQTNREQSRKALPKNLIAAFSRCRTSKAEVPETCSPDRRCTPASGMV

SEQ ID NO: 164024 - protein, 444 aa, Oryza sativa
  Clone ID: PAT_MRT4530_62965C.1.pep
RRSARLLPRDYKNGSFAAAPAGPPPPVHLGRRRCRCRDRDPRLDRLPQEPAAAAAGVAWHRGRPARAFSLFCAAAAAAGRSVFLAQAASMAAANGSACGGGGVDKEKEEFKQIYGVLKEELLRDPAFEFTDSSRQWIDRMLDYNVPGGKCNRGLSVVDSYKLLKGTNVLSQEDMFLASTLGWCVEWLQAYFLVLDDIMDDSHTRRGQPCWFRVPQVGSIAINDGIILRNHITRMLRLHFRGKLYYADLLDLFNEVEFKTASGQLLDLITTHEGEKDLNKYNIGVHRRIVQYKTSYYSFYLPVACALLLSGEDLTKYGAVEDILVKMGIYFQVQDDYLDCYGDPKFIGKIGTDIEDYKCSWLVVQALERADESQKSVLFENYGKKDPACVAKVKSLYRELNLEAVFLDYENESYKKLIADIEAQPSIAVQNVLKSFLHKIYKRQK

SEQ ID NO: 164025 - protein, 152 aa, Oryza sativa
  Clone ID: PAT_MRT4530_62966C.1.pep
MSTPARKRLMRDFKRLMQDPPAGISGAPQDNNIMLWNAVIFGPDDTPWDGGTFKLTLQFTEDYPNKPPTVRFVSRMFHPNIYADGSICLDILQNQWSPIYDVAAILTSIQSLLCDPNPNSPANSEAARLFSENKREYNRKVREIVEQSWTAD

SEQ ID NO: 164026 - protein, 61 aa, Oryza sativa
  unsure (1)..(61): unsure at all Xaa locations
  Clone ID: PAT_MRT4530_62967C.1.pep
VPGEIFSGHSEKEENTFSLHQDTPIGFYRVFENKNLHIWQLTRFAYWCXCLKRISVDICAG

SEQ ID NO: 164027 - protein, 43 aa, Oryza sativa
  Clone ID: PAT_MRT4530_62968C.1.pep
LAYLGFRIQAGCVLNMGAYVSTLWHYVILLELKTYLEMFLHSA

SEQ ID NO: 164028 - protein, 103 aa, Oryza sativa
  Clone ID: PAT_MRT4530_62969C.1.pep
MGTRDGTWKTMTGNCRGRRTTGRRKGRRRIWSGGSDEISPVRIEEYWSSGRGKENGENKFQPTGLDGSLRRCPLGPTRRLPRSTSQSGGGGSCDSNVAGGSGA

SEQ ID NO: 164029 - protein, 1029 aa, Oryza sativa
  Clone ID: PAT_MRT4530_6296C.1.pep
MHLRLLLLLVGVAAAAADADADADALLAAKAAMSDPTGALASWGGNGTRTNTTAAAAAHCAWAGVTCSSRGAVVGLDVSGLNLSGALPAELTGLRGLMRLSVGANAFSGPIPASLGRLQFLTYLNLSNNAFNGSFPAALARLRGLRVLDLYNNNLTSPLPMEVVQMPLLRHLHLGGNFFSGEIPPEYGRWGRMQYLAVSGNELSGKIPPELGNLTSLRELYIGYYNSYSGGLPPELGNLTELVRLDAANCGLSGEIPPELGKLQNLDTLFLQVNSLAGGIPSELGYLKSLSSLDLSNNVLTGEIPASFSELKNLTLLNLFRNKLRGDIPDFVGDLPSLEVLQLWENNFTGGVPRRLGRNGRLQLLDLSSNRLTGTLPPELCAGGKMHTLIALGNFLFGAIPDSLGECKSLSRVRLGENYLNGSIPKGLFELPKLTQVELQDNLLTGNFPAVSGAAAPNLGEISLSNNQLTGALPASIGNFSGVQKLLLDRNSFSGVVPPEIGRLQKLSKADLSSNALEGGVPPEIGKCRLLTYLDLSRNNISGKIPPAISGMRILNYLNLSRNHLDGEIPPSIATMQSLTAVDFSYNNLSGLVPGTGQFSYFNATSFVGNPGLCGPYLGPCRPGVAGTDHGGHGHGGLSNGVKLLIVLGLLACSIAFAVGAILKARSLKKASEARVWKLTAFQRLDFTCDDVLDCLKEENVIGKGGAGIVYKGAMPNGDHVAVKRLPAMGRGSSHDHGFSAEIQTLGRIRHRHIVRLLGFCSNNETNLLVYEYMPNGSLGELLHGKKGGHLHWDTRYKIAIEAAKGLCYLHHDCSPLILHRDVKSNNILLDSDFEAHVADFGLAKFLQDTGASECMSAIAGSYGYIAPEYAYTLKVDEKSDVYSFGVVLLELVTGRKPVGEFGAGGRTGEWVRMMTDSNKEQVMKVLDPRLSTVPLHEVMHVFYVALLCIEEQSVQRPTMREVVQILSELPKLAPRQGEVLSHAVDGFASNPPAPVPSGSAEALTGDAKDQQQQQTNSESTTPPDLISI

SEQ ID NO: 164030 - protein, 70 aa, Oryza sativa
  unsure (1)..(70): unsure at all Xaa locations
  Clone ID: PAT_MRT4530_62970C.1.pep
MAAVTMDLSXAALAIKAFSNVFSQGRITMRKLAANPKPDASEIPCYGANRLLYLGPLSGELAIYLTGEFP

SEQ ID NO: 164031 - protein, 32 aa, Oryza sativa
  Clone ID: PAT_MRT4530_62971C.1.pep
GDTPITVAPWREEEIEEFLDFLIGCPSNLLYA

SEQ ID NO: 164032 - protein, 69 aa, Oryza sativa
  Clone ID: PAT_MRT4530_62972C.1.pep
QVVLISSSTGANCSVPKQSMMGVGILVDICIGHIINLRPLTIMCSIHGKRISCHSSPQHVSDPIYSIYI

SEQ ID NO: 164033 - protein, 109 aa, Oryza sativa
  Clone ID: PAT_MRT4530_62973C.1.pep
TVKNDVYSFGVVLFELISRKKPVYHCHDKNRRLIPEFIRAYETAKSGKAMFDEGIMAEEDIAVLEEIGRLAMECVSLEIDGRPTMKEVAERLKMIRRMKESSAMGAARC

SEQ ID NO: 164034 - protein, 44 aa, Oryza sativa
  Clone ID: PAT_MRT4530_62974C.1.pep
LPTNFRNSHYHSYHINRISYHHLRTTLFFFTLSPIYNTLSNSQL

SEQ ID NO: 164035 - protein, 197 aa, Oryza sativa
  Clone ID: PAT_MRT4530_62975C.1.pep
MSASRFIKCVTVGDGAVGKTCMLISYTSNTFPTDYVPTVFDNFSANVVVDGSTVNLGLWDTAGQEDYNRLRPLSYRGADVFLLAFSLISKASYENVSKKWIPELRHYAPGVPIILVGTKLDLRDDKQFFVDHPGAVPISTAQGEELRKLIGAAAYIECSSKTQQNIKAVFDAAIKVVLQPPKQKKKKKKAQKGCAIL

SEQ ID NO: 164036 - protein, 184 aa, Oryza sativa
  unsure (1)..(184): unsure at all Xaa locations
  Clone ID: PAT_MRT4530_62976C.1.pep
MGLRSALTLWTALKKRFEKLKYTILPQAXDWARQRFTNFKSVSEYRSGCHXITDTTTLSIFHPSAVQSARNYRQASYKEYDEMIDIMQLSESHDEVLRKNFVSQPPGMSVGLDVNVISYKVYKPVQRKRGKRGGKKAVEKSERKAPAAQGAQGGKGKKEAKPPXNDKPYGQQDQTCYKCGIWGH

SEQ ID NO: 164037 - protein, 212 aa, Oryza sativa
  Clone ID: PAT_MRT4530_62977C.1.pep
MSASRFIKCVTVGDGAVGKTCMLISYTSNTFPTDYVPTVFDNFSANVVVDGSTVNLGLWDTAGQEDYNRLRPLSYRGADVFLLAFSLISKASYENVSKKAIKSCRPLSLLSLHEWIPELRHYAPGVPIILVGTKLDLRDDKQFFVDHPGAVPISTAQGEELRKLIGAAAYIECSSKTQQNIKAVFDAAIKVVLQPPKQKKKKKKAQKGCAIL

SEQ ID NO: 164038 - protein, 35 aa, Oryza sativa
  Clone ID: PAT_MRT4530_62978C.1.pep
VESMLCKVAGVKVDTRPRVFIELGPNYIRLSSEMC

SEQ ID NO: 164039 - protein, 430 aa, Oryza sativa
  Clone ID: PAT_MRT4530_62979C.1.pep
MGLGGGGEGTKPPLLFCRSMPPPLPPDSAEQIRAHCHPPSLSLARRGEGAGIRGLNSGQTTDLWPVGLGRGQRQAVVWRRCLREAGEAADLLHVMDQGIECNAEKEVERFAGWSPCQKAAWVKMRRKPRHTGTGFARVPNLVVERPSGPLRPQGILPDRWAEPFKPSRGPAFGARRRSWYGTIDFGCCAATTTFGSCRFNGAGAERGRSGKGGSNVKGAPDQGGDPFDKSTDGAPSCFAAVTSHPRSTRKRRFKSCKHQRTSPDKCRKQWPKELQLCKRSFRLFFSSSTNPTTLQKGFAMELRTAIRLRQRHSSTNHSTTGTDTRLRNESDTEPGGEKGLPLNGGIKIRPIPPQFKFPPVPRYPGETDPKEFISIYESTIEAAHGDENTKAKSPLLKPKYKRRPPNRLLSPFASLSRRSKDNRQDQVKLP

SEQ ID NO: 164040 - protein, 106 aa, Oryza sativa
  Clone ID: PAT_MRT4530_6297C.1.pep
MDASQTVVPSRWPSNSSEIADVLGEFNLQSGKSPYMKEEHMLGQHRHILKLKGGGWGLGGGGRGSNAEKVCLPFVVHGLPGTASPELRRTAAAAAAASAAARRSGV

SEQ ID NO: 164041 - protein, 55 aa, Oryza sativa
  unsure (1)..(55): unsure at all Xaa locations
  Clone ID: PAT_MRT4530_62980C.1.pep
IIIKFIFFFLFFFFIFYFFFFXIFLDHIYLYMLILLYTPKFGETILHYCSESEFP

SEQ ID NO: 164042 - protein, 2012 aa, Oryza sativa
  unsure (1)..(2012): unsure at all Xaa locations
  Clone ID: PAT_MRT4530_62981C.1.pep
MPPGRGTTPKGDATVSRPNGSARLSAVIAYPNPHNQSAQEGSSPVDYIVPSAIWPRPLPQIFPSSTSRPHPVSFPTARLLPHLHKMPPSATVASCQPARSGLGGSDLEVQRAVRVVDVVEGASMRPLRRRSRGGEVLDKPGQRRGPPSSSPSPSPPYPPXRRRHHNRHQHRRHHQGPVCIKDIVCPQXCPHHKGNHLSIRQQLALTVGTSERNHXERMPPKKVAKEKVARRKESEVGVEMAAEEEAEPSALGAEAGMVPSTSAAAPQPPRSALAASTGQALNAVEAAKAAAMSRALQTRVEILSTSQPMVPQAASPRXAEAPTALTAAQVNSNLKAQAEADMGAVRQNMARFLDMLRQMQEQQQAYQATRQAKVASAPILQYSAGYIPPQVYPQAPIQVMQAPAYFTGQMSQAMAEGASALQAQLQAFLQQLNQPHNTPEVTPSAQPEGNTSQGAPSWLPSNLPGPGASPWSXGPQFDFGNATQAPTIRPQAPTPGFGTNQTPNQVAMAWAQPSFDPSMAAHQASPFGAGQPNTVAQPHAQAMTSPFATPYPNGPLQXGAVSKAGGEKGLPLNGGIKIRPIPPQFKFPPVPRYPGETDPKEFISIYESTIEAAHGDENTKAKVIHLTLGGIARSCFFNLPANSIYSWEQLHDVFVLNFRGTYEEPKTQQHLLGIRQRPGKSIREYMRRFSQAQCQVQDIIEAFVINTASAGLLKGELTRKIANKEPQTLEHLLHIIDRYVRGEEDSKRRQAIXAEYDKASVAAAQAQVQAQAAEPAPLAVRQSQPPIQGQPPRPSQAPMTWRKFRTDRAGKAVMAVEEVQALRKKFDAQQASSHQQSVRKKYLNQQISFGPEDVERVLFPHQDPLVISAKVAGFEVRRILVDGGSSADVIFAKAYAKMGLHTLALTQAPSSLRGFDGEVVQVXGQAQLVVAFGIGENRREEQILFDVVDIPYNYNAIFGRATLNKFEAISHHNYLKLKMPSPAGVIVVKGFQPSATSNGDLAAINRAVHNVEVELYDRSKHAPKPAPHGRVIKVQVDDADPKRLVSLGXDMGEREADSILEVIKKNIDIFAWGPDEVGGVSTDLIMHHLAVKPDAKPRKQKLRKMSADRQEATKAEVQKLLKAGVIQEIDHPSXLANPVLVXKSNRKWRMYVDFTDLNKACPMDDFLLPXIDQLVDSTAGCELMNFLDAYSGYHQIHMNPADIPKTAFITPFGTFCHLRMPFGLRNAGATFAKLVYKVFYKQLGQNVEAYVDDIVVKSHKAFDHASDLQETFDNLRAAGMKLNPEKCIFGIRAGKLLGFHAAERGLPFFKTLRGTGKFTWTPECQAAFDELKQYLXSPPALVSPAPGSELLLYLAASPVAVSAALVQETESGXKPVYFVSEALQGAKIRYIEMEKLAYALLMASRKLKHYFXAHKVTVPSQYPLGEVLRGKEITGWLRKWAAELSPFDLHFVARTAIKSQILADIVAEWTPPFAPEPEPVEQPWVMYSNGSWSHKRAGAAAVLTSPGGVPIRYAARLQFDTTNNAAEYEAMLLGLKKAKAMGVRRLLVRTDSKLVASHVDKSFEAKEEGMKRYLEAIRSMEKCFASITVKHLPRGQNEEADALAKSAACGGPYSPGTIFEVLYAPSVPVEILDIMAIDQVELGEDPEDWRTPFVKLXYLKNGWLSEDEAKAERLQLRAVKYKLVSGQLYRSGVLQPLLRCISFAEGEEMAKEIYQGLCGAHQAARTVASKVFXXGVYWPTVLKVCVEQAKKCESCLRHSQSQTTPQYEQQPIAPIWPFARWGLDIIGLFPMARNGYKFTIVAIEYFSRWIEAEPLGVITSAAVQKFVRKNIVCHFGIPKEFITDNGKQFDSDKFNEMCKGLNLEIRFASVAHPQSNGVAERANGKILEALKKRLEGAANGKLPDEMLSVLWALRTTPTRPTKFNPFMLIYGDEAMTLTEIGANSPRVMFSGGEEGREVSLKLLEGVRVEALEHMRKYATSTSATYNKKVRPTELLPSHLVLRKNANPVAVGK

SEQ ID NO: 164043 - protein, 162 aa, Oryza sativa
  Clone ID: PAT_MRT4530_62982C.1.pep
HEDPRGYMTQQLTDRSDVYSFGVLLLEVITARKPLERGRYVVREVKEAVDRRKDMYGLHELLDPALGASSALAGLEPYVDLALRCVEESGADRPSMGEAVAEIERIAKVAGAGGAAAAESAASDSMSYAASRTPRHPYGGGGGDSASEYSGGGLPSMRVEPK

SEQ ID NO: 164044 - protein, 93 aa, Oryza sativa
  Clone ID: PAT_MRT4530_62983C.1.pep
MMKLRSSLYQSTTLSYPSCSVLLTNRSRHQVWIESITQNPNQLMPRTNSNHYYAVSQLCACRSTVIGLQYTQIKWHYPFLFSPRRSISRTKTN

SEQ ID NO: 164045 - protein, 136 aa, Oryza sativa
  unsure (1)..(136): unsure at all Xaa locations
  Clone ID: PAT_MRT4530_62984C.1.pep
SATWLLVPARKLFLLSHPDAEDXSPAMVALRSDVLHAVKSXSLSIYPSAGSPPARRGRVAGRRTTRARIDEEVRKLDGKIADAEENLGDIEVREAHLAESLYFISVRQKVNCMHAWRLYEVHDNASGSISCCHSYS

SEQ ID NO: 164046 - protein, 52 aa, Oryza sativa
  Clone ID: PAT_MRT4530_62985C.1.pep
LVNWWWALLLDLGLKVLVYPVLVRLLVGEMCAKKKSEDSSKLVKNLDPLPQE

SEQ ID NO: 164047 - protein, 363 aa, Oryza sativa
  Clone ID: PAT_MRT4530_62986C.1.pep
MAHAKSNGYQASDATSSLDALRELYGNTFAVVKSMALKAAMDLGIADAIHHHGGAATLSQIVTRVALHPSKVPCLRRLMRVLTLSGVFAVQKLAPGDAAAPADEAEAAVYALTPVSRLLIGAGNQGHMMSMLLHPNFITPFFRISDWLQRELPGPCIFKHTHGRSLWEMADDDAAFNTVVNDGMASDSIFTMDILVREHGEVFQGISSLVDVAGGNGTAAQAIARAFPEVKCSVMDLAHVVAEAPGGTGVEFITGDMFESVPPANAVFLKGDNDCVKILGNCKKAIPTRDKGEKVIIMDIVVGTGPSDQKHRDVQILYDAYIMFINGAERDEQEWKKLFLEAGFSDYKIMPIMGFRSIIEVYP

SEQ ID NO: 164048 - protein, 243 aa, Oryza sativa
  unsure (1)..(243): unsure at all Xaa locations
  Clone ID: PAT_MRT4530_62987C.1.pep
PHPPPPPPPPIPIHRASMVAVARPAASAASNEMVCGICGSGHDQDRMAKCIRCNVYQHCYCFPVVTYDVPDEWCCCECQNKSNWDQTPSQGGQTIRNRVHQDSLKIPNKFENAKVKYISYEEVSLLNNNERPPNCRSNFHVRRTNSHVRPASPPNAKQSSSRSDNRAYSQFHRKFPNGQQSPCRSDTQGPFLKRGDGASQNQTEIAGINMKQKAQSGEMLRPCHRSRAIRGKNDFQXQNEQRE

SEQ ID NO: 164049 - protein, 96 aa, Oryza sativa
  Clone ID: PAT_MRT4530_62988C.1.pep
MADQLHNRAICPMVQSIMQQVQFDAGFVGEPQAQAQAQVALNLPSMCGVYPRYCSTPCKVATGIAFLVVCTSHTYSWIISVHIIVCVTCKLIASCR

SEQ ID NO: 164050 - protein, 74 aa, Oryza sativa
  Clone ID: PAT_MRT4530_62989C.1.pep
GHSAEPPTGCRWKQRRRDGARGSRLPPRRPSPPRHTFLLTSHVEGFASADWTWMEAVAGQNTRVKHPRPPSPPL

SEQ ID NO: 164051 - protein, 454 aa, Oryza sativa
  Clone ID: PAT_MRT4530_6298C.1.pep
MGHHMTGRIYLIILRCRISGIQVHGDNLVDHGSSGVIRIFFLDLQRYLIVIDNVWSISAWEAILSRLLDNKCSGRIIVTTRIEHVARACSSASLEEDYYIHRIKPLQFEDAKKLFINAVFGPKQDCPQHLVETMHKILTRCTGLPLAIVCIGRLLAGYRACMMYLSIFLEDYDIGKNRLLYRWIAEGLVSEQRGLTLIEVAEAYFDDLVSRHMIQPPCVEPYGKEPKCRVHDMMLDITVSKALESNFVRLVGNQCQGTNSYGSVRRLSIHSDDQGYGIDNTKLSHIRSLTTFRPSGHRRLLDKLSEFTLLRVLDLQDYITELPSQINKLHHLYTLWLYETLLNKVPESLVDLEKLERVGFTNRHDPTILLRLPRHIRKMKVLQQIYSFELRKDDVQLAREIGDLVQLQVLGVILSCSNCSNEQVLIELAKSIGRSPRVVYGWHAFSGKQHEFSP

SEQ ID NO: 164052 - protein, 83 aa, Oryza sativa
  unsure (1)..(83): unsure at all Xaa locations
  Clone ID: PAT_MRT4530_62990C.1.pep
KGPNFFFGENFSPPGPKGPHFHKWPVFQNVEGPPPLGGHXKILAPQTKIKTLLYKGPEMEFFFGPPPPEGSGPAPLLKGFPLF

SEQ ID NO: 164053 - protein, 859 aa, Oryza sativa
  Clone ID: PAT_MRT4530_62991C.1.pep
MGSECWAHFEKKADNMAECRHCHNLLSYKNGTSRLNRHYQESCRKRGRQQGSHHGASAFSRSSSDDLGEQTAAAAAAEDQLIRMIALHGFPSSMVEDVEFTRFVRMLCPDFKMPSRDDVRKRCDELFDREMSSLKDAIGRTPGLASLSLGKTTTAWGKVAYLAAHFIDEEWNFHCRVIQVFKALEVEDDTTYGLSKILDIKDYIIDIPVTDWEPEDYEHPRYKLVYVENLLKNFQSILKNAPSVDLVSKEKAGQKAECRHCKKQLSFKNGTSRLNRHYQDTCPARKRARQQGSHGASVQAGIHDLQDAPAFSRSSSDNFGEQTAAAAAAAAEDQLIRMIALHGFPSSMVEDEQFIRFVGMLCPDFKMPSRDDVEERCDALFDQETCSLKDAIARTPGLLSNIKPIPYRACEAEKKDSEWINASRKDDSDDEDIDEEQAPDIEDYDMQSHLEQTKEYMDKFFEDSYLSQSISLILDPRFKLVNAERLLKKASLPPDRISEVQAAVVQLFQDYSNQGSARQHTNHNNENVMDIDPFQQIDNSTFQTVGQSSMEHDHRRTELDAYLREKTVPIKQENFDILKWWKENCHSPSSITTKKLRTIMQTLGLNPMKAELQDIISEVDADGSGIIDFYKPAQRSPLLLIVPFLEPASACTQGPRSAAPHAAPKPHRAKLHENRRALSGRHGATSPRVTPVLSPFHPELSRTRVPSLSPVVLSSVSSREAAELAPPSHSRSIATTPEPPRYSPGAAVAGGASPEFSAALPQPPVASPRPIAETHRYPRPSRAKEREEEEAGLLKPLPSRPHLPLLLPATDEQGPCAFSSLAATDRPYHELSLPTEYEDEDIDPTAEEHLQEQAEYEDF

SEQ ID NO: 164054 - protein, 201 aa, Oryza sativa
  unsure (1)..(201): unsure at all Xaa locations
  Clone ID: PAT_MRT4530_62992C.1.pep
GRFVVNWSLINITVTNIWALLTAPKSHLPVDHEYIADVALAHIFDRGLEEVFFHHGAXIALWRGEDTLXVKTLYXLKPTXFTAADARGLNRIYGGLQDKPSDWRLAEEALLNGRYEYGQRNMEQGSNHXQPPAMSGKLGVAKVQRGLRGLRPNIFVGAGDHGNPGEEHLGVGTCSLGLEGFGPTDNXAGALDSLPNHMLML

SEQ ID NO: 164055 - protein, 52 aa, Oryza sativa
  Clone ID: PAT_MRT4530_62993C.1.pep
LAASCGPCTHWPCAASYPIPHCSPAPLAVLPPLLSCWARSCGRTLWQFLGPG

SEQ ID NO: 164056 - protein, 315 aa, Oryza sativa
  unsure (1)..(315): unsure at all Xaa locations
  Clone ID: PAT_MRT4530_62994C.1.pep
MPESWRDAEANASAAAPPSSASVAAADSSLGNGKGGGGAAARGERAASAASASAWVPFHFHKLFAFADKTDVALMALGTLGAVANGVALPFMTVLFGNLIDAVNRVSMVSLEFIYLAIASSVASFVQVTCWMIPGERQAARIRNLCLKTILRQEIAFFVKYTNTGEVVGRMXSGDTMLIQDAMAAATAARHPSSSPQPPPPRAASPSASASRPSTSSSRGSGLHQQPPRRRAPAGTASSSSTTSSRGARRTSRTTSPTRGSSSSAGTNLIPCRRGRASRGRRGLASASASSASRSLAAASSSPTTAVSASPASAR

SEQ ID NO: 164057 - protein, 95 aa, Oryza sativa
  Clone ID: PAT_MRT4530_62995C.1.pep
MPFHPFWVVTIGGCQYYQWEDEMVDTGVQTPHAPAPIHTVPLQAVAPPGGFPTTPLPIRQDQATGVDIRVMQQLKWLEKMVYVCIFLTLYAIFKK

SEQ ID NO: 164058 - protein, 99 aa, Oryza sativa
  Clone ID: PAT_MRT4530_62996C.1.pep
DSISGPFFFFLNKVTTGGKKLEARRQIITKIPLVINSSIVHCIACHNPKRGGSKKLFQGINSQTKPRMNTILTRTNRGNQPIILRMTGTQQVPLGTGKL

SEQ ID NO: 164059 - protein, 156 aa, Oryza sativa
  Clone ID: PAT_MRT4530_62997C.1.pep
LSPSLSPYTARREGRAAAPRGRRSEAATKRPAGGSGATIGGAATERSGAAASGERSDGRRWATGGSGAAVGRNGAAAGAAAAAGHGTGGAATDSAWPAAGDGARGGARGAWSRWRCRAARGGGGASGASRPHHHHHHQKQRSRHGACRAPTRGGCR

SEQ ID NO: 164060 - protein, 52 aa, Oryza sativa
  Clone ID: PAT_MRT4530_62998C.1.pep
VLLLLFFYPLFKNHHKRGRGTHNEEGLPLLTAAGGWTTKQKQKTPHHNPPLY

SEQ ID NO: 164061 - protein, 123 aa, Oryza sativa
  Clone ID: PAT_MRT4530_62999C.1.pep
MTTTCASEGRCVISKGSKQGLYDDGGGDSGSGFSPSAAEHKRHEQIGNLAVELKHPRLASEPSAMVPRLRLRCPQASWTHQRTNNMVTMSCLLGFQLQNSKGKNIKVNRGTGMGTWNWKKPHP

SEQ ID NO: 164062 - protein, 89 aa, Oryza sativa
  Clone ID: PAT_MRT4530_6299C.1.pep
VPYRYRMIAVMKALAEASTIWALVHSQGCRAGTLSGGIQRLQSSIDGGSMECQSTRPPALYPIMTVMHAVMITERSEIQIMQGTYTQTI

SEQ ID NO: 164063 - protein, 324 aa, Oryza sativa
  unsure (1)..(324): unsure at all Xaa locations
  Clone ID: PAT_MRT4530_629C.1.pep
MAADKSPIDEAPFYGKHEQEDLGTIAYSARAPSSVRNMLPQAAGGFTKPSASTPATSWTAACASIADLPSQGRWLSLALFTKLYASTPSTSWTAACASIAELLDIGHLTFSGYGLTAIGLIIFVILLGDNLDKLLPGTVVEILGYQVLLISSVMCSLNSTVTTVLGYLSYGEDVQVKVTLNLPTGKLYTKIAILTTLITPLAKYALVIQPITMAIEDKLSAMMAAVADNRNNGLTRVLTSSXVVNMTVLACTLPFFGYLMLFIGFSLNVVVAMLFPCLSYLKIYMPRGRVVRFEVAAIVGILVIGVCVTIVGTYTSLHQIIGTF

SEQ ID NO: 164064 - protein, 402 aa, Oryza sativa
  Clone ID: PAT_MRT4530_62C.1.pep
MAPPPPSPSPSPASGAQYAHQFLNTALSQRGPSALPYAEDVKWLIRNHLVALADAFPSLHPKAALFTHNDGRAAHLLQADGTIPIHHAGASYNLPAVLWLPEPYPRSPPLVFLSPTRDMVIKPHHPLVDRSGLVANAPYLRSWVFPSSNLVDLVRSLSHLFGLDPPLFTRSPNPPPPSPSPPIPATPLPRVHPSSSSSPSPSPYRFPASPQLAARPPPTEDPAEVYKRNAIAKLVDMAYADAATLRPVREAEVDTLFAMQATLRSRGEVVSDGVRKMGEEKEALERRLQDVMMATDLMEAWVMENTKGAAGDTEADEAIETADVLSKQMLECTAADLALEDTIYALDKAIQEGSVPFDGYLRSVRALAREQFFQRVLSTKVNKAQQQAQVARMAARAPQYAS

SEQ ID NO: 164065 - protein, 140 aa, Oryza sativa
  unsure (1)..(140): unsure at all Xaa locations
  Clone ID: PAT_MRT4530_63000C.1.pep
GEASGPAPSPSPSLSSPLPQAGSGELSVVFPVAGGXRHHQPPPPTTLSVLPPPPAPDPAATAPPPLPXPPARSAAHRRAAASHSHPSKADPNSSALCRILGSLAQEKKRWTPELEKKSMNHEAHPVIQNLQDLRFYFLST

SEQ ID NO: 164066 - protein, 89 aa, Oryza sativa
  Clone ID: PAT_MRT4530_63001C.1.pep
MTLSMKPRKVLVRKAMKDRKKKKGPTKPTPWKCPLCHELFLGVREGNRHFEECEAATKAARAADQRKMDVERARQEELVGSKKAAPPKE

SEQ ID NO: 164067 - protein, 351 aa, Oryza sativa
  Clone ID: PAT_MRT4530_63002C.1.pep
MAATLAGRRLLLQRSAAAAGGRWRLLGTAAEASSSPGGREEAGGGGGDEIYLKKPAAAAAVTTRDETSVAMPMSFMTGSVVGKRFYREATVRRADDGNGWSVMLDYRTLKSPAKRPLKLQSRTLAMAIAAEWEYQVMIPIFCLIGPRLVMLLNCSVRLLKFGWKMEADGIRPFTMPLMKLACTALERVPLTRKKIIDNLMKKFHQDLVFCRSPDDNELTVGVYQRQKEKIDPILDWVNTEFGFKPVVYTSFFGGKQDEGLANAVETVLKNTTDFELASIDAMAAAAHSLVIPLAIFRGKLGIEQAIELIRLEEDHQVDRWGLVEGGHDVDIADLKVQMSSAVVFLLLSWQL

SEQ ID NO: 164068 - protein, 730 aa, Oryza sativa
  unsure (1)..(730): unsure at all Xaa locations
  Clone ID: PAT_MRT4530_63003C.1.pep
MAAAAAARGSVWEIQQRDVEAAGLADADAGAFVAALRSAAAVATGGPDAAWEAVAAGVLRPEHPHALHQLVYYSVYAGWDRAARGPPPYWFPSQIDTKQTNLGRLMEAHGPRLLGSSYKDPVSSFHLFHKFSVEHQEVYWSMVLKEISIKFQQEPKSILDTSDKSRKGGTWLQGAVLNIAECCLLPWPSQNRTDDSTAIVWRDEGLDNHPVNRMSLKELHNQVITVATALDTMFQKGDRIAIDMPMTCNAVIIYLAIVLGGFVVVSIADSFAPQEIGTRMSVSKAKAIFTQDFIIRGGKKVPLYSRVVQGTSSKAVVIPATGGFLGVSLRNGDMSWKDFLSCAAGRSSIYPTVYQPSDALTNILFSSGTTGEPKAIPWSQLSPIRCTCDTWAHLDIQPQDIFCWPTNLGWVMGPILLYSCFLSGATLALYHGSPLGRGFCKFVQDAGVTILGSVPSLVKSWKAGNFTEGLHWTKIRYXSTTGEASDIDDDLWLSSRASYKPIIECCGGTELASSYIQGSLLRSQAFGAFSGASMSTGFVILDEQGTPYPDDVPCAGEVGLFPLYFGATDRLLNADNNKVCFDGMPIYNGRQLRRHGDIIQRTVGGYYIVQGRADDTMNLGGIKTSSVEIERICNRADEALLETAAVSIKPAGGGPEQLAILAVLKDRSPPCDANVLKSKFQRAIQKNLNPLFKVSYVKIVPEFPRTASNKLLRRVLRDQLSKELSNRSKL

SEQ ID NO: 164069 - protein, 372 aa, Oryza sativa
  Clone ID: PAT_MRT4530_63004C.1.pep
MAEEAAQEQQTDPAASRPVRCIVKLGGAAITNKGELESIDAASLRSACAQLRQAMSHGGAAGKVVGMDWSRRPGDPTGPVVDVEGLSEMGGLGLDSNFVVVHGAGSFGHFQASRSGVHKGGLHSTLVKAGFVATRISVTSLNQEIVRALAREGIPSVGMSPFACGWSTKQRNFCTYSLNQWMLLKSCYHSMLALSLKCFKNRESIAYFHSSTYVFFIYIKKNIKNFFQVLHGDAVLDELLDCTILSGDVIIRHLAQLLSPKYVVFLTDVHGVFDRPPSDPNAVLLREIAVDENGSWSIVKPALKGNKKGVEISVAAHDTTGGMETKILEAAAIARLGVDVYITKVGTEHSLRALKGDTSSEDWLGTVIRSSR

SEQ ID NO: 164070 - protein, 384 aa, Oryza sativa
  unsure (1)..(384): unsure at all Xaa locations
  Clone ID: PAT_MRT4530_63005C.1.pep
PRRPRSPPFSQRRKGRAPFLSLLFPFFLPPASSSLRPVADWTRAPSASSRLDRPSRFQTDIAALKAPGALPLFSLPSPLSPPSELCLAXPPFIAKRREIRSSSSLPVASRRRPDRCRRSQCAXPPSPPVLRSTRSSPASLGVAPPNPTLATDSRSRVDVLTAGNWPLVTSSPFPPFXLSAGCRRRNPPPTDSLRRIQAVGSLRLFLPRHPGVRPVAPHRRKAPRRNRRRPPSIRGRRLRLPPAGPRGSHVGATXDATSAPARPRSGRADPGQPLPCVSIFVHPVRVSTDAFKLKIXKTSWVKLGFYKRLGKPDTWVGACELNEFXKTADRGTYRVYGFPLSHLRTVSLEFHPNIRQVRPHGFCLADGTKRLSAILSMHNIFQAT

SEQ ID NO: 164071 - protein, 280 aa, Oryza sativa
  Clone ID: PAT_MRT4530_63006C.1.pep
MPSAPLNVVTALACRLPSPSSDSNSVVGGHAPVNTRTGCTNIETRLDGYKGTRYNNYQRKDQMQQISLTARGGTRARGGTDRGRLDPVLAELAPTWRLRGCHAGRREVDDDAGRNGRRTTAASGGANHGDTGGSEHTGWLHETRGDEPTARIHRRELDGGELRWRQPAAGEGGNGDEVTRGRFPAARASTRLREFDASVGLGGNASREAGDERRFRARAATAASTRAVKGEGWRSVVAAKAATGRREEDDAGAAEADGGSDQAVGQHGTRARDATGGASD

SEQ ID NO: 164072 - protein, 96 aa, Oryza sativa
  Clone ID: PAT_MRT4530_63007C.1.pep
RAAGLFVVIVIVIHAASSGDDDTAPTRRRRWSLCTLTTRCSTSSLRRTTATATTTTTDPAVDELRRIDMGPVVGTLAETRPGLLSISKQKKTVSYI

SEQ ID NO: 164073 - protein, 319 aa, Oryza sativa
  Clone ID: PAT_MRT4530_63008C.1.pep
KILSNDYGLQPRQPSPGIQNIGTVGSINTSQVRPGAISSLPQQTRPNFPSSTAPSPSDSQIASSQVRPPQHRPHPRPYHAPAISHPQNALLTQQQQKLPQHQHLQQQQQQQQQQQKLQQQQQQQQQKLQQQQQQQQQKLQQQQQQQQNQPQHSSQQSQQTTSLRDPQQISQQQTALDVDAGGSGNRLLSKRSIHELVAQIDPSEKLDPEVENVLMDIAENFVESVATFACSLAKHRKSSILEAKDVLLHAERSWNITLPGFSGDEIKLYKKPHVNDIHRERLTLIKKSMASESNAKGSAAQAAANQKNQTPKPPATGSP

SEQ ID NO: 164074 - protein, 171 aa, Oryza sativa
  Clone ID: PAT_MRT4530_63009C.1.pep
MAAGLPRLFPSPLAALSHSQPYINPPRTSLVCFRHSPPFLPIGIELAPSSSLSAVAVDLRPGLSARRDRPPPRRRPLRVFRTGGDPVHRLAELADRRNTAVPINLSCATASLLAGHLLRRSLDPGGAGAASRRPRQRGRLRARRVAAAWGLAISHPFLRVRLTHGTHGIGW

SEQ ID NO: 164075 - protein, 104 aa, Oryza sativa
  Clone ID: PAT_MRT4530_6300C.1.pep
QGIGPGFIPEILDRSQIGERVTVTTQEAIYMARMLAWEEGLLVGISSGANADAILKVAAREENKGKMIVTMFFSGGERYLNSELFAQVKEECINITKAFCLTCV

SEQ ID NO: 164076 - protein, 54 aa, Oryza sativa
  Clone ID: PAT_MRT4530_63010C.1.pep
MRHASRILANEEQNTALISFSYSHRMKLSKNIYSAIAYRVTSRKTKYAHFNEII

SEQ ID NO: 164077 - protein, 428 aa, Oryza sativa
  unsure (1)..(428): unsure at all Xaa locations
  Clone ID: PAT_MRT4530_63011C.1.pep
MDTGKETPLILGCPFLSTAGANIDMGTQSIRFHINGKEEKFEIQPRTEQCSMLRIKYGPNPQNIQVVEVEPPKTDSLVSMRRRLSRLFKGSGSQSSRHDKSSTRSSADVSMEDADAPRQLLSDADLDLVSDRERQAYYMLSDREYAHTRVYSPELLKKIEDGISFRFFHKEFTLTWKGLSTLLGFHDSWKIDLQKGISGFEKNRFWEDISGAPILKCMIRQWLESIKFSAPVECTSLITRIAKGLGVVSDQIALISAARPRIDEAYLVQGHILKHGADGSLIYFFPGCTNEIPLPNXGMYEAGWTPTGDAPGWTQAPRHSIGVSTWAGASEDRWHAPHDIHWGDNQPXSEWRSSSSRWDLGEITRRMDTLDVQTGEIQYDLAEHIAQTQEWQQSADAQFTNINNMTQQQHDDLQAYFRFQGFNPYQGP

SEQ ID NO: 164078 - protein, 498 aa, Oryza sativa
  Clone ID: PAT_MRT4530_63012C.1.pep
MSHDHLDAAAGGAFFFKMVQGAVDLIEKMVSNMGWSEERLQTRQRGMHTIKEIELLAAKLDLLMKRLDDHEKRPQETVKALDSHVTCEVCGGTGHFGNDYPESHEEAMYMGNNNGYRPQGDQGWNQPRPYYQGETQLAQLASLVLANETGRIPRQPNSSVENIKAITMRGGKSTRALPYPNPAGANGISKEVPSSESADKEVQLEKVVPQEYCDMLSDREYAHTREYSPELLKKIGMDVEFRSIWKAVGWQRFAVKGISGFEKNRFWEDISGAPICKKPRANDIHNPTLRLMHKWIAMTFFPRGYHLYNCHELTIPLQTIEESRAGGAYRETRNMTRNERESSSSSTPIQMYEAGWAPTGDAPGWTQAPRHSIGVSTWASASEDRSSGVPPSLSEWHLSSSRWGDNQPSRSSGVPPSPSEWRSSSSRWDLGEITRRMDTLDMQTGEIHYNLTEHIAQTQEWQQPANAQFANINNMMQQQHDDLQAYFRFQGFNPYQGP

SEQ ID NO: 164079 - protein, 118 aa, Oryza sativa
  unsure (1)..(118): unsure at all Xaa locations
  Clone ID: PAT_MRT4530_63013C.1.pep
QGISKADTGLPYADERGPRPTTGXVPDHTVPGSPGVLPDTTPANPHVSRHXRNRSLSARAGNRTPGTFPGXDFKFEGDRRYSHRVHEYRGSRCSKVACLARDLELDPRNPRTTGLRAL

SEQ ID NO: 164080 - protein, 114 aa, Oryza sativa
  Clone ID: PAT_MRT4530_63014C.1.pep
MAWTVEDAAISDELRRGAWMTERTRPPPLSSDVAWTVEDAAAGDELRRETWTMGPPATMPWCPAPDTSQVSPNTWYHMISRKYRLILVRYQDMIPQRYQDLITNWYHSVLTGFR

SEQ ID NO: 164081 - protein, 220 aa, Oryza sativa
  unsure (1)..(220): unsure at all Xaa locations
  Clone ID: PAT_MRT4530_63015C.1.pep
LCSPPSPPVLRSTHSSPASLGVAPPNPTLATDSRGRVDALTAGNWPLVTSSPFPPFLSAGRRRRNPPPTDSLRRIQAVGSLPLFLPRHPGVRPVAPHRRKTPRRNRRRTPSIRGRRLRLPPASPRGSHVGATSAPARPRSGRADPAVRLRVGPPHPFHHEPRACTASXPRTRACAACSLRTVSRAADKRVPLGTARVAEEDEADPADEEFFQEQAGYDEF

SEQ ID NO: 164082 - protein, 562 aa, Oryza sativa
  Clone ID: PAT_MRT4530_63016C.1.pep
MANKTLCEFAAPSADNVAIGPQINMGVVDFDLKSSLITMAQASPFYGKPNEDANAHLQQFLEICSTYTIKGVSPNAVKLRLFLFSLLGRAKQWFYANRATVNTWVKCSMAFLSKFFPMGKTNALRGRISSFQQTRYESIPEAWERINKIAKEAPSSDSADKEDQPEKTVPQEYCDTRLLSFPQRSRKLSVDEQFACFVEVIQKIHINMLLLDAMQVPTYARYLKDILNNKRPLPTTEFDQALCDLGASVSVMPKDVFDKLNFTVLAPTPMCLQLADLSVRYPSGIAEDVPVKIRDFFIPVDFVVLYMDMGKETPLILGYPFFSTAGANIDVGTGSIRFHINGKEKKFEFQPRTEQCSMVRIKYGPNPQNIQVVEMELPKTDSLVKFMQNFLEKETTMPRNRYWRKPVKPTLSAKKLEQSAQRKPPSASKPRKVGNQLGMHPDGPKLNAIASESQTGQVPVRTDGMRLMTYIGGITNLPDQVTGEIQYNLTEHIAQTQEWQQSADAQFANFNNMMQQQHDDLQMYYRFQRDGIYGWKEFYSDKTGFLPYHEGFDISESYLEIN

SEQ ID NO: 164083 - protein, 158 aa, Oryza sativa
  Clone ID: PAT_MRT4530_63017C.1.pep
MAMAASRLLWASRAASYLKISTFPRAFSTVLKDLKYADTHEWVKVEGDSATVGITDHAQHHLGDVVYVELPEVGSSVSQGKNFGAVESVKATSDIYSPVSGEVVAVNDGLGDEPGLVNTSPYESGWIIKVKVSDSGELNSLMDDAKYSKFCEEEDSKH

SEQ ID NO: 164084 - protein, 206 aa, Oryza sativa
  Clone ID: PAT_MRT4530_63018C.1.pep
RVPRWRLAAGGGVAAWRATGSAAVAGADVSRPELVPTGTSRGRLDPVLAELAPTWRLRGCHAGRREVDEDAGRNGRRTTAASGGVNHGDTGKSEHTGWLHRTRGDEPTARIRRRMPDGGELRRRQPAAGEGGNGDEVTRGRFPAARASTRLRESDASVGLGGAAPSEAGDERRFRARAATAASTRRAAATVGAAPASVRAGAVTRG

SEQ ID NO: 164085 - protein, 96 aa, Oryza sativa
  unsure (1)..(96): unsure at all Xaa locations
  Clone ID: PAT_MRT4530_63019C.1.pep
HQESYQSSTLNSCEQGAVYNISPDRYKEILNTLDLRKDFFFSYSYHIMTSLQXNLSDPQEGWSVYESTFVWNECVTQGIHNFLGKFLWTTTIVCRP

SEQ ID NO: 164086 - protein, 158 aa, Oryza sativa
  Clone ID: PAT_MRT4530_6301C.1.pep
TPSRPRSPPPAPLALSRPPLPSAAPLATAAAAAECPATSPSPSSPPPLQPRPRSPRPMPQAVRHRSLQPPAPDVAGRDSTPSPASMTPSRCRTTLASTTTTRRRPPRRRRSRCRHSRRHRHHRQNSPPSYQDAAVRRWGTGSGHHSTGSGRRQSASTP

SEQ ID NO: 164087 - protein, 390 aa, Oryza sativa
  Clone ID: PAT_MRT4530_63020C.1.pep
MAAAILLRRVPPARAQATALIAARSISDSTAPLTIETSVPFTSHIVDPPSRDVTTTPAELLTFFRDMSVMRRMEIAADSLYKAKLIRGFCHLYDGQEAVAVGMEAAITRSDSIITAYRDHCTYLARGGDLVSAFAELMGRQAGCSRGKGGSMHFYKKDANFYGGHGIVGAQVPLGCGLAFAQKYRKEETATFALYGDGAANQGQLFEALNISALWKLPAILVCENNHYGMGTAEWRAAKSPAYYKRGDYVPGLKVDGMDVLAVKQACKFAKEHAIANGPIVLEMDTYRYHGHSMSDPGSTYRTRDEISGVRQERDPIERVRKLILAHDLATAAELKDMEKEIRKEVDDAIAKAKESPMPDTSELFTNVYVKGFGVESFGADRKELRATLP

SEQ ID NO: 164088 - protein, 54 aa, Oryza sativa
  Clone ID: PAT_MRT4530_63021C.1.pep
SEFSLLVLFTPAIITFKTKLARVTTANEVNTPKPTIQLQLAISYKTVSLITPLV

SEQ ID NO: 164089 - protein, 137 aa, Oryza sativa
  Clone ID: PAT_MRT4530_63022C.1.pep
GFPFPVFSPPARWPSPGFFFSPSLPKGGPRVSSAPPITLTRPAPELKRPPPTPPPKGARRAPPSRAGPTSPAPAPAPAVAPPPKLPFKPPPPAQMPPFPSGLGLPPWVSLPFVVVSPPPPQIKSFSPPFPAPLFVCS

SEQ ID NO: 164090 - protein, 86 aa, Oryza sativa
  Clone ID: PAT_MRT4530_63023C.1.pep
VVTGENLLRKGESMVEWGEEAAKEQSSAIDFLVIKHFVGEALLVLGTDYLASECAIGINLEAGGYHIIETSKTYELIAAMFRGLYR

SEQ ID NO: 164091 - protein, 141 aa, Oryza sativa
  Clone ID: PAT_MRT4530_63024C.1.pep
MQKGHHDHYDMDAVTTEQHLLIWPENLRNSPIPLLSFSLSPSPMSLRTPAAECSQVCYLSDGTMGHRLAEGSTSSPPPSLALPVPPMPPIVLHGQPHHGEETPKVRFSVSMATSLTPADQMARSMTTSNPSLCRRQGRRQA

SEQ ID NO: 164092 - protein, 121 aa, Oryza sativa
  unsure (1)..(121): unsure at all Xaa locations
  Clone ID: PAT_MRT4530_63025C.1.pep
MGGARAQVNKPHKTRFAFKALRHAHKIDKVRTGKPEGSHRAXVKGARAARVQRSKAIRDQKRAALLKEKRSSVGSSSAPRVXVLFGLSSSADVRSLAKDLLTIASGDEETPTSSSCALLHI

SEQ ID NO: 164093 - protein, 61 aa, Oryza sativa
  Clone ID: PAT_MRT4530_63026C.1.pep
FFFFFFFFFFFFFFFFFFFFFKISIPETNTKTQLENILQENTPRLITVQHYKPILQERTRA

SEQ ID NO: 164094 - protein, 151 aa, Oryza sativa
  unsure (1)..(151): unsure at all Xaa locations
  Clone ID: PAT_MRT4530_63027C.1.pep
ILTPTDSLLIISKITIDPHHSLYSSSSSLSLLPSSFSFLVFFSPFLPSRRPQMLMAWEAARESSKRRRHRAWEGRRLDAHGWGTATLGMGGGGASLGWAMAXARRRDVRRRRLGAWSCSSAASLCSPSSPSSPPSLAVRRHSKGRRRPAGA

SEQ ID NO: 164095 - protein, 286 aa, Oryza sativa
  unsure (1)..(286): unsure at all Xaa locations
  Clone ID: PAT_MRT4530_63028C.1.pep
PPPRRGTPRGPWRPPPRGTPPSPPPTFLLACELVTPPPPPPDRPPGASPGRSRPFPPAPPPRTPPSSGRAAAPPPRTPSPTPPSSRPPPSPAAAPPSPCTTTSPPPPSSSSSSCFARRASPPLPPPSPVATSTTRSSPSPGLTTQIMSPPAQTLRPGLLSPSIRLTTSPEYASMRVMSVRSSAMWYTAPTTNASPPPPPPRREADPAKPPPLNXPPIRCSPIPIPSSIQIVSSLPNQTLLPNPRNSTPLPRISHGVGGWRWAPSGAQVRAQGRRARRPLPPRAHPG

SEQ ID NO: 164096 - protein, 366 aa, Oryza sativa
  unsure (1)..(366): unsure at all Xaa locations
  Clone ID: PAT_MRT4530_63029C.1.pep
MAAAAGDGLPPGLRFEPKDDELVARFLLARIQGKPLPLHGVILDADPLCAPPWRLLADHGRGDDAFFFAEARAKNGKGSRQKRTVEGGGYWQGQRMCVDGERLVVPDGGGGGGVEIAWRKYVLSYFADGEKGSSGWVMHEYAITAPADLASSTTRLYRIRFSGHGKKRKREPESQSDNHQIAVAETAMLEDSAPPPQPVHPPAAMVNXNMDDQSCSGVVFANLPELIVLPSAPSLDNQNDEAPTDGADQSCSGVGDNSTLLFSDVTGSIDEDELQSFVPEFAASNLFVSLPQGSSEVDASNGAGSMMSSPDKQKEHSSSGVMDVEAIGFGVPDSMDSLSCIDFAETMDDLSCIDFTIDDELFDLWS

SEQ ID NO: 164097 - protein, 56 aa, Oryza sativa
  Clone ID: PAT_MRT4530_6302C.1.pep
FGQLCLLVAQFIVITKSFSWSKSKFQCGVWPPCLMYVIIIKLSIYCSFQSQIHVYT

SEQ ID NO: 164098 - protein, 338 aa, Oryza sativa
  Clone ID: PAT_MRT4530_63030C.1.pep
MAFAPSARRVSAVLYHYPCPDGAFAALAAHLYFSAAALPVCFFPNTVYDPIRSDALPFDEIKDVYLLDFVGPPGFVTDIAPKVESVTILDHHKTAFESLCGNPTLGENVNKVIDMQRSGATIAFDFFSNKLLTIGSSLWNHRSGNSFNGVKYLPDNKLETVHKLFKFIEDGDLWRWTIPNSKAFSSGLKDLDIEFDVNINRKLFDQASNLLLELDPEEVISRGQATLSHKQKLIDECLEKSYEIALGCGRFGNCLRYVVLTRTNGTFSRSIGAVVYKVPELNNDNMLKISLRSLNEEDTTSISKEYGGGGHRNASSFLLSVTEFDRWKVGAEPCNTKM

SEQ ID NO: 164099 - protein, 391 aa, Oryza sativa
  Clone ID: PAT_MRT4530_63031C.1.pep
MASAAGDGLPPGLKFEPKDDELVARFLLARIQGKPLPLHGVILDADPLCAPPWRLLADHGRGDEAFFFADARAKNGKGSRQKRTVEGGGYWQGQRMCVDGERLVVPDGGLEIAWRKYVLSYFADGEKGSSGWVMHEYAITTPADLASSTMRLYRIRFSGHGKKRKREPESQSAHHDDGRARCAPQIAMPETALLEDSAPPPQPVLPPAAVVNSNMDDQSCSGVVFANLSDLILVLPPAAMVNHHDDSVSDIADHGCSGAAPPPSAVVDLPDDSDGADQSCSGMVDDSLPGYYEAELKVPLEYAARNPVDSPSKGGHDHEAEVDASGGAGSMMSSPDKEKEHSSSGVMDVEATGFGVPDSMDGLSCIDFAETMDDLSCIDFTIDDELFDLWS

SEQ ID NO: 164100 - protein, 199 aa, Oryza sativa
  Clone ID: PAT_MRT4530_63032C.1.pep
ETTATKTYVLKYQVSKCVVQFQKLSHYFLQEAEWSHNNYKPSFEEQVALSTKTSTVQLLCVSTTVGRGDAISSEAFQWAASSSTVTSCAKILRFMNDIASFKVCGKNKGDMVSTVECYMNEHKVISEVAFAKLDSLIEDEWRTMNHARYEHHQLLPVVQRVLNMAISIMFFYDKRKDAYTFSTHLQEIVRSLFVNPIPI

SEQ ID NO: 164101 - protein, 113 aa, Oryza sativa
  Clone ID: PAT_MRT4530_63033C.1.pep
YRLSSCAKHFCLAGETRKLMWASCLVKATTSTVSSDAIVGDLSWSTCFCVLIGALGGDVGLFNCCAQILELNCYCLAAIFFVILWKCEQAIPSLTLIMVCSFLVLLSVQYGVL

SEQ ID NO: 164102 - protein, 678 aa, Oryza sativa
  Clone ID: PAT_MRT4530_63034C.1.pep
MAAAAGDGLPPGLRFEPKDDELVARFLLARIQGKPLPLHGVILDADPLCAPPWRLLADHGRGDDAFFFAEARAKNGKGSRQKRTVEGGGYWQGQRMCVDGERLVVPDGGGGGGVEIAWRKYVLSYFADGEKGSSGWVMHEYAITSPADLASSAMRLYRIRFSGHGKKRKREPDSQSAHDEHGRARCAPQIAMPETALLEDSAPPPQPVHPPAAVVDCVCDVTDQGSSLVFPDQPGSIYEDELQSFVPEFAARNLFVSLPEGSRDVVAEAALIEDLALSPQPVPPPAEVVNQADDSDGADQGCSSVFAALPDLIVLPPEEACGSGGAAPAPSWASSLDNQNDDAPAFFEFPESMDDMVGCFDFASMDNQSCTSAVSEIAVLEEPFLPPPTMVNHDNNSVSDGADQSCFGVGDNSTLVFSDLTGSIDEDELQSFVPEFVSLPQGSCEADAEADSGGGVAPAQFAEFGGPESMDDPLNFPAEASGGGDRAAPASSWVSSQDNQNDEAPMFFELPESLDDMVGCFDFAAMDGQSCTSAVSETALIEELVLPPAAMVNHHDDSVSDIADHGCSGAVPPPNSEVVDLPNDSVGADQSCSGMVDDSLSGYYEAELKDASGGAGSMMSSPDKQKEHSSSGVMDVEATGFGVPDSMDGLSCIDFAETMDDLSCIDFTIDDELFDLWS

SEQ ID NO: 164103 - protein, 87 aa, Oryza sativa
  Clone ID: PAT_MRT4530_63035C.1.pep
RGFYVCPPFLEAPLGFQAILPKFLLGQRVFGSVSTQKKKFGKKKGGPNSFLFRKKILDSFCGLVFIGQTLRPKKKCYSVYIKIKISL

SEQ ID NO: 164104 - protein, 460 aa, Oryza sativa
  Clone ID: PAT_MRT4530_63036C.1.pep
MALKVVSEPVREVIPQFYFKYGRPAPKDLKEQCLSRIDHLFFAGEGLQIQEFRSVTKDICKLPSFFSSVLFKKIDAAGSGTVTRLFKFYTLLHGEAISVLILFYLRGSLYLELNLLYLEVRDAFVDYWINDNKITMDTASQIFEILRKPDYNYLTQEDFKPVLKELLATHPGLEFLQGTPEFQERYAETVIYRIFYSINRAGNGHLTLRELKRGNLIAAMQQLDEEEDINKVLRYFSYEHFYVIYCKFWELDTDHDFLIDKENLIRYGNHSLTYRIVDRIFSQVPRKFTSMTEGKMGYEDFVYFILSEEDKSSEPSLEYWFKCIDLDGNGILTTTEMQFFYEEQLHRMECMAQEPVLFEDILCQMIDMIGPENECYFTLRDLKRCKLSGNIFNILFNLNKFMAFETRDPFLIRQERENPTLTEWDRFAHREYIRLSMEEDGEDASNGSGDVWDESLEAPF

SEQ ID NO: 164105 - protein, 264 aa, Oryza sativa
  unsure (1)..(264): unsure at all Xaa locations
  Clone ID: PAT_MRT4530_63037C.1.pep
TPPSLRPETAREPRSKSPGRSRPSPPAPPPRTPPSSGRAAAPPPRTPSPTPPSSRPPPSPAAAPPSPCTTTSPPPPSSSSSSCFARRASPPLPPPGRGWGAARGGAGRRGAGRPSAPASTAPSRGRTPRWCRTRRRGRAGRRWWPGRGSGPPRRRSRXPADPVLDPHRRVAPRRPPLAAAAAAAGGDGEXRLTGTRWRRRRRGAACARRWRAPSPACTRRRRSSPSPPSSPSRGRSGRRWPRRRRGAARRRGSRRRSCRRRRRP

SEQ ID NO: 164106 - protein, 218 aa, Oryza sativa
  Clone ID: PAT_MRT4530_63038C.1.pep
MHCNTLSLAAVALLASSVNAHGHVAKVIAGGQEYTGGIPHGAPSNAVGWAAGNQDNGFVEPAAFGTADIICHKSAKPVSNAVTVAAGDVVTLKWDTWPESHHGPVTEYLAPVSGDFASINKGSLRWTKVAEKGYISGSNPGNWASDELIRDGFAWKFTVPRNLKAGNYVLRHEIIGLHSANNNNGAQAYPQCINLKVTGSGSQALSGWWRLHQVLLCH

SEQ ID NO: 164107 - protein, 132 aa, Oryza sativa
  Clone ID: PAT_MRT4530_63039C.1.pep
AGGGASRSAHRQRPPLGARATASLPSSAPRDLAPTVFAVSYRHYLAALSRRFAAVSQPRRHPAVSPPLQPLTTTPQPHRRADDASPQQSQQPSDEPTSLNRFDFFCAADLRWIESSNASSCFVIELSTVLMD

SEQ ID NO: 164108 - protein, 119 aa, Oryza sativa
  unsure (1)..(119): unsure at all Xaa locations
  Clone ID: PAT_MRT4530_6303C.1.pep
MPPETEVTATAAADAECPATSPSPSSPPPLQPRPRSPRPMPQAVRHRSLQPPAPDVAGRDSTPSPASMTPXRCRTTLASTTTTRRRPPRRQDAAVRPWGTGSGHPSTRIWTAASPRSTP

SEQ ID NO: 164109 - protein, 298 aa, Oryza sativa
  Clone ID: PAT_MRT4530_63040C.1.pep
MDNHSTPIDPSIGGGRVEHIGDHVLRHRYSTSLVDVTSPEQKRCTPPALGSGVWQEDVHLTISHHGKKAEVDGCPSTCMHGQMENHNGEEADPSTHMKNTHKRKHLPVMLSTGYRHVVEMRRCPHLANCGFSSVMRAVPSPAIAGAATSVARAVSDPGDGGSRWDVAQGAVDMPPCCDALKVPGAVADTVEVPVRRSSSLAVILSLHHAGVAMSTDLLALIASVCQARCHSSSGLMPSVRAAGDDSTRCDLAEILNVVAFCRPLPRNTVNIYPPSPPLQSWCPHAVVKPGHDSFSSSG

SEQ ID NO: 164110 - protein, 934 aa, Oryza sativa
  unsure (1)..(934): unsure at all Xaa locations
  Clone ID: PAT_MRT4530_63041C.1.pep
MSRHPTRGGRPPTPPSSEAGCKAFMASLRNVRWPPKFRPNRTEKYDGNVNPSEFLQIYTTIIEAVGGDDRVMANYFPMALKGQARIWLMTQPPDSIHSWEDLCQQFVTNFQVFVGLGCFGPSMGYVSPDDESLCSCIQRFCQVRNTIPCIPAHVVVYAFRGGVRHNHMLGKIASKEPKTTAELFQLADKVVXEEAWAWNISGSGAAASAAPEPSSRSKPRDKRKRRKSARSDDEGHVLAVDGASRPLRKEKATGSKPGATTPDESRSADKWCSIHNTYRHSLADCRTVKNLAERFRKTDEERRQNRREGKAPVTSAGNRQGEAKKKAPXDDDDDSEDLEFQAPQQTXFKAMKRELLAVAPTHEAARRARWSEVKLTFDQSDHPTVLARGGKLALVVSPTVYNVKLKLVLIDGGAALNNISPAAFEAIKAPGMKLQPSLPIISVMPGHTWPLGHIELLVTFIDRTNFRTERLDFDVANLNLPYNAVLGRPALVKFMAATHYAYLQMKMSGPNGPITICGDVKIALVCAEQRADTLAAASRPEEDGRAPEASTSCASKKRITSSDEVPVKEIPLGGDPSKTAKVGSFLVSSRGIEANPEKICAIERMRPPQSKLRDVQCVTGCMAALSRFISRLGERALPLFKLLNRSRPFVWMEEAEQALNQLKAYLTSPPVLVAPGPEEPLLLYLAATPQAACPDATMGEQEALAGGPEVPCADAGGSPLGPQELTALRLAPLTAKIDPAERGLDALSALRDAKTRYPQAQKMLYAVLMASRKLRHYFQAHRVSVWAIELAEFDLHFKPRHMIKSQVLADFVAEWTPMDDPDLPLDPSPSEGGEDPNTDIGVMHFDGSLNLQGAGAGVTLTSPSRDVLKYVIPLDFRATNNMAEYDGLLAGLRAAARMGIRGLLVLGDSQLVVNQVYKEYQCTDLQMDAYVREV

SEQ ID NO: 164111 - protein, 1800 aa, Oryza sativa
  unsure (1)..(1800): unsure at all Xaa locations
  Clone ID: PAT_MRT4530_63042C.1.pep
VEEEVVAYTPSPSGSEDGSGSRDPRHHRWNSPTPPRRCPGRQEDXHRFGGLALSPLADRGRLRRAGVRRRLNYNDGGTPHGTLXAVGALLRHPSVVLEPETLVRRWLDDVTHLVTTAPRQLAADAGDRPATTGTSXPPTTLSSSARRRARRSAMISRWLTVPTSSRPTESHGRHDSLYGEQDARINIERRRDKHRATRVXEGTSSSGMSRHPTRGGRPPTPPSSEAGCKAFMASLRNVRWPPKFRPNRTEKYDGNVNPSEFLQIYTTIIEAVGGDDRVMANYFPMALKGQARIWLMTQPPDSIHSWEDLCQQFVTNFQGTYPRPGEEADLHTRDGNDDESLCSCIQRFCQVRNTIPCIPAHVVVYAFRGGVRHNHMLGKIASKEPKTTAELFQLADKVVXEEAWAWNISGSGAAASAAPEPSSRSKPRDKRKRRKSARSDDEGHVLAVDGASRPLRKEKATGSKPGATTPDESRSADKWCSIHNTYRHSLADCRTVKNLAERFRKTDEERRQNRREGKAPVTSAGNRQGEAKKKAPXDDDDDSEDLEFQAPQQTVATLDGGAYAHASHRSFKAMKRELLAVAPTHEAARRARWSEVKLTFDQSDHPTVLARGGKLALVVSPTVYNVKLKLVLIDGGAALNNISPAAFEAIKAPGMKLQPSLPIISVMPGHTWPLGHIELLVTFIDRTNFRTERLDFDVANLNLPYNAVLGRPALVKFMAATHYAYLQMKMSGPNGPITICGDVKIALVCAEQRADTLAAASRPEEDGRAPEASTSCASKKRITSSDEVPVKEIPLGGDPSKTAKVGSFLVSSRGIEANPEKICAIERMRPPQSKLRDVQCVTGCMAALSRFISRLGERALPLFKLLNRSRPFVWMEEAEQALNQLKAYLTSPPVLVAPGPEEPLLLYLAATPQAVSAPLVVECDKDHPXHKRRARSWEGTRGPINRXAPRLPTARASMLLAPRHAPTPPWGXEALAGGPEVPCADAGGSPLGPQELTALRLAPLTAKIDPAERCSGPLFSAPTAMSTKDFSDIPKTFRTSPKISSTNNIVLDVLGKCGFPRTQGNENVQNTVCSFAVSHXHQRIRRDMHYANSSLRDAKTRYPQAQKMLYAVLMASRKLRHYFQAHRVSVVTSYPLGRXQILHNREGTGRTVKWAIELAEFDLHFKPRHMIKSQVLADFVAEWTPMDDPDLPLDPSPSEGGEDPNTDIGVMHFDGSLNLQGAGAGVTLTSPSRDVLKYVIPLDFRATNNMAEYDGLLAGLRAAARMGIRGLLVLGDSQLVVNQVYKEYQCTDLQMDAYVREVXRMERHFDGLELRHVPRRDNAVADELSCLVSARAPLPPGAFEERLTQPSARSDSPRVPDAEIPTRRLASHXVSGPEGVNPDPPRQVAXMADIWAYLDNRTLPKDHAEAKKLVRISKRYVLVXGTLYRCGANGVLLKCISREQGIELIADAHEGECRAHSASRILVDKAFRQGFYWPTALQDAQDCVRRCKACQFHAKQTHQPAQALQLIPLSWPFVVWGLDILGPFKAARGGYQHLYVAIVKFTKWPEAYPIIKIDKHSTLKFIRGITSRFGVPNRIITDNGTQFTSELXGDYYDNMGIKLCFASPAHPKSNNQVERANAEILKGLKTKTYNVLKKHGDSWLEELPVVLWANRTTPSSATGETPFFLIYGAEAVLLSELSLGSARVALYNEADQDGLRRDDLDYLEERRRRAALRVACYQQSLQRYHQRHVRAQLLQVHDLVLRRVQSRLGLSKLSPMWEGAYKVIGVPRPGSVRLATEDGTELPNPWNIEHLRQFYP

SEQ ID NO: 164112 - protein, 170 aa, Oryza sativa
  unsure (1)..(170): unsure at all Xaa locations
  Clone ID: PAT_MRT4530_63043C.1.pep
FFFFFFLKDKHSFHIPSLAQVLTPSLGKVSFQPCVPXAEHSTPAGQGNGYHPLCHTTHPARTHTSNSAVSQLHPADRCPAPNSVPMCQVRSNXRGGQQAVGTTRPNRNYVVPPFVQKTEQWWRENKFPTLRGGSIFVSRTAVDRALQLRKHIDRTQWCIIGAQQVYMYHL

SEQ ID NO: 164113 - protein, 280 aa, Oryza sativa
  Clone ID: PAT_MRT4530_63044C.1.pep
MATTTATTLAASAGDGSSPPSRSTVMTIAAQAYHVLKINGARGFKNFIRRDELERSEYLNDDYFAIAAHVIIPKEKPSVVVPPSNMHLHYGDLLVSKEGTDVKFLVGGEMFAAHRLVLAARSLVFKAELFGPTKKGTIDAIQIDNMKARVFKALLGFIYTDIWPEIGHGKDNVAMAQQLLAAADRYGLQRLKFVYEDKLCNHIDTYSVSTMLVLVEKHHCCKLKEACSTFLSSMSPPIVEDPNSSIFGSELKKTVSSSENHGSQINRTDIRIQLWQNADV

SEQ ID NO: 164114 - protein, 72 aa, Oryza sativa
  unsure (1)..(72): unsure at all Xaa locations
  Clone ID: PAT_MRT4530_63045C.1.pep
VPRGHDVCSLLGLPLLGLPHRQNPQLPHVLXVGKACSTVYDNFSENIQKDVVGTGNFRTCPKSFRNVRKILR

SEQ ID NO: 164115 - protein, 614 aa, Oryza sativa
  Clone ID: PAT_MRT4530_63046C.1.pep
MATTTTMTLAASAGDGSPSSRSTVTTIAAQAYHVLKINGYSNTLEAGRHHALSSCPFSAGGHTWHVSYYPNGGRDSNKNCISIFLVLKDIVTEEDVMAKVTFSLLDRYGNPVPSYTYHTQLRNFSTSPSRAKGFENFIRRDELERSEYLNDDCFAVAVHVIVPKEKPSIVVPPSNMHLHFVDLLVSKEGTDVKFLVGGEMFAAHRLVLAARSPVFKAELFGPTKKGTIDVIQIDNMEARVFKALLDFIYTDIWPEIGHGEDNVAMAQRLLAAADMYGLQRLKFVYEDKLCNHIDTGSASTMLVLAEKHHCCKLKEACFTFLSSMSPPIVEDLNSSIFGSESEKTKYRYLRNEKRAHTYLERNSGAGDKVFLDKCILVSVYKGVKLMFGKRGGTTCALAQWLHRMGLEIQQEKGPAGRSSYVRRAPASSSYAGCCCYDATGQRNALAFWKVRFDRARGHVVRVIDADHGSGRDGWFSIEVARHTVKDEIVGLRRHVCCRSPLVGSAGWPRTSRARTTYYDVRADKFTYARASDTSPTARQLHALPPANRRTGPRTDDEERRRPGHHAPTRTASPYVRGQKSRRLVAVRGGNEQYTWELELEQLVWHDNGLAANSY

SEQ ID NO: 164116 - protein, 47 aa, Oryza sativa
  Clone ID: PAT_MRT4530_63047C.1.pep
TAEALARNEAAGPEPGTRNRLTSAALACGTVAPAYFYYVTLYPTLFR

SEQ ID NO: 164117 - protein, 539 aa, Oryza sativa
  Clone ID: PAT_MRT4530_63048C.1.pep
MDPSSAGAGGNSLASASCGDAQKRRVCYFYDPEVGNYYYGQGHPMKPHRVRMTHALLAHYGLLAPAKMQVLRPLPARGRDLCRFHSDDYVAFLRAVTPETQLGQVRALRRFNVGPDCPVFDGLYAYCQTYAGASVGAAVKLNHGTHDIAINWSGGLHHAKKSEASGFCYVNDIVLAILELLKLHERVLYIDIDIHHGDGVEEAFYTTNRVMTVSFHKFGDYFPGTGDIRDIGYSEGKYYCLNVPLDDGIDDDSYQSIFKPIISKVMEMYRPGAVVLQCGADSLSGDRLGCFNLSGKGHAECVKFMRSFNVPLLLLGGGGYTIRNVARCWCYETGVALGEELREKLPYNEYYEYFGPEYSLYVAASNMENRNTNKQLEEIKCNILDNLSKLQHAPSVQFEERIPETKLPEPDEDQDDPDERHDPDSDMLLDDHKPMGHSARSLIHNIGVKREITETETKDQHGKRLTTEHKVPEPMADDLGSSKQVPATSSYATDSCMLLVTYSEVLYDCFFCRSLQITTVSFVEEFQSVQAILDVETLV

SEQ ID NO: 164118 - protein, 95 aa, Oryza sativa
  unsure (1)..(95): unsure at all Xaa locations
  Clone ID: PAT_MRT4530_63049C.1.pep
FGTXSCRIRHXXXCSXRIPNFRXKPXXFYPXSRRVSXSXXEAAXTPAAALLSPPAXXASXXGXGTPSATSLPFDRRTWCRLPSRVLDXAIQLXQC

SEQ ID NO: 164119 - protein, 275 aa, Oryza sativa
  unsure (1)..(275): unsure at all Xaa locations
  Clone ID: PAT_MRT4530_6304C.1.pep
MPPVTVVTATAAAAAECPATSPSPSSPPPLQPRPRSPRPMPQAVRHRSLQPPAPDVAGRDSTPSPASMTPSRCRTTLASTTTTRRRPPRRLHSRPRHPRGRTTASTTPQPPRPLPRQPTVAVDAATAVATVTXAAVGSRRRRQLDLARDVIASSRIADVTTGSRGTSTTTPVVRPRLRARLPELAPAASPARSSPPKPTAKTRRRATRTPPSVVGGPDPGTTAPDLDAASRRRRHALSSYRADVPTVLTVNAGERAPPPPSLQPAAARLGNVLAC

SEQ ID NO: 164120 - protein, 41 aa, Oryza sativa
  Clone ID: PAT_MRT4530_63050C.1.pep
FLYSKVEGAYCLGVFQNGKDPTTLLGGIVVRIIFAFICPVH

SEQ ID NO: 164121 - protein, 689 aa, Oryza sativa
  Clone ID: PAT_MRT4530_63051C.1.pep
MRRDDAAGGGGGGFQELFDSVRRSISFRPGGSAAAAAAALDEPASASGGGGFRGRISTCLRKSRGMGLLGMVASKSPSPPRRRLLPPPRSPPPAPTKSLSPQPAVVSQGGGGAGGVGGGEEEEANPPIRWRKGDLLGSGAFGSVFLGMDLDSGELLAVKQVLIGSSNATREKAQGHIRELEDEVKLLKNLSHPNIVWWCLIYLVCFEQRYIGTVREENSLNILLEFVPGGSIQSLLGRLGSFPEAGANILVDNKGCIKLADFGASKQVEKLATTAKTMKGTPYWMAPEVIVGSGHDFSADIWSVGCTVIEMATGKTPWNQEIQEHFVTPFREPELRSTASDLLLHPFVTGGLEDLHQVNHATHKETSELPAYDMPTGDLGLNHSGNPSNLNSYKSSDMRPIWDGHSSDDMCQFADNDVVMVGSSFNPMSEPFDDWESPEQRSSQSREFGGLAKHVENNMSENDFTFPCEGGCEEDDELTESKIKEFLDEKAIDLKKLQTPLYEFYNTVNAGLSQGVGETCQVDNITDLQLPLQGRSPPIQMEGVAAVGPTSDILKSASPKSCTRRFSRSGVENGRILREIASPQLNKFEDKVHDIQDNPSISFSERQKKWKEELDQELEIGRGGHLDLKPGCHDLPTGEQFTGCFAYNMQLYVNDALAILGALQVWQDGLCAEGIVVLLFFFPFSSLFL

SEQ ID NO: 164122 - protein, 135 aa, Oryza sativa
  Clone ID: PAT_MRT4530_63052C.1.pep
CLGTRTLPPGRHCTSATPPSSARLVLPSGPRTPPSPPTCRPLMFSPPWPTTPQALVVTSSLATSPLVPPTLVPPPPVPSPSSPLPRSSRPPALSSSLPGLTRPSASLSAPSPRSPLLGIVSPSFRNIDHLLGSGY

SEQ ID NO: 164123 - protein, 77 aa, Oryza sativa
  Clone ID: PAT_MRT4530_63053C.1.pep
MPPVTPWSPQLPRAAQGPGGAGRHSLYWDGARTFDCLSPHCSPSSSSSCVFWTHSRKQSYRASCGKVSCVSDRLPDD

SEQ ID NO: 164124 - protein, 134 aa, Oryza sativa
  Clone ID: PAT_MRT4530_63054C.1.pep
IRISPLGCYSSGKFWWGGLSTEKVSPLEMSAGGAFGGNRGVRPVPPEKGVFPLDHLHECDLEKKDYLACLKSTGFQSEKCRQFSKKYLECRMERNLMAKQDMSELGFRSEDVMNPSPNKKNNLESSASGPNEER

SEQ ID NO: 164125 - protein, 709 aa, Oryza sativa
  Clone ID: PAT_MRT4530_63055C.1.pep
MAGEGGAEEEKVYVAVGGEPERCLPTLRWALSYTPAGSTLVLLYVHRPDAMIPIFTGARVPVCVLKDEVINVHRQKERSIVQERLRIFTAECESKQVHTEVIIAENDSIGLGIVKLIEEHKIGTLIMGAGYYGHYYEKDFRVRSKPVFASRPKSSTGEFKVRTKLATIVEEQAHPSCKILFVHGGKELSTRPRLINIRAARNENGEIPRAAWRLDDEEVEEECRCSALSSSSSSTASYGALKLEKLDNPVIEKLESSSPSSADHGSLLTLMAPASLVALNEMVNEMILAGMSPELRRAPFGAGCDDDGQVRRSLHAIIGIDAALGLEWRNLEEVHWRGYMEYKTTRWLHTLEYVRCVAAVMHRGGQARARALSAAAEKPVETLLEFATAVSRVSGSPEKLFHMLHMHKALAHAAPLLLAAFIGDAKERFAGELERTLASLGVAVRGILSKTKALIHSYGGSPGQNVVVVVVVPDGGGIHVVTSYLARYVELLAQHAASLNVILAGDVDVDDDDGSQSQMMSPLGRLVAGVIGSLGVMLRRTAELYETEGGEGLRHLFLLNNEHAILQAIETTTLLPLAAEWTQAYRHGIEQHKQGYIQTWAAVATSCLPRDDPPPPPTSAKKAGFLRRRRRSPPLREFAASLEETSVEQMQWKAASPHLRDELRRAVKECVAQAYSEFMDKHPTSNAGEEFATVDDLILRCQIDQILEG

SEQ ID NO: 164126 - protein, 110 aa, Oryza sativa
  Clone ID: PAT_MRT4530_63056C.1.pep
MARYVIPIIVMKKADSPNASPELRWKNIDTSALLRKSVRENSDIRGIPFRASPHCLLNPTYQNRAEVLKPSHDGWNGGYGGRCASNRHWEAIWDVHVEGGDKELTVKVCI

SEQ ID NO: 164127 - protein, 1791 aa, Oryza sativa
  unsure (1)..(1791): unsure at all Xaa locations
  Clone ID: PAT_MRT4530_63057C.1.pep
MGFVSGIDAFIFPPGQAFRFGSLNFITNDFSKICLLDSDANQSGRGQVSAPFGIPNSAEIYSKIFSTESASNHSDEMQSTPTRRDQGDGAYPSIPMKLPDDLAVVFTTRASSPRRPRRDPASAPIRSSSREVGVILQPLETVSTEELDCYLSSPGVDSRPTEILEYDDFGYHYDYSNLDDFDEGYEDNYTPLFFGIFMADNETAEQRQAREAEEQHTRQEAEGRRLEEERLAQEQDWLQCEQQEREWAAKEAEDWRQRALEAGRRARDLIGQQDIEGTAVFRTPQHNVVAAITLLDTLLQQDAPNHVVNILNQTKTMITASVPVNSSSVRTLTGSRVPPLXSQDYHQPSLSIASAGSSRRSRXHDERSVCSPADRHRERRAEQPRSPRRRRLVDLHDTINQRRATRGHIPHHSPDRXTKGIRHELLVGKFGRKPPKTVKQMFEKANEYAKAEDAVTASKQLGSTWKPKKDAPTIGGSGSANHKDRKRKPEELVATTTPSSRQRSRVNTFDKIMNAQCPHHPNSNHVAKDCFVYKQFAEQYAKNTRKPTDGDQSTSKKKDDEDDTPTGFQDSRKELNHIFCGPLAYESKRKQKLTEREINAAQPDTPQYLLWSETAIKFDRSDHPDRVVHPGRYLLVLDPVVHNVTLRRSLIDGGSALNILFAKTLDDMQIPRTELKPSSAPFHGVIPGLSSTPLGQITLPVTFGTRENFRTENICFEVADFEIAYHAILLRPTLAKFMAVPHYTFMMMKMPGPRGIISLRSNIKQAVTCDKESCEMXQTREITLAREEIRLAASTATEGEVPAPKISKSGESDAKTKKIPLDPFDPTKTATNKDIFAWKPSDMPGIPREVIEHSLHVKEDAKPIKQQLRHFAQDRKDAIKEELTKLLAAGFIKEVLHPDWLANPVLVRKKIGQWRMCVDYTDLNKSCPKDPFGLPHIDQVVDSTASCELLSFLDCYSSYHHICLKESDCLKTSFITPFGAYCYITMPFGLKNAGATYQRMIQRCFSTQIGRNVEAYVDDIVVKTKQKDDLITDLEETFASIRAFRMKLNPEKCIFGVPSGKLLGFMVSRRGIQANPEKINAILNMKPPSSQKXDVQKLTGCMAALSRFVSRLGERGMPFFKLLKKTDNFQWGPKAQKAFEDFKKLRTTPPVLASPHPQEPLLLYVSATSQVVSMVLVVEREEDGHIQKVQRPIYFVREVLADSKTRYPXVQKLLYGVLITVRKLSHYFQGYSVTVVTSLTLRDILHNREANERIAKWALELMSLDLSFKPRTSIKSLALADFVAKWTECQEDTPTEKMEYWTMHFDGSKRLSSTGAGVVLISPTGERLSYVLWIHFFASHNVAEYEALLHGLRIAVSLGIRRLIVCGDSQLVINQVMKEWSCLDDNMATYRQEVRKLEDKFDDLELTHVLRHDNEAADRLANFGSKQETAPSNVFVEHLYEPSVPRKETTEAVDTQEVNMIDADWREPFIKFLTKQELPQDKDEAERISRRSKLYVMHETELYKKSPSGILQRCVSLEEGRQLLKDIHLGICGNHAGARTIVGKAYRQGFFWPIAISDADKIVRTCEGCQFFARQIHLPAQELQTIPLSWPFAVWGLDILGPFKKATGRHTHLFVAVDKFSKWIEAKPVVTITADKARDFFINIVHWFGVPNRIITDNGTQFTGGVFKDFCEDFGIKICYASVAHPMSNGQVERANGMVLQGIKAXVFDRLRPYAGKWVDQLPSVLWSLRTTPSRATGQSPFFLVYGAEAMLPSEVEFESLRFRNFKEERYEEDRVDDLDRLEEAREAALI

SEQ ID NO: 164128 - protein, 127 aa, Oryza sativa
  Clone ID: PAT_MRT4530_63058C.1.pep
MRRTGPESTVYHPFEPWIPELSKQRFMSIQKPIRSKLTELATPTRCATKTSPGLGLEQVQVQVKVKKMQRSTAGATCSSLKRMGETGSAERSLTRHYCPAASPQRDTLVQKGSEHDLQLLNLTLDIN

SEQ ID NO: 164129 - protein, 1254 aa, Oryza sativa
  unsure (1)..(1254): unsure at all Xaa locations
  Clone ID: PAT_MRT4530_63059C.1.pep
MQSGNHPTDDGSPTQDSSNLTARANSKELSRLARSKRKRKLDLRRSGSPSTKNYSSADETNALQRKRKLDEKRTGFQMSNNESSADTGNPLQSSNFTAEVNSTELARLSRLNRKRKLDLRRSGSTLNNSSTCSNPANHTERSRKEKYQIPSTNMETNSLKMNDRGKVDLPTLKKPPTYLSNLMCKEKGKRSRNYMDNIRVYNSMFAFTSMGGKVDREINNGSGPYVFRMNGQNYHRIGTLLPEEGDKPRWAQLYIYDTENEVKNRIDASTSSHNRESIDSHIVLGLKNMLDRENVLAQTFRMARDRFKEGDYHNVSLRLIRKRGGDGRQHNMPSASEVAALIVNDTSENQKGRDIIVHYKDTGPRRISENHPKFMAMQYPLLFPYGEDGFTNKILYRTRISLFDFLFKRNYNCLLSSYNPLVPKRDFTAHIYFSCKKNKGHRFEMKKYKCRIPTKEEAAKDLNLENFNRXGPCGEGKXNSPCMIENKCIRIFPKKFPSEPPVDEDGFPHTRRRANGRSIKKGNVKLANRYVVPYNRDLLVKYQAHINVERCNRSKSIKYLFKYMHKGDDQATALIESDHDEIKKYLECTYISGHDACWRIFQFEMHYRYPSVERLPFHLENEQQVIFPDSADLRKIVRKERIGVTKFTQWMETNKINDEARDFTYAEFPSKWVWKNKLKQWNKRKKGKMIGRIYYAHPASGDKYYLRMLLNTVKGPRTFEEIRTVDGVVHPSFKSACEALGFLDDDREWVECIREASNYASGNQLRHLFTTILCHCEVTDPKRIWESCWEDLGEDIEYKQRKNLNYPTLRLTEQQKKGHALIEIEKLMRQAGKTLEEYPDIELPKCAELRELGNRLLNEEMSYDKDQQKEEHDSIFGKLNAEQKAPMANRICFEALDRSLRDILRSKGEDNSTKPFGGMTVVLGGDFRQILPVVRKGRRTQIVNASIKRSYLWQHFHIFKLTRNMRLSCISRDEDEQKRTADFAQWILNIGDGKTTSADGEEWIEIPDDLILKKGGDPKEEIVKSIYPNLVQNYKKRDFLEQRAILCPRNETAREINEFIMNMIEGEEITYLSCDTVCKATTNDSETDVLYPTEFLNSLNFPGMPNHVLKLKLGLPVMLLRNINQSSGLCNGTRMTITQLGKRFIEAQIITGTHVGEKVYIPRIIMTPTESGWPFLLKRRQYPLSVCFAMTINKSQGQSLNMVGLYLPKQVFTHGQLYVAFSRVTRRDGLRIMLDDNESPGEHMVRNIVYKEIF

SEQ ID NO: 164130 - protein, 410 aa, Oryza sativa
  unsure (1)..(410): unsure at all Xaa locations
  Clone ID: PAT_MRT4530_6305C.1.pep
DPCTGVPSRPAFVCRRPRHTRRQLLLTPRSPPPPPAEPLAPSRPPPPDTPLAPIRPPSIGCASHAKPTSVSAARASRAESASAAISCALSAPSMAXRLLPPNDATLARCSRLPHPRLAVRSRHASGDRGHRHRSRXCRMPSHLAVAILTSSTAATSTVATANATSRPPSQPAATSTRCRRSRLHTVAGLHDALXAAARRWPPRQPHAAGLHDACTAGLATHEXAARPPPRRLNHHGRWLASQPSQSMPPQPSPPXTAAVGSRRRRQLDLARNVIASSRIADVTTGSRRXPPPPHPSSGHAFVLGXTGASSSSVSXPGRHRPNPPPKLGAELPGRRRPSVGDRIRAPQHPNLDCRQSAVDAMALSSYRGRRPDRIDRERGRESPSACVLAAGGREAGERFRFPGTELEFAL

SEQ ID NO: 164131 - protein, 388 aa, Oryza sativa
  Clone ID: PAT_MRT4530_63060C.1.pep
MSTTSSSKTATCPLCHADVLLPRRRSAGSSTHRSHDLDDGPAPPSPESSCRSNAAVCGCARCRRPDLISPGTGMRMRNRFGDGPNRISAQSGAWLCRERTAETCRSTSSRSGRYRRLQPAAVAGTRRAELIKRLQELCHPANNLPNCSASWQPQRQRQKTIDRIPDSLDCGVTMERGKNKRDGSDNGLIFSNLMHGVAAGIYGYPPHQGYTQAQSYLLLPEAYPPPPWTYPLSSAYPPQPVGYPSGGYPPAVYSDSYLHQGSRVAREQCPLSYSNNAVTCREDGQMNCENGTVNMEKSAMSSNKMATSLLKSCGNVMPCRNMERSGPAMYKVDMRGSTKQFSMGSKMMMCLIVFGCLIAALDMFRNVAQKQMFSVVSLLSFVVATYVC

SEQ ID NO: 164132 - protein, 275 aa, Oryza sativa
  unsure (1)..(275): unsure at all Xaa locations
  Clone ID: PAT_MRT4530_63061C.1.pep
DREWVECIREASNYASGNQLRHLFTTILCHXKNLNYPTLRLTEQQKKGHALIEIEKLMRQAGKTLEEYPDIELPKCAELRELGNRLLNEEMSYDKDKQKEEHDSIFGKLNAEQKVAFDSIIESTNKGLGKLMFVDGYGGTGKTYLWRAITTKLRSEGKIVLTVASCGIAALLLHGGRTAHSRFHIPLIVTEESTCDIKQGSHLAELLKKTSLILWDEAPMANRICFEALDRSLRDILRSKGEDNSTKPFGGMTVVLGGDFRQILPVVRKGRRTQI

SEQ ID NO: 164133 - protein, 123 aa, Oryza sativa
  Clone ID: PAT_MRT4530_63062C.1.pep
MLLRAGPGPRRVVRPPRAQARGDPSLIPSHPSPANRPSHSPEPQTRASGRPQLLSESAISQGAVRVRVRVTSPAALPTGPTPRELQCRPRPSRVASSPSRRCPSPREAAVSAKTASAPLAYSA

SEQ ID NO: 164134 - protein, 302 aa, Oryza sativa
  Clone ID: PAT_MRT4530_63063C.1.pep
MSNNESSADTGNPLQSSNFTAEVNSTELARLSRLNRKRKLDLRRSGSTLNNSSTCSNPANHIERSRKEKYQIPSTNMETNSLKMNDRVSKEGNITRNKVAVPPRKKKKSSVKEWNFGKPTCTCQHCGALFWYEERTRGKGKGPPSFSLCCKQGKVDLPTLKKPPTYLSNLMCKEKGKRSRNYMDNIRVYNSMFAFTSMGGKVDREINNGSGPYVFRMNGQNYHRIGTLLPEEGDKPRWAQLYIYDTENEVKNRIDASTSSHNRESIDSHIVLGLKNMLDRENVLAQTFRMARDRFKEGDYHN

SEQ ID NO: 164135 - protein, 102 aa, Oryza sativa
  Clone ID: PAT_MRT4530_63064C.1.pep
ASELGDGVDALRRCVDAMARVAVGEESSSTAAAARRKVRFEVDNVRTWASAALTDDNMCMEGFKGEAAGGGGAREAVRGHIMGLLHLTANALGILNAMAKQI

SEQ ID NO: 164136 - protein, 93 aa, Oryza sativa
  Clone ID: PAT_MRT4530_63065C.1.pep
PPPAALPLLPGTSLKKPVPKRCPARAGMTVCDGLLPGGRMDDDMMPTEYPPEKTIRNTVSRMRCARSLAVTPLKDAAAGDGRGFMITSHPRVR

SEQ ID NO: 164137 - protein, 172 aa, Oryza sativa
  unsure (1)..(172): unsure at all Xaa locations
  Clone ID: PAT_MRT4530_63066C.1.pep
MDDLEQAILLASDSPAXPAVRTEVLAYYTHARDETPPSSLLHLCLXASPPFLRNKLAXLIALLMRFEYPHVYPSYFLVLIPPSPPQPGPTDMFACVLVSLDNDLLSHDHPRNAEEASDAGRVKDAMRVQCVPQIARHWHEAAMSLRTADPTVVAVSSWLPVEQFGHPDGLGI

SEQ ID NO: 164138 - protein, 66 aa, Oryza sativa
  unsure (1)..(66): unsure at all Xaa locations
  Clone ID: PAT_MRT4530_63067C.1.pep
YSGKXKDPSQVXXFPXMXRKXNXACLQSADCXFCFQTPRCNFPIVKACLKNFXKGXXVNFCXMSRE

SEQ ID NO: 164139 - protein, 77 aa, Oryza sativa
  Clone ID: PAT_MRT4530_63068C.1.pep
LTMENNLQLYPKFNNLVSLTLGQWCLDANFYGLVVFLQNAPKLEKLTLELEKVNRFIHMYTDPSREIFHKHTCQSGM

SEQ ID NO: 164140 - protein, 90 aa, Oryza sativa
  Clone ID: PAT_MRT4530_63069C.1.pep
TRPHTPIVASHRSTVEKERSGAPSAVRSSDPRALALSTSAAAAAAAAARALAARVTTTRGYAVSAASTAMRRAASAVEGKGATVMTHAKD

SEQ ID NO: 164141 - protein, 120 aa, Oryza sativa
  Clone ID: PAT_MRT4530_6306C.1.pep
NEQQIDHLFTRHDHISRQQASNQYNLKPQEWCKWCTCASFRNLGRLIGLMRPSSLGIRDRSHFLFFLASAFCFRTREHSLLASLKEKSVSEYINYGNCWWFFFSYGSFINRIPSHALLAR

SEQ ID NO: 164142 - protein, 648 aa, Oryza sativa
  Clone ID: PAT_MRT4530_63070C.1.pep
MAEVARASASPPPASASTGGDRKRGRSSPSLPPPPPGPPPQVPHGSKRHRRDEGGGGGFDRRRLGPGVGYDNPDDRRYGNDHGGAGGRGGYGDERGQGRNFNRAPDWTDSGRGGWNDGPANSRREGLMSYKQFMQELEDDVSPDEAQHRYEEYKSEYITTQKKAYFDLHKNDDWLKNKYHPTNLEIVMESRRNELARTAANQFLQDLQNGSLDIGPGLTSSATNKSGNSVDDTDANGKKGKLGKSQDDLYYAAPKAHPVSSEPRRIRIDVELAQALICKLDSEKGIENNVLSGSDHDRAEKDKSHGSMGPIVIIRGSSAVKGLEGAELLDTLVTYLWRIHGVDYYGMSETNEPKGLRHVKADSRTFNGASSNAAEWEKKLDSFWQDRIQGQDPMEILKAKDKIDAAASEVLDPHVRKIRDEKYGWKYGCGAKGCTKLFHAPEFVQKHLKLKHADLVRELTSKVRENIYFDNYMSDPKAPGGMPIMQQPAPREKVRQRPPIESRLRDERGNRRFDRNDSPTHDGSSDNPDDAYDSYGDPVMHGAFPPDIPAPPVLMPVPGAGPLGPFIPAPPEVAMRMMRDQGGPPPFEPTGGPRPRRPGRGGLPMGGPSPILAAPLPPPHMHDPRKIRSYQDLDAPEDEVTVMDYRSL

SEQ ID NO: 164143 - protein, 52 aa, Oryza sativa
  Clone ID: PAT_MRT4530_63071C.1.pep
GNQKNHFWKNNNFFLNFLGDTKPTWTLFWGTKPIFPNPKTTNLVGPNPSNPN

SEQ ID NO: 164144 - protein, 175 aa, Oryza sativa
  Clone ID: PAT_MRT4530_63072C.1.pep
MCLVLPTCEATHTLPWHEPHPITPSDTGVIPSQLSTTSGRPAPPRGRDLSNGPAWEELVRVQTRGRKLLINGDEAGQTHAMPFASMRTPIALNKACHGRRDIIKCGGWALGTPTQGVRANQSVEGLGAARPLEWEAAATPTPGPTPLGGTTWVWSGLLPRGTPGPISSTDTKIIG

SEQ ID NO: 164145 - protein, 166 aa, Oryza sativa
  Clone ID: PAT_MRT4530_63073C.1.pep
MAVTEAGGRRAERRWAGSGRSGAGPRAGGGLCGHDHGSSYSGGNHGLDGRREMWRGEAAGGRWGRGEASPSSRRADAVRRRARRRSRVETPPPQFYSDTMIRAEVNFTWTFGTALDTDTSINKPKCKAATKPLFYLQAVVRHPLYCCSISSACGQIARSSSFPAVV

SEQ ID NO: 164146 - protein, 197 aa, Oryza sativa
  unsure (1)..(197): unsure at all Xaa locations
  Clone ID: PAT_MRT4530_63074C.1.pep
AQAYSFTILNFAVDMTEIRSGIYGCGGIGRLAGRMILHSTDDYTINAYNPVXQPMTSTLHRGTATTCATGSSVRSRANIIESMDLLMTCVSVFRAIRLTVSLVWIPDETGAAMVMLSTVAKGTCYLHCTGPWVTMTGRIADKGVMSYTLAKRTEALDAAXHTTAALGKGFGIGCVVXETLALSGGFVSRANICTDDG

SEQ ID NO: 164147 - protein, 327 aa, Oryza sativa
  Clone ID: PAT_MRT4530_63075C.1.pep
MPLLGNSKRSVGASRPLRIQVVLLGSGWLAESSSEEGRVGLGTPAPSQHPLPGGALTRRVDTSNLQEPLPTAVSKLPSQDKNASVIVIVPGWSSDDNNFSEAVKKLLFGRIGADHSVDQKVPPPAVRTVIVHIFGRYGPYLARHMEGLTAQAHLRRQEMTFEPNMCHRGIIKERVDELLEPARPSSPKCCSCDRPADWITSCCSLMLCSYCMPDKFHQKHKRGHSRELCRAQGAIGLLNPRSPLEEETRYLMKNDMLCKREIILQVEDEESGRTRECDIFVLRSMLPLADLWNRKRLNRLFTCGYHMRWNGVLDELFRTENKLSFMK

SEQ ID NO: 164148 - protein, 1119 aa, Oryza sativa
  Clone ID: PAT_MRT4530_63076C.1.pep
MSGSEAVPPPPPAAAASATTGGGRSTTTVMNTVAIALSAGLVALAVASYSCCLLLRRRRREEEDDGDRAAKRAVGAAAAVAARVPSDVGSSSRQHRSPPPSSTASDAIYLDPLTTLVEVRQHEKSPDLRPLPLLKQPSPDLRPLPPLKRPESQPPPPPPSTPPLTTTGYSTDEEDQATYYTAPKTAMSSFSRSTSQHSTLEQTAMPPMAAPAPPQTNPPRPVRPPPPPPPPRQRLLRPLPAESPPPAALANLELTGSPVKPAVEDRGGENSGAARPPKPPHLKPLHWDKLRAISGRTTVWDQVKNSDTFRVDEEAMESLFLNSGGGGAGSSDPAARRGGSGKQERRLLDPKRLQNVAIMLKSLNVAADEVIGALVRGNPEDLGSEFYETLAKMAPTKEEELKLKGYSGDLSKIDPAERFLKDVLGVPFAFERVDAMLYRANFDNEVNYLRKSFGTLEAACEELRSSKLFLKLLDAVLKTGNRMNDGTNRGEARAFKLDTLLKLADIKSTDGRTTLLHFVVKEIIRSEGFDSDQSAVNPGSGSKEQFKRDGLKLLAGLSSELSNVKRAATLEMDTLSGNILRLEADLEKVKLVLQLKETCSDQGASENFFQAMVVFLRRAEAEIKNMKTAEENALRLVKETTEYFHGDATKEEPHPLRIFVVVDEFLLILDRVCRDVGRTPERVMMGSVVQQMHNLSTSSPGKIPYYKRVPPFFSMPIPRLPLLLKIAAATAAGALALIVAAGLRRDDAVASLRREIRDAVAALVASNEDGVVEGEGEGEDAAEAPAPSVLITGFRAHGKSSLVNTACRALAAEEGPLLLRAEASPPGGGSDGTRKRRRVKAAVAGDSGDAGTDEAVVELLDAPPLPEATRATRADIDAAISGGNPECVVLALRCDAPAKERNAAVKRLPEISAAVRAKVVLESGYCKCSWRFLCFSLSSTSMKTLLLPYFTQHMLAKMNIFVDEHLLTGLNLIVVLTFKKAMRSARQAEELIREVSFRARTDCVYFIENYTWNNNGPNLRHPPVIKNDFETHFTVLTIIRQCLEFIKLNRSQSKREENGEKGNSGDVKGILEKVLTANAKSSGELSVKPALEKVLTANAKSSGELSVKPADVKPVLTVQ

SEQ ID NO: 164149 - protein, 148 aa, Oryza sativa
  Clone ID: PAT_MRT4530_63077C.1.pep
MDGCRWMVGCSAAGGVAALGGGVVAPGVGGARLWRGVALCRGREGACDRRWIDPIQRSDSALSGSEFNRVDGIESAKVIWDTLRNLHEGTDSVRESKVEILKGQYERFVMLDGESPSDMYDRLSKIINEIKGLESKDMTDKVVIKKML

SEQ ID NO: 164150 - protein, 92 aa, Oryza sativa
  Clone ID: PAT_MRT4530_63078C.1.pep
LRMTGKHETASYDKFTWGVANRGSSVRIPRAVAAEGKGYFEDRRPASNGDPYQITGIIAETMYGKVEGADVARFAKKAEVVETEMVIDVHKP

SEQ ID NO: 164151 - protein, 121 aa, Oryza sativa
  Clone ID: PAT_MRT4530_63079C.1.pep
MVRRRWRTKPVAIKAARSSVRGLEAIHRHRRGGRLPATRPLQIHPSPYSWLEVVGAPPRHRADGIADMGRRWPDLSTRWVTVCPSGIATMPRHTFVGEGGRLIQCPSNPQVQSKQIGDEVS

SEQ ID NO: 164152 - protein, 303 aa, Oryza sativa
  Clone ID: PAT_MRT4530_6307C.1.pep
FPRRPSVRRFLSFPFLKKGEGGWWRRRRRQQQQCGSASASGGVGRRPPRVSRDRLPPRLRRRSPSARSVPIMVKKKRTGSGSTGESSGEAPGAPGHGSSQRAERGPQQHGGGRGWVPQHGGRGGGQYQGRGGHYQGRGGQGSHHPGGGPPEYQGRGGPGSHHPGGGPPDYQGRGGSGSHHPGGGPPEYQPRDYQGRGGPRPRGGMPQPYYGGPRGSGGRSVPSGSSRTVPELHQAPHVQYQAPMVSPTPSGAGSSSQPAAEVSSGQVQQQFQQLGTRDQSSNSQAIQIAPTSSKSVRFPLRPG

SEQ ID NO: 164153 - protein, 149 aa, Oryza sativa
  unsure (1)..(149): unsure at all Xaa locations
  Clone ID: PAT_MRT4530_63080C.1.pep
DWQRESKAHRDADLYKYLHYSPPPPSPPASSSSPTSPPPSLASAPMRHHSPPPPPXTSPPPWARSTRRSPPPRALPPTVEAAGAPSPRCWGSRPPRRWSFFFPPAAASGRRPRPGFPATRTLLTGQPGSPRLASLWPAFPAASSSPSPF

SEQ ID NO: 164154 - protein, 140 aa, Oryza sativa
  Clone ID: PAT_MRT4530_63081C.1.pep
MAAAAAAAQWCGAAGLDRWVGRWRCTLSPAALPVPSRRTRRKGGVVGCVSVPREVAAAAAVEPAAPPEAEAETEEEGVECEGCNGAGWLLCDFCKGKKNNVKSESSRIYRRCPTCKAAGYILCPRCRVYKCITYPESNDS

SEQ ID NO: 164155 - protein, 59 aa, Oryza sativa
  Clone ID: PAT_MRT4530_63082C.1.pep
KLISFVREQQDYNLQSQGARYKLGLTATHPACKGLHHQSIQAMRMPSSPAAFEPPINIS

SEQ ID NO: 164156 - protein, 275 aa, Oryza sativa
  Clone ID: PAT_MRT4530_63083C.1.pep
MRSCTPPTLPAKSTGESIPSIYLHPHRPDPGTEQAHARKRNPTGAVTIARDARETSLLTSERDYRRGATLILTPHATRSVDCAILKGAARRAPLPPRRRKPGCPLLFACAPTGPLNEDNDRRFSDQGAFSRNDSQGATGAVLRDVDGRFKGGRARWHPHGLDALMMEALACRDGIQLAREKGVLRIQVETDCQELTKLWKQGGSQRSHVASIISDAIELSSSFHGFTLLYTPRSCNHVAHVLAKQVTADDRLGEWQSAPACIEHLVTEDCNPAVP

SEQ ID NO: 164157 - protein, 211 aa, Oryza sativa
  Clone ID: PAT_MRT4530_63084C.1.pep
MEFDMAMDMMSQEQLMHIISQLDSALASSPSPSTSPSASPPRQSPAAHVPVPPGLLNTTMVSTSRAQAAPSAPLHPVAATAAVQSSSRGIMYTTTRQGVIDAAEEEEAAAPRPRRRNARVSSEPQSVAARLRRERVSQRMRALQRLVPGGARLDTASMLEEAIRYVKFLKGHVQSLERAAAALHMHGGHAAAAGFAGDAGDAVYSCPSYYA

SEQ ID NO: 164158 - protein, 74 aa, Oryza sativa
  Clone ID: PAT_MRT4530_63085C.1.pep
MHGSHGAHEDIGSNSGNRDGGGMWERRSHTSGMRERCRAHHARGTGVVPHPRPAGPAARPRSRATVPWIGSILV

SEQ ID NO: 164159 - protein, 226 aa, Oryza sativa
  unsure (1)..(226): unsure at all Xaa locations
  Clone ID: PAT_MRT4530_63086C.1.pep
MASGGSALSGLSGAGSAPHRPSHVPLPPSAATAHSPVPLPRTGDRSTLPRLTGAGSASRHPSSRSLTLRTAIAPPRIADVESCRRPIPVPLPRSGNGGSALPRLVDAGSAPSPAGSSFPAPPPPPSSSSSPDSAHSGQPDPPTGRXGSPDLEATASPLADAAVMEPAAAGGGGGNYGRRRWRVKGGWQERVCSAPHQVHPRTQSKGTGQPAARRCRSTAYPDREDF

SEQ ID NO: 164160 - protein, 156 aa, Oryza sativa
  Clone ID: PAT_MRT4530_63087C.1.pep
GRRSCAVCMETLEWAAIGPCGHGEVCAGCALHIRVFQNNRLCCICRSPCRVVVVTNPDAIAAAGGGGWPAVSSRLPSEGRVGEYWYHTGMGAFFDDERQYAAAKAAARLGPPPCGDANENPPPPPPPHCVRSRHSVHLKSYLKVSQMCTMCFTCLS

SEQ ID NO: 164161 - protein, 63 aa, Oryza sativa
  unsure (1)..(63): unsure at all Xaa locations
  Clone ID: PAT_MRT4530_63088C.1.pep
PHDVEAGTAEESMCYLDAXPVVTVKGANAVILRLPLELPMPMNRTTYKGRXASLICIAQTLRG

SEQ ID NO: 164162 - protein, 272 aa, Oryza sativa
  unsure (1)..(272): unsure at all Xaa locations
  Clone ID: PAT_MRT4530_63089C.1.pep
MAAAAETSAKVGAPRRWSLQGKTALVTGGTRGIGRAVVEELAALGATVHTCSRKEEELSERLKEWEARGFRVTXSVCDLSVRXDQRERLLXQVADLFGGKLDILVNNVGTNIRKPTTEFSAEEYSFMMATNLESAYHLCQLSHPLLKASGSGSIVFISSVCGLVAVFSGSLYAMTKGAINQLTKNLACEWARDNIRSNSIAPWYIRTSLTEGLLANKDFEGAVVSRTPLRRVGEPEEVSSLVAFLCMPGSSYITGQTISVDGGMTINGLYPS

SEQ ID NO: 164163 - protein, 147 aa, Oryza sativa
  unsure (1)..(147): unsure at all Xaa locations
  Clone ID: PAT_MRT4530_6308C.1.pep
GQKIKEMFTSEYFQSXAVGSASTTIPLYREIIHPKIPQLAVIGYSESLANLYTSELRAKWLAHFMDGGFRLPSISVMQNDVQEWEKFMKRYSRAYFRRSCIGFLHIWYNDKLCRDMGCNPRRKNGFWADLFDVHGPVDYIDLHPKKE

SEQ ID NO: 164164 - protein, 298 aa, Oryza sativa
  Clone ID: PAT_MRT4530_63090C.1.pep
MPESRHRRDESLISSTYSNGYGGDESSFSGSEVDYIDEGGSPSDSDAVSPMSRHSWDYIRRHNSPHSASIFSRAHSHSPESSVIREAKKRLSERWAMVSYNEINQEQVPLRRSSTTLGEMLSLQVAKKEEAVAGIISVSSNRSSGTENELAMKDACKSTLREYDENGKSSPRNLAKSKSVPVSSSIFDNVAVNAQSANSEGTPKVFTKSGRAKLSFTGKISSFFFPGNKRPTKEKTSLSSDSSGEIFGCIGHMVPQSDHNLGPDEQMAFCKDEADNSTNHAPCSTKDAGSIERPVSSD

SEQ ID NO: 164165 - protein, 61 aa, Oryza sativa
  Clone ID: PAT_MRT4530_63091C.1.pep
MSPRSATCKWGARAHRTIGKQMKKGAGEGSPARTGDPRDVAGDPLSESPSPPPPADMGAGS

SEQ ID NO: 164166 - protein, 286 aa, Oryza sativa
  unsure (1)..(286): unsure at all Xaa locations
  Clone ID: PAT_MRT4530_63092C.1.pep
YNLDFIGIQETMKXDFNNNLLNYISGKKLFDWTLLPARGRSRGILCXIRTSXLVQKVEIGDYCLKIHLLNQKDKWEVEIITVYGTAQPEQKSEFHLELARFCQKLSKPVIIGVDFNITSXEDGKNKRGGTNKWSFIFNAIIEQSNLREINMGGRRFTWCYNRDHPTYEXLDKIFINMEWXNIHPLTRVNALERFLSDHVPLMVXMGENRTSNLHFKFELSWFIREDLSKVVGHTWLHSGKGGTNVERWQNRLKALRRVLEGWNKNWEGLYRKKKKEILEKKMDEID

SEQ ID NO: 164167 - protein, 517 aa, Oryza sativa
  unsure (1)..(517): unsure at all Xaa locations
  Clone ID: PAT_MRT4530_63093C.1.pep
NKSGKKSDSGIRSGKQSFSYQSTPQRSSRDNSNNHSFSVSATPLEIDVQGGSPKKIAEETPQEVPLSRLAALNKPEIPVLLLGSVASAVSGVIFPIFAILLSNVIKAFYEPPQVLKKDAEFWSSMFLVFGAVYFLSLPIGSYLFSVAGCRLIRRIRLMTFEKVVNMEIEWFDHPENSSGSIGARLSADAAKIRGLVGDALQLVVQNLATLVAGLLIAFISNWELSLIILALIPLIGVNGWIQMKFIQGFSADAKMMYEEASQVANDAMKCEGPLRTGIRTAIISGIGFGVSIFLLFGVYAASFYAGARLVEDRKTTFPNVFRVFLALTMAAIGVSHTSNLTSDSSKAKSAVSSIFAIVDRKSRIDPSDDAGVSLEPLRGDIEFQHHCCXLFGAEAVVGDNETMVGERGAQLSGGQKQRIAIARAIVKDPKILLLDEATSALDAESERVVQDALDRVMMNRTTVIVAHRLSTIQGADMIAVVKNGMIIEKGKHDALIGIKDGAYASLVALHVSAAAIS

SEQ ID NO: 164168 - protein, 231 aa, Oryza sativa
  unsure (1)..(231): unsure at all Xaa locations
  Clone ID: PAT_MRT4530_63094C.1.pep
MPLRPLPSRRPSATSRTPSGGGYPTTSSPGCSSASPSSTCSASVTSSPRAGSTSGEPTRCISTTASSPLPGSPPTTSPTPSPTFSSSTSGTASSSGVEDESADQAGRHRPPSPGGXAPTTASSATTTSTATTTSQLVVTRSAASTASEWRPRGGASTTSTAGAPRSSAAVFVRSSSPTSPXKGTPTSPRASATAAQASRDSTSPSPWKRTTSTPSSISAASGCAAAPSTTA

SEQ ID NO: 164169 - protein, 1224 aa, Oryza sativa
  Clone ID: PAT_MRT4530_63095C.1.pep
MSESSRAFGVNASSSSSGGGGGGEAVAGTTGKNGGGGSVAFHRLFAFADGTDAALMLLGTLGAVANGAALPFMTVLFGGLIDAFGGAAGGDVVARVSEVSLQFIYLAVASAAASFIQVACWMITGERQAARIRSLYLRTILRQEVAFFDKHTNTGEVVGRMSGDTVLIQDAMGEKVGKFVQLLVTFLGGFGVAFAQGWLLTLVMLATIPPLVLSGAVMSNVVARMASLGQAAYADASVVVEQTIGSIRTVASFTGEKQAVAKYSRSLKRAYSSGVREGLAAGVGMGTVMVLLFCGYSLGIWYGAKLILEKGYTGAQVMNVIFAVLTGSLALGQASPSMKAFAGGQAAAYKMFETINREPEIDAYSATGRKLDDIQGDIEFRNVYFSYPTRPDEQIFRGFSLAIQSGTTVALVGQSGSGKSTVISLIERFYDPQLGEVLIDGVNLKELQLRWIRSKIGLVSQEPILFAASIIDNIAYGRDNATNQEIRAAAELANASKFIDKMPQEALDRVMSNRTTVIVAHRLTTVRNADTIAVIHQGSIVEKGSHHELISDPDGAYSQLIRLQENSHDSEDANYQNKSGKKSDSGIRSGKQSFSYQSTPQRSSRDNSNNHSFSVSATPLEIDVQGGSPKKIAEETPQEVPLSRLAALNKPEIPVLLLGSVASAVSGVIFPIFAILLSNVIKAFYEPPQVLKKDAEFWSSMFLVFGAVYFLSLPIGSYLFSVAGCRLIRRIRLMTFEKVVNMEIEWFDHPENSSGSIGARLSADAAKIRGLVGDALQLVVQNLATLVAGLLIAFISNWELSLIILALIPLIGVNGWIQMKFIQGFSADAKMMYEEASQVANDAVSSIRTVASFSAEEKVMDLYKMKCEGPLRTGIRTAIISGIGFGVSIFLLFGVYAASFYAGARLVEDRKTTFPNVFRVFLALTMAAIGVSHTSNLTSDSSKAKSAVSSIFAIVDRKSRIDPSDDAGVSLEPLRGDIEFQHVSFRYPTRPDVQIFEDLCLTIQSGKTVALVGESGSGKSTAISLLQRFYDPDAGHILLDGVDIQKFQLRWLRQQMGLVSQEPALFNDTIRANIAYGKEGDATESDIVSSAQLANAHKFISSLHQGYETMVGERGAQLSGGQKQRIAIARAIVKDPKILLLDEATSALDAESERVVQDALDRVMMNRTTVIVAHRLSTIQGADMIAVVKNGMIIEKGKHDALIGIKDGAYASLVALHVSAAAIS

SEQ ID NO: 164170 - protein, 381 aa, Oryza sativa
  Clone ID: PAT_MRT4530_63096C.1.pep
MATQHLELANEKFLATPIAHFKIAISVGPGLGKILGPPVSLLALPQGGLHRGLPRLGGLFLPSCCKLARIIKLVIFLIGMSTISDQKKRTLEALQQRYAAAKAKKLQDKPRCQTRNKDSAPKPNLDASRKGKAPDFIPSRTSAPFPSKKGLAISSSSASSGAFLGSNIHRSDLDSMDVVHNVVYDIIQKGGDAGKITKGAKKLKLEKGILLDNYVHRGPRLVDAQAKSLLIHSKRSKRHMSLKQHKKCGSFDLPETLRKFDLYKPMHEMWKEYITELTKSTPKKQLSETLLSADLHGALVIVAECKSASSYQGVCGIMIRDTAETFGIISDDNRFRVVPKAGSVFILQADCWKVTLIGDKLSPREKLKENQRQQRVQAQIR

SEQ ID NO: 164171 - protein, 163 aa, Oryza sativa
  Clone ID: PAT_MRT4530_63097C.1.pep
PNLERADSSISEQESRFPPRGCRKEVVVVISSRHLFKRGRWLSLEGRSRGQRICSNGKDISGISGRGRRFSNAHSGSVKGGKLGHKPQAPCSLKHEGTKAVNLVQGHVCRRRPSGSAEPGQHHFQVLLPTGDRTRNRQPGTNPRRYGTANMWLNLRARIRGRA

SEQ ID NO: 164172 - protein, 119 aa, Oryza sativa
  unsure (1)..(119): unsure at all Xaa locations
  Clone ID: PAT_MRT4530_63098C.1.pep
QTRGQKYGATGWLVNTGWSGGRYGFCLLIMLSSTMKIIXSIHSREFLSINYKKTEVLFLEMPILITGFPSIIVDTINIWTDKGTHNVTLLYLACSVKKNALVFFNYKIRGDSRLTDNIL

SEQ ID NO: 164173 - protein, 146 aa, Oryza sativa
  Clone ID: PAT_MRT4530_63099C.1.pep
MPRSSEEAVVGSGSRLLGMEETTPSGWQHLAVGRCVARLGDVDPAPDGRGTEAVATGGRGWRPRHRRSPPPRQRTPSSPPHRCIEPPHIVNTSLPLLLQEKPDREIREGGEGERRGRRMGHHRCRHTPPNHRRRLARGPSGPLPPP

SEQ ID NO: 164174 - protein, 81 aa, Oryza sativa
  Clone ID: PAT_MRT4530_6309C.1.pep
MKPELKVTFMATMLRVTLRMKLTTIDRGVIVSDNDGTGSASKACSVEMPSWKSLTGSIVLVIYKRDDKGTTAKGKKLGVSE

SEQ ID NO: 164175 - protein, 100 aa, Oryza sativa
  Clone ID: PAT_MRT4530_630C.1.pep
MVEDGGGPTAGRRGMRRWLPSAALEAAAAAPVGGLEVAAAALVGAGSPRGCDGGQRRLPTVPAALGAMAAAPVGAGGPRGCGSSRQWQSVHFDGGCLGFG

SEQ ID NO: 164176 - protein, 385 aa, Oryza sativa
  unsure (1)..(385): unsure at all Xaa locations
  Clone ID: PAT_MRT4530_63100C.1.pep
YDVVIPMLVRNTSKSKLMNDGKVLHMCCVAHILNLILKDGFDEXKDAIENIRXNVAYWTSTPKKIEKFEEIAKYAKVTIDKKISLDCKTRXNSTLKMLSFAVPYKAAFMRASCVDKXYESLPSXKEWKFAEDVVQRLRLFNDITEMLSRTEYVTAIIYFTKIVEIRKKIMWWSVCGNPLVEAMSVNVVTKFDKYWSDIQELMGIATLLDPRFKTLTLLMCYESLLGTTGKECIRTRLXEMKISMAQLMCEYHVKEDEDVTKSTTPSLVGTNDFLSSLXCRAATKRPDLDHYLDDDLVDIHTNNFNVSNWWKVARTQFPILRRIDREVFAIHVSTVASEXSFSTSGRDLSEHLSRLTTKMLEALMCSQXVQNKYKGIYNLHLCCYK

SEQ ID NO: 164177 - protein, 178 aa, Oryza sativa
  unsure (1)..(178): unsure at all Xaa locations
  Clone ID: PAT_MRT4530_63101C.1.pep
LRSIVVNLNSALXATTEPPAQDPPXLPARGEEVHVDGNVEANEDPSEHPSRDPGRNPRNTLPXGLVSRPRHPKIIAIYTTTXTGAGGNNENRTTLINISAVLHLDAIMMITEEAVPAKTKTGRIAKASMMTTTMGGELRVATVEVDDNMTMIDDVEIHAPQILGGIDNEDADPGVAHH

SEQ ID NO: 164178 - protein, 87 aa, Oryza sativa
  Clone ID: PAT_MRT4530_63102C.1.pep
LLALAKAVALLVVAIAPWGVLVQLECDAPDKKSLTKVLLSPVDKRLDEAAQAINKGADYDAAAAPPAKKDEEEPDTIELPISHIPDL

SEQ ID NO: 164179 - protein, 234 aa, Oryza sativa
  Clone ID: PAT_MRT4530_63103C.1.pep
MATYRPGSNTLLKSDSILEYVLDTTVYPREHERLRELRLITQNHPKSFMGSSPDQMQFFSVLLKMIGARNAVEVGVFTGYSLLATALALPDDGKVVAIDVSREYYELGRPVIEDAGVAHKVDFRHGDGLAVLDQLLAGGEGKFDFAYADADKEQYRGYHERLVRLLRVGGVVAYDNTLWGGSVAMPRDTPGSSAYDRVVRDYMVGFNAMVAADDRVEACLLPVADGVTLCRRLK

SEQ ID NO: 164180 - protein, 82 aa, Oryza sativa
  Clone ID: PAT_MRT4530_63104C.1.pep
RMHPSFSFFPPDQAAPPFFFLGDGEWPSVFLRLQGCITCLAARTKCWWTNVMRDTISHCIKTYEEGNLLCLYSSNLKKHRKT

SEQ ID NO: 164181 - protein, 39 aa, Oryza sativa
  Clone ID: PAT_MRT4530_63105C.1.pep
YLLVTLGCCGVHLLVVGAFYFPRMLDLPSLLWVAYVLWK

SEQ ID NO: 164182 - protein, 49 aa, Oryza sativa
  Clone ID: PAT_MRT4530_63106C.1.pep
LLAFTKMILMTVLHHESNSLGEPLEKLTLTHRFLFSNMTNSIILPIDLS

SEQ ID NO: 164183 - protein, 224 aa, Oryza sativa
  unsure (1)..(224): unsure at all Xaa locations
  Clone ID: PAT_MRT4530_63107C.1.pep
MAARRPGSPAPRWAPWPLLAAAAVLLLLSAAPRTARALRFDLESGHTKCISDEIKVNSMVVGKYHVVGPDPNFPDNPLPDSHRISLRVTSPYGNSVHYAENVPSGNFAFTATEAGDYLACFWAPDHKPPVSIGFEFDWRSGVAAKDWSNVAKKGQVDVMEMELKKLEETIKSIHEEMFYLREXGGGNAEPEQANELKNGMARVPLTRNLPIRRGAAAVAPEDLF

SEQ ID NO: 164184 - protein, 69 aa, Oryza sativa
  Clone ID: PAT_MRT4530_63108C.1.pep
MDKLAGEVCGGGAANAGDPSHTAGVGVGGDDDDTAMHASTWRVWAPLERQNLPLTCRPAWVRPIRSQLS

SEQ ID NO: 164185 - protein, 45 aa, Oryza sativa
  Clone ID: PAT_MRT4530_63109C.1.pep
EITKIIHINIDQRNHSQNIATGPPDPTEGGRRCQATTAPRAEFLQ

SEQ ID NO: 164186 - protein, 521 aa, Oryza sativa
  Clone ID: PAT_MRT4530_6310C.1.pep
MEKKRVVIVGAGVSGLAACKQLLERGCRPVVFEADTGLGGVWARTPECTALQTPRPMYQYSDFPWPETVTEVFPDHRQVMDYLGAYARRFGVLDCIRFGHRVAGMEYVGVGEEAVAAWDEWAGNGDAFGSGSGEWRLEVVDGEGHIETHKADFVILCIGRFSGVPNIPTFPPGKGPEAFDGQVIHSMDYSKMGTKNSKEMIKGKRVTIVGYLKSALDIAAECAEVNGTEIPCTMVVRTKHWIIPDYFAWGVHISKLYLNRFSELLIHKPGEGLLLSILATLLTPLRWIFSKFAESYYSIPMKKYDMVPDHSLFEALITCLVAITPKDHYKRLEEGSIVLKKSKTFSFCKEGVLVEGQSSPIKSDIVIFGTGFRGDQKIKEMFTSEYFQSIAVGSASTTVPLYREIIHPKIPQLAVIGYSESLANLYTSELRAKWLAHFMDGGFRLPSISVMQNDVLEWEKFMKRYSRGYFRRSCIGILHIWYNDQLCRDMGCNPRRKNGFWADLFDVYGPSDYIDLFPKKE

SEQ ID NO: 164187 - protein, 182 aa, Oryza sativa
  Clone ID: PAT_MRT4530_63110C.1.pep
MKFPKRYVIVLLTFICTNVCYIERVGFSIAYTVAADAIGVNQANKGMILSMFYYGYVLSQIPGGWAAQRIGGFAVNHMDVAPKFAGIVMGVSNTAGTLAGIVEAGVGDLEAEIGGGTMTTSMAIRGGAMTEESASAAGRRRSRSRPVGVIWSGVDGGGVGGGCGWAAATSPAGASGRGEEAT

SEQ ID NO: 164188 - protein, 128 aa, Oryza sativa
  unsure (1)..(128): unsure at all Xaa locations
  Clone ID: PAT_MRT4530_63111C.1.pep
LTLFIRKTRSKTIQLHSFATGNPAKPHRRQSKKTCGKTTTNHNXTRERSKTFKAKPPRREVTTEAATNARLKRTGFSPKGKESQQGNTSMEDTAPQASMLPILEYQAGLYARDSLERCRTLQETRAEC

SEQ ID NO: 164189 - protein, 68 aa, Oryza sativa
  Clone ID: PAT_MRT4530_63112C.1.pep
MASTPALGDNDVVQRHATAEVDLPLLSYVEVYLNCRGVTGRQVEEAKVALRQVERTHPNIPAIRVLLG

SEQ ID NO: 164190 - protein, 52 aa, Oryza sativa
  Clone ID: PAT_MRT4530_63113C.1.pep
MADTYSYCVSYGGSKKSPAFGHRVIVSIVAIPSETVHSSTCCFGSRYNMIFT

SEQ ID NO: 164191 - protein, 79 aa, Oryza sativa
  Clone ID: PAT_MRT4530_63114C.1.pep
MTERGAPHRETAQAPFSRFGRGLWVRQVITENNLMYFDIRCNCRSMPFHDDLAATATHSAVMAVSVEVGTVDAGVGEQR

SEQ ID NO: 164192 - protein, 203 aa, Oryza sativa
  Clone ID: PAT_MRT4530_63115C.1.pep
MAAKIYIVYYSMYGHVAKLAEEIEKGASSVEGVEVKLWQVPETLSDDVLTKMGAPSKKDVPIITPAELAEADGVIFGFPTRFGMMAAQFKAFMDATGGLWRTQQLAGKPAGIFYSTGSQGGGQETTPLTAITQLVHHGMIFVPVGYTFGAGMFEMEQVKGGSPYGSGTFAGDGSRVATELELQQAFHQGKYFAGIAKKLKGSA

SEQ ID NO: 164193 - protein, 715 aa, Oryza sativa
  Clone ID: PAT_MRT4530_63116C.1.pep
MSYLVEYSDLEKGEGEAVAKAVEYLHWRFIRPSEERSPRDCDFRIGPGAAVEAYCDGAWSPGVVRSVVGEGEYEVSVNGKTKEVVVTKVRELLQPQYKWNGKNWRIVSAKLGYDGSVYHMAKRHLRQQSMSGKSPSSPVDVFSSDDEHRHDTESSARRRSIKRSRKEFNATQQPEGMLPEDSEDVSHSEMNTPLSELCKSSGSNHSPKSCSDPSGMKKIQVLSKKIVSNCLVPVKGILDASTGHRIPQNESREDGIGKTMVNQEIISDMMLTNGQANTSACGTSMNEGYAMLSTKKFGKQKMALSRRYNPVRKARGGLLSVQQLHTKKIMPSELKRGKMRLIHALQDMNDPSDNIQLKGNSTSPSREIICALSVSSQCNTPSPLGKQIKAFDFVSREADSGSNTKFLILKKFARKKGSKESDSPHNSLDATSTVQPIRRKKAAGRLKGSSVERQLEGETHIQQQLNKALEDNLNANEVTNQELLPLTPPGFESVVNGKRSRDWNTDGFSEVNLNSSLFDEELTATINSICQDNHNRDAESDNVATEVAEISHLMEKSMLPLDCSVGHEVGGKVGQGSIQLHIGNSGSLPCTSDNAILRRCSFGGNSMVSDISKCQLTGQQAPFTKRSHVWSLFEEMDVFRKMPQQPHFLPLKHHPLGLREGTALGLMWSYTDAVDNISKLCITDSMEIFEDHIKTLTILEENGFSVQSLQQILTE

SEQ ID NO: 164194 - protein, 68 aa, Oryza sativa
  Clone ID: PAT_MRT4530_63117C.1.pep
LFVAWRKIDRGRWARSGGDADPPRAAPPGRQIGLGGAIHPSAIAGEGKPYVTRLCCVVRVRLREDCRG

SEQ ID NO: 164195 - protein, 230 aa, Oryza sativa
  unsure (1)..(230): unsure at all Xaa locations
  Clone ID: PAT_MRT4530_63118C.1.pep
MREIISIHIGQAGIQVGNSCWELYCLEHGIQPDGLMPSDTTPGIARDAFNTFFSETSSGKHVPRALFVDLEPTVIDEVKTGPYRQLFHPEQLISYKEDAANNFARGHYTVGREVVDLCLDRLRKLADNCTGLQGFLVFNAVGGGTGSGLGSLLLERLSVDYGRKSKLGFTIYPSPQFSTVVVVPYNSVLSTHSLIEHTDVVVLLDNEAIYDICKRSLDIERPTYTNLXRL

SEQ ID NO: 164196 - protein, 530 aa, Oryza sativa
  Clone ID: PAT_MRT4530_63119C.1.pep
MREIISIHIGQAGIQVGNSCWELYCLEHGIQPDGLMPRDAICESVIPKPVALRVESLCLFCEANFISRRILVCDLLRCLVAPSLRYPNPWSYLTLACSDTTPGIARDAFNTFFSETSSGKHVPRALFVDLEPTVIDEVKTGPYRQLFHPEQLISYKEDAANNFARGHYTVGREVVDLCLDRLRKLADNCTGLQGFLVFNAVGGGTGSGLGSLLLERLSVDYGRKSKLGFTIYPSPQDISKSSSCMHIMSDTQISQCKISTAVVEPYNSVLSTHSLIEHTDVVVLLDNEAIYDICKRSLDIERPTYTNLNRLISQVISSLTTSLRFDGAINVDITEFQTNLVPYPRIHFMLSSYAPIISVEKAFHEQHSVPEITNSVFEPASVMAKCDPRHGKYMACCLMYRGDVVPKDVNAAVHSIKTRRTVQFVDWCPTGFKCGINYQPPTAVPGGDLAKVRRAVCMISNNTAVAEVFSRIDRKFDLMYAKRAFVHWYVGEGMEEGEFSEAREDLAALEKDYEEVGAEVEDDDEEQGEY

SEQ ID NO: 164197 - protein, 206 aa, Oryza sativa
  Clone ID: PAT_MRT4530_6311C.1.pep
MEDEAGAARKRKRRGEGKPRPKATKGGSKAKPKGKAAAAAAAAAATEEAAAAVEKVAAEPGVVVEKKQEEDYAEGITEESIAEVMSWLELEIKLASSAAAAGAAATPAPFAPPPPPPPAAGGGGYMPAAKGVNTSNMEGSCGASFSVSASTVMASVDLRAGAPPPPPLPWPLPGHGGGATASAAAEEAVDDDEWVDQLLTDGPAME

SEQ ID NO: 164198 - protein, 487 aa, Oryza sativa
  unsure (1)..(487): unsure at all Xaa locations
  Clone ID: PAT_MRT4530_63120C.1.pep
MAAAAAAAHVLVFPAPGQGHINCMMHFAXPASSAPVXRHLPPHRPQPPPPRWRRXPPAAADSPRLRFMSIPDGLPDDHPRAVGDIVELLESLRTNGSVPYRSLLASLVRAGDDGASSGGFPPVTCVVADGSMPFAADVAEEIGVPSLVFRTASACSVLAYLSVDRLFELGEVVLFPADGDLDEPVRGVPGMESFLRRRDLPGNFRNCTEDQNDPIVQMLIEVTAHSRGARAVVLNTAASMEGPALAHVAPRMRDVFAIGPLHAMFPVPAAAGSLWRADDGCVAWLDGQPDRSVVYVSLGSFAVISLEQFTEFLHGLVAAGYPFLWVLRPDMVGASQSAGALREAVAAAEKNNKARVVGWAPQRDVLRHRAVGCFLTHAGWNSTLEAAGEGVPTVCWPFFADQQINSRFVGAVWGTGLDMKDVCDAAVVERMVREAMESGEIRASAQALAREVRQDVADGGSSAAEFERLVGFIKELSNQHDGQFIQA

SEQ ID NO: 164199 - protein, 63 aa, Oryza sativa
  Clone ID: PAT_MRT4530_63121C.1.pep
NNESTYTQCTLYYEKTIICTYIFLQEHRLSLESHILTDQYSGHSRDIWKDITHCNFMFRIIQW

SEQ ID NO: 164200 - protein, 745 aa, Oryza sativa
  unsure (1)..(745): unsure at all Xaa locations
  Clone ID: PAT_MRT4530_63122C.1.pep
MVAHGVLPAKEIIGWRPACGEAFPTPNTHEVVVFSHFFYGGFSLPTSRFFRGILEFYRISLHHLNLNSIVHIANFVHACEAFLGIRPHFALLRHIFFLKLQPNKSKPCVVGGAGFQLRGTLSQKYFSMPFKTSNKGWHANWFYVQNPEPALPEYSCLPPTYQDTWNSLPMGDEAAQALILLERMLKLKEQGLQGEQITRHFIKSRLAPIKERSRTAFEFDGKNDPNREDPESLEFKIMKEKMYKIFSTDIVVSYSHLLPVIPYNAFNPPPXQASGSPKIQLTAQPSNLKPDVQSGSRKRKLVLXDDEGDNVGKASSKEAIEKQPKQANPKKKTSSRPMPKIRKSSRKPSDIDPSGKDPEPTDTETGPSKETGPTAEDRPGDNQPATDNVETSNEPPTGNQLAEAGVGADQEPPTGSRPKLRPTLIRSPQLAISRVQGSARPQPRIITGPMIGDEEEILRIQSAEDSRPPILVKWWDDEKQPQGIVINKQKQDEEVSLLAKTLNQATHLVNRIHLRNEAKTAALEKLVPHLGTLETTRAQLHETKELARKTEHDLRNRIAELQDSNFELSGSSKVQAVKITELEKRIKALEKDKGKLTKQRDSALKDVEVNKIKRLEGARDEVANAATPLVQAMFFNSNGPSSFNAAEIFDKLRIAPDTYFKNIKEAGSMGVSLALAMTKSLYPKIDIDAVDSFADEISEEAALDLINDAQKAADKIATDVVERFQDNDLRPTGSNNSDDEKTETD

SEQ ID NO: 164201 - protein, 348 aa, Oryza sativa
  Clone ID: PAT_MRT4530_63123C.1.pep
MAAEAGALMGADRREPEAGGGAAALGAVGIATVSVATTLAAVFQPPPGGLLADTFYRLALSGTFLGGMTLVGASVWVADNPAARRAAGKKLLYTAIPPLLAAMGLSVVALLCNATKKFSELAASCKWNLPWLRRRKEGPRSCIIFFRGRRLRPWRSRDSRVAAMCRLWGGDAAPRSRSSTDFRSPSPGFVFSGQPLAAPPVLGQDLVGIACGRKRLQQREREEVVVAASKRKQQVAAVVVRERRLRDDGVEATTAAGGGVEVEIIGDCSGGDGDEVATTARERKWRHRSNSSRQRRGRGSGDIESAVAGDGSDNIDAEESADTLDGFLISLLSSSPAIDRATALLDDH

SEQ ID NO: 164202 - protein, 95 aa, Oryza sativa
  Clone ID: PAT_MRT4530_63124C.1.pep
MDSVKTNCYSVGMDISRNSRGGGPQTVAASWEMRWRASAASQIEEGEYQIGRRLEQRPQADAIDNYTVFGRYSSSGEAGGGGGSVEAGVEGSPLP

SEQ ID NO: 164203 - protein, 90 aa, Oryza sativa
  Clone ID: PAT_MRT4530_63125C.1.pep
DNVVDDTEIIERAILGVMILSDLTGRMSGRFEDFDELQVTDVECQETTRLSSFDVMKRFVRNILSFNPNHFNPIYYCIDLQVVFFDRGVC

SEQ ID NO: 164204 - protein, 177 aa, Oryza sativa
  unsure (1)..(177): unsure at all Xaa locations
  Clone ID: PAT_MRT4530_63126C.1.pep
ELLTGPKPVVHTLPRGPQSFLPWAPPGLSEAKVNPWVVPRLXGVFPPKAVPKMAPVIALGVPYKGDFGPPMGFFVKVFNPLLNSRPNICPPSFPDAGERSGFWAPPAPFFLRAPGPPPPREGRLGFPGFPMCKNSVEMKRGALLLPVLFLPRFPDSCCCKLSPSPPILGSPPPLVVV

SEQ ID NO: 164205 - protein, 114 aa, Oryza sativa
  Clone ID: PAT_MRT4530_63127C.1.pep
MGPISQITSSTSRLSNAAAAATANRRTPWPSRVRLICAASEPELRRDPSTRIRTKRDSCAAAKVGVVEFLNGVGKGVETHAAKVEEAVGGDLQSLLHARTLRLKKLGIPCKQMP

SEQ ID NO: 164206 - protein, 500 aa, Oryza sativa
  Clone ID: PAT_MRT4530_63128C.1.pep
MASLQSGGDAAANGVDADVDGAASPPSAKRPRAGAGAAAITDAEVRAEFAHHDRAVARLNNGTFGCCPASVLAARARWQRLFLSQPDAFYFHHLQPGLARSRAAVAAAVGAGDASEVSLVDNVTTAAAIIMQHVAWSFAEGDFARGDVVLMFLYTYCSIKNSIHAYVARAGATVVEVPLPFPVSSPDAIVAEFRAALAVARDGGRRRVRLAVIDHITAMPTVLIPVKELVAICREEGVDKVFVDAAHAVGQVPVDVRDIGADFYASNLHKWFFCPSAVAFIHTRKDDPVSSKLHHPVVSSEYGNGLPMESAWIGVRDYSAQLVVPDVVDFVNRFDGGVEGIRRRNHDKVVEMGTMLAAAWGTFLGTPPEMCGSMLMVGLPGSLGVGSEDDAVGLRTMLRKQFKVEVPLYYNSKAAAADAPPEMVKDGNGDPVTGYVRISHQVYNVREEYEALRDAVAKLVADGFTCRKLRPPEKMTCKQRGDAPLRDENPHPIVIAKLLP

SEQ ID NO: 164207 - protein, 301 aa, Oryza sativa
  Clone ID: PAT_MRT4530_63129C.1.pep
MAWPTGCLGFEAAAAVCPAAFQAYQKYYDIVSAFSNVNTREGLAELSQVIDGMEGLRDAIFSDIPKLMSALDLDDAHRFSIFYDFVFFISRENGQKNISVQRAVGAWRMVLNGRFWLLDRWCNFVEKYQRYNITEDVWQQLLAFSRCVNEDLEGYDPKGAWPVLVDDFVEHMHRIYNSCDCSSAMESQLNISNTFGGINPLPGSKRKCPTRLKPNEDVDLSDNFTRSVHLAPLKRLKESPVITKYGVWEYNAGTPLVHSPSDYCDDANLHNPRGCLQNSPSIVEDCLSKGFEGCISMKCSF

SEQ ID NO: 164208 - protein, 44 aa, Oryza sativa
  unsure (1)..(44): unsure at all Xaa locations
  Clone ID: PAT_MRT4530_6312C.1.pep
LLFTRKDPINSFLSAAATIRSHXLSDALIACAKSIVLTLVADHF

SEQ ID NO: 164209 - protein, 57 aa, Oryza sativa
  Clone ID: PAT_MRT4530_63130C.1.pep
DVAYKPEEKFVKTRKCEPEAGANVVKSCERLRDEKGSIIEHTEVRSISPCHPYYLTV

SEQ ID NO: 164210 - protein, 212 aa, Oryza sativa
  unsure (1)..(212): unsure at all Xaa locations
  Clone ID: PAT_MRT4530_63131C.1.pep
KLGILVKILPQLDSSHNTVLWLVNNQVLKLVGSSRPNNKRSKKFSIAEDQMLVLAWLNTTLDEITGDEQHRDSYXARIHQYFHENKKFPSDRNQNSLNNHWGTIQEQINKFCGYYEQILNRPQSGMTVQNYITQASTLYKSXQKKTFFXMHCREILHHHPKWNDRLSQKKPKAHIDPLVRPYASTNFSEFLCSPDINISHPLVRPSGKVEKA

SEQ ID NO: 164211 - protein, 59 aa, Oryza sativa
  Clone ID: PAT_MRT4530_63132C.1.pep
CIPKLNLVGFLLALLPFFSLRRFDYGLLIHIITRDNVVEFTWREAGSEEPSVTFRRMQA

SEQ ID NO: 164212 - protein, 82 aa, Oryza sativa
  Clone ID: PAT_MRT4530_63133C.1.pep
NVCPLNAPWKLEVQGQCSPETLHPYLLLPLPDFFELRKPLLLQECLLSLLSHAPRRGIDRGGARGARGIRRGGRGGEWRRGF

SEQ ID NO: 164213 - protein, 40 aa, Oryza sativa
  Clone ID: PAT_MRT4530_63134C.1.pep
AVMPINTRPVGLVHGQSDVIIWCKALHSLLRGGVLCLRGS

SEQ ID NO: 164214 - protein, 47 aa, Oryza sativa
  Clone ID: PAT_MRT4530_63135C.1.pep
GTKKQGKTTLHSRVLSSNHGKKMCACSRLGKCQDPCLNATLVFNSVE

SEQ ID NO: 164215 - protein, 76 aa, Oryza sativa
  Clone ID: PAT_MRT4530_63136C.1.pep
LASKPMPFFPITTSLDAFFILSCTVLLDLNVPLGILYIIQMRLNVCIKSVSIEVRFNIYEIYYRCMGMMCCKFRGV

SEQ ID NO: 164216 - protein, 393 aa, Oryza sativa
  Clone ID: PAT_MRT4530_63137C.1.pep
MGTSQGVGILSMPYALSQGGWLSLAIFITIAAICFYTGILLQRCIDSSSLVKTYPDIGELAFGRKGRIAVAAFMYLELYLVAIDFLILEGDNLEKLFPNASFFSSFHRIAGGTRQGFVLLFALLVLPTTWFRSLDLLAYVSLGGVLASAILVASVLWVGAADGVGFREGGVAVRWGGVPTAMSLYAFCFSGHAVFPMIYTGMRNRRMFPHVLLICFIICTLAYGVMGVIGYLMYGGSLRSQVTLNLPARKLSSSIAIYTTLINPFTKFALLITPIAEAIEGVLGLGTATTGGKPAQYRAAAVSVSVRTALVVSTTAVALAVPFFAYVVALTGSFLSATATMLLPCACYLRISSRASGKLGVLEIVACVGIIVLGLGVIVIGTYSSLKQIVQSF

SEQ ID NO: 164217 - protein, 189 aa, Oryza sativa
  Clone ID: PAT_MRT4530_63138C.1.pep
MASLSSVLVGCFLLAAAVFLHRNGAFTTTTTTHLHFYMHDAYTGPAPTAMRVVSGRSLLDGDNGNGNGNGDDGSPPRQFGDIVALNNALTEGPSAGSARVGTAQGFAVRVSEGGVLSDLSLHMVLEAGEHRGSSVTAKGRIDMDAGERESVVIGGTGRFRLARGYMVTKNYDYSLATGGIVEIDLYLKH

SEQ ID NO: 164218 - protein, 36 aa, Oryza sativa
  Clone ID: PAT_MRT4530_63139C.1.pep
PTRGALLALILPSICGIYPTYYIAPRSIPPVGGVWY

SEQ ID NO: 164219 - protein, 912 aa, Oryza sativa
  Clone ID: PAT_MRT4530_6313C.1.pep
MSRSYTNLLDLAEGNFAALGPGGGGGGRRRSGSFGLKRMSRVMTVPGTLSELDGEDDSEHAATNSVASDVPSSVAGDRVIVVSNQLPVVARRRPDGRGWSFSWDDDSLLLQLRDGIPDEMEVFFVGSLRAEIPVADQEEVSQALLDRFRCAPVFLPDPLNERFYHRFCKRHLWPLFHYMLPFSSSASPSPSSSSSSSSSPSSSSGSGHFDRGAWEAYVLANKFFFEKVVEVINPEDDYVWVHDYHLMALPTFLRRRFNRLRIGFFLHSPFPSSEIYRTLPVREEILKALLNCDLIGFHTFDYARHFLSCCSRMLGIEYQSKRGYIGLDYFGRTVGIKIMPVGVHMGQLKTVLSLPDREWRVSELQQQFEGKTVLLGVDDMDIFKGINLKLLAFENMLRTHPKWQGRAVLVQIANPARGKGKDLEAIQAEIHESCKRINGEFGQSGYSPVVFIDRDVSSVEKIAYYTIAECVVVTAVRDGMNLTPYEYIVCRQGSDSTSEVNGPKKSMLVVSEFIGCSPSLSGAIRVNPWNIEATAEALNEAISMSEQEKHLRHEKHYRYVSTHDVAYWSKSFIQDLERACKDHFRRTCWGIGLGFGFRVVALDPHFTKLNMDSIVMAYERSESRAIFLDYDGTLVPQTSISRTPSAEVLRIINTLCSDRRNKVFLVSGRRRDKLGEWFSSCPDLGIAAEHGYFLRWTRDEEWQTCTQTSDFGWMEMAKPVMNLYTEATDGSYIDPKESALVWHHQDADPGFGSSQAKELLDHLESVLANEPVSVKSGQFIVEVKPQGVSKGVVAEKILVSMKERGKQADFVLCIGDDRSDEDMFENIADTIKKGMVATNTSLFACTVGQKPSKAKFYLDDTFEVVTMLSALADATEPEPETDLTDEFDELAVSVSSVDIDDEQTPSDKLIGG

SEQ ID NO: 164220 - protein, 56 aa, Oryza sativa
  Clone ID: PAT_MRT4530_63140C.1.pep
IQRLPQLSKLVQHKSQGGLEGHFGQCGAYVFCHAYAAGNIAAMATTTTTTNVAATG

SEQ ID NO: 164221 - protein, 59 aa, Oryza sativa
  unsure (1)..(59): unsure at all Xaa locations
  Clone ID: PAT_MRT4530_63141C.1.pep
MEQSFIMIKPDGVQRGLIGDIXSVRFVKKGFYLRGMKFMKVGRAFAQHFYSHLYDKPFF

SEQ ID NO: 164222 - protein, 90 aa, Oryza sativa
  Clone ID: PAT_MRT4530_63142C.1.pep
WRLAEYVCTHPCSINFFRKELESIIFMPCCCQVRDDGLGTIGSPVVACGIRWTAAASLPLSYLLLSVFCIVHDHAWSILGPVWATLVLLL

SEQ ID NO: 164223 - protein, 116 aa, Oryza sativa
  Clone ID: PAT_MRT4530_63143C.1.pep
GGAAKTRGRRAARGATRRRRRWHGALLRPPSSLRLHVHPLELEKTNLLFPGTLYPLLPGIVLCSRKMAKKKNPIVFMDVSIGDEPDERMFFEVPCGSSYVLHYYCVVKAELCFHTF

SEQ ID NO: 164224 - protein, 49 aa, Oryza sativa
  unsure (1)..(49): unsure at all Xaa locations
  Clone ID: PAT_MRT4530_63144C.1.pep
NSNMXTSNIQYKGRQYPGWFFYHNQTMENTHTTILKMFCKYRKWLKVTN

SEQ ID NO: 164225 - protein, 157 aa, Oryza sativa
  Clone ID: PAT_MRT4530_63145C.1.pep
MATNIIFVGQSLGVRNTIFLGRSLQSPRTRNQPTCGPAHSVVLLLSPTLNVGRPFFLCPLPQSGSLSISPVSAVSTGKCGRSPSLPSPVISEGRDVEDADPNLPGFFKNPSRLSDNEIGEDGLPLAAEPDGFLGHDEGGDAPSEFDIAAELDDLDIA

SEQ ID NO: 164226 - protein, 59 aa, Oryza sativa
  Clone ID: PAT_MRT4530_63146C.1.pep
MAHVMHIRANVYLAMSFWSSFSSSVGGSGAGKDLTASGSGVRWWDGKRIKGGVACPLVT

SEQ ID NO: 164227 - protein, 37 aa, Oryza sativa
  unsure (1)..(37): unsure at all Xaa locations
  Clone ID: PAT_MRT4530_63147C.1.pep
ALEWSEPERINQRGKKTXNRTRKGLIFGMVLRITPPR

SEQ ID NO: 164228 - protein, 124 aa, Oryza sativa
  unsure (1)..(124): unsure at all Xaa locations
  Clone ID: PAT_MRT4530_63148C.1.pep
PRQVHAGMPVARRSXGNSSFGNVSNGXRIRCMQVWPIEGIKKFETXSYLPPLTVXELLKXIXYLLRSKWVXPCLXFXKVGFXYRXKHXSXXGYYNGKYWXHXNCPCFGCTDPTQVLXELQESRE

SEQ ID NO: 164229 - protein, 67 aa, Oryza sativa
  Clone ID: PAT_MRT4530_63149C.1.pep
RHPGGLKKSQKIYGGNLLPPTLKVFNPSGPQETSTFQKKANTILPWPNSNFFEKTQAEPWITQGPLL

SEQ ID NO: 164230 - protein, 1117 aa, Oryza sativa
  unsure (1)..(1117): unsure at all Xaa locations
  Clone ID: PAT_MRT4530_6314C.1.pep
MEGYTCWVKHGEQESGSGAAADRSGPRQPGNDIDVFLEPVIDDLEILWKEGVETWDAYGQENFKLRVLLFCTINDYPALGNLSGQTIKGKKACSDCKEHTRSRWLKKSRKMPAPKDLSGDEVHNMVKDISNEFGKKRKRSKTKEKEKNVCESLVGLMLNIPGKTKDGLNARLDLQDMNIRSELQPIRDAETGKVYLPPACHTLSKDEKIAMLSCLKDIKVPSGYSARISKYVKLNDLKLVGMKSHDCHMLITQILPVAIRGTLPPKVRHTIQCLCAFFNAIGQKVIDPEDLDGLQTDIVNTLCHLEMFFPLSFFDIMVHLPVHLVKQTKLCGPAFLREMWPFERYMGVLKSYVRNRAKPEGSIIEGYTTKEAIEFCVNYMFDADPIGVPASRHEGRLSVSRLLRTLAPPPTPPSPPSSSLAATTTETAATATEPAATAAEPAATATEPAASTEPATTATEPAASTEPAATATEPLHRPTSAFLVVAACLFTDTNSSPHRGRRRPSSSSSPTPHRRPTPPARRRPPRSASTPTGAAAVNSSFTEPAACTEPAATSTDRRRPPPSPPPPPPSPPPPADLMSICGVIGRQKFIILQDDFKLVPAVEKDIAWLTFKESFDYPAEHEDRLRRAAFKVMGTAWKNFKTKLVGEFVYNPANPDPREKFPWITEQVXHPHRLGTAGYAGKEEEWQREDEEAKESXTPLVFGDIPHPRARNWARARYQKHDDGTIFMPNKELVAEQQASQEACSQRREDDLLTKALGNKEHRGRTRGVGSSVPWKYGFPDYAWQYKKRTSNKAKKDARLEAKIRESIRAELTSEFDEKLESMRAKISAIDHITEPTSCTLTVRVMPIFTVPAAEGLAYKPTPETRVHGAQLRADCAKVQVDSVKPEYELFPLKYPPNDEVLSLGNARGTFIQWPKDLIEIRVTARPTTAPGGRPPKRPASAPSAPPAQDRHAQSYDVQLQYDTDFGEDRTEADSKAIHEPPPMKKSRKAHSSPQRITLDKPEAKGRGRGGKVQASLLAPRKLDLGKGQEETKGKEVKKKYVTPQEFQLGMPLVGDDVLAAMGTACKDLHLYYMEKSNARKPSKATNILGQHDGKPFLGPTNYIVVDFKDLFDLYRL

SEQ ID NO: 164231 - protein, 405 aa, Oryza sativa
  Clone ID: PAT_MRT4530_63150C.1.pep
MAAWADAALLRASSSPASATAAASSSSSSCCLARPRASLESRLHRRKSFLYTSSPKSGFLINSCRARSLKVKAKMDSGDGLTRLAPLMFETPSGQLLVQILQSHPHLLPATVDQQLENLQSEKDAQEKEASKVPQDLLYKRIAEVKEKERQNTLEEIIYCWIIYKFMENDISMTPALAPLGGPVRDISSLPNQEDRLQSIHSPDALEMIQNHLNLIMGEKVAAPLDTVVEISNLNLGKLYAASIMYGYFLKRVDERFQLEKNMKTLPPNPKQQIVLENLKPNPFWDMESLVQITPDGEEIDLDDEESNPNKLRSYVSRLDADTLQRYATIRSKEAVSLIEKQTQALFGRPDIKVLDDGSVNAKDGQMITITFIELTHLVLEAAAFGSFLWEAESHVESKYHFVNS

SEQ ID NO: 164232 - protein, 130 aa, Oryza sativa
  unsure (1)..(130): unsure at all Xaa locations
  Clone ID: PAT_MRT4530_63151C.1.pep
GVXLQSYYFFCXPXXLLXCXXXTXGCXLXLTPNNXXQGKTXMXMMAKXAIIDPRFXCFPKTPXPGEXXEXXKXSPLXPXXXXXPPXXFPXXSPTWXGDPLPQXPFXXFGXXPXSEXXXXXPXXXXKXPXN

SEQ ID NO: 164233 - protein, 360 aa, Oryza sativa
  unsure (1)..(360): unsure at all Xaa locations
  Clone ID: PAT_MRT4530_63152C.1.pep
TIEVLKLACLQVDSRGSPIIAFLISIVSKRFRILSRNIQNSMGELTVTTEQMLKGHKVVLSFGGQKVEKARFDRVSNDMRRKGMKIVSADGISDGLVQLIASLALSAVLYVATFPEVMSENLTAGSFTVVFSSMMAMLRPLKSLTSVNSQFQRGMAACQTLFEFLDLKTEKNNGTKQVERAQGCITFDNVIFSYEGKEEQALNQVSFTIPXXXXXXXXXXXXXXXXXXXXXXXXXXXXXXXXXXLDGVNIEEYTLENLREQCSVVSQQVHLFNDTIANNIAYAAKDKYSRAQIIAAAQAAHAMEFIEKLEQGLDTVIGENGASLSGGQRQRLAIARALLRNAPVLVLDEATSALDTESEL

SEQ ID NO: 164234 - protein, 102 aa, Oryza sativa
  Clone ID: PAT_MRT4530_63153C.1.pep
ARGAKLLDKRTKAADEAFAANNVPASQSKSTSPAIEVDSNHTLHVKKLRLGVCKSFVKLSKGQDALRECGAFLEMEEGSLEGLVQRAEARLLVEDFEGAVAD

SEQ ID NO: 164235 - protein, 128 aa, Oryza sativa
  unsure (1)..(128): unsure at all Xaa locations
  Clone ID: PAT_MRT4530_63154C.1.pep
ADDGGARSLDKTGYAEEDDGDVNAAIFVKYDRMLHGQDRRRGKKSKQDRLTVKFLKKYIHYAKNLIQPRLTDEASDHIATSYAELRDGGANAKSGGGTLPITARTLEXIIRLSTAHAKXKLRHEVLXT

SEQ ID NO: 164236 - protein, 157 aa, Oryza sativa
  unsure (1)..(157): unsure at all Xaa locations
  Clone ID: PAT_MRT4530_63155C.1.pep
IGGAGLAGAATPAHPXIRQGREGRRGRVGVVAADGVEVQRRQMVGGXGGGGGWWERPPSARSGGPTXGREGNGGPTAAAMAPSPPPDPAGXGGGGGGLRRAGASGHGGGSYDNDDGDGGYDDDDDADGGCDENDEQXPPPTAPPASLSASRVLARQR

SEQ ID NO: 164237 - protein, 126 aa, Oryza sativa
  unsure (1)..(126): unsure at all Xaa locations
  Clone ID: PAT_MRT4530_63156C.1.pep
WRGGATAADGGRVGGGGGWWERPPSARSGGPTXGREGNGGPTAAAMAPSPPPDPAGXGGGGGGLRRAGASGHGGGSYDNDDGDGGYDDDDDADGGCDENDEQXPPPTAPPASTPQXTNFGSARVVF

SEQ ID NO: 164238 - protein, 526 aa, Oryza sativa
  Clone ID: PAT_MRT4530_63157C.1.pep
MDGSHGSAAALRATGRCLAPLIIPASCVVWVLFFFPSPSPDVAVRRDGFLPAVTLPVQRAGDTPPPPPIIDASPPPPSTSPPPPPPRRGRPARRDRCAGRYVYMHELPSRFNSDLLRDCRTLSEWTDMCRHVANGGIGPRLPPAARGGVLPATGWYDTNQFTLEVIFHARMRRYGCLTADASRAAAVYVPYYPGLDVGRYLWGFSNGVRDLLAEDLAEWLRGTPAWAAHGGRDHFLVGGRIAWDFRREDGGGEGSQWGSRLLLLPEAMNMTALVIEASPWHRRTDVAVPYPTYFHPWRPSDVSSWQRDARRARRPWLFAFAGAGRGNGDDHDRHHGGGVVRDRVIAQCARSRRCGLLRCGARGRRDDCYDPGNVMRLFKSAAFCLQPRGDSYTRRSVFDAILAGCVPVFFHPGSAYTQYRWHLPRDHAAYSVFVPEDGVRNGTVRLEDVLRRVSAARVAAMREQVIRMIPTVVYRDPRAPSARGFTDAIDVAVDGVIERVRRIKQGLPPGGDDDDDHRWDAYFDTQ

SEQ ID NO: 164239 - protein, 56 aa, Oryza sativa
  Clone ID: PAT_MRT4530_63158C.1.pep
SLGVTVGGLSRPPMASASFCRPSRVGAKGSSVWVLLCFSGMQAYRFNGCLSPRRPT

SEQ ID NO: 164240 - protein, 100 aa, Oryza sativa
  Clone ID: PAT_MRT4530_63159C.1.pep
MEADSGKLFVGGISWETDEDRLREYFSRFGEVTEAVIMRDRNTGRARGFGFVVFTDAGVAERVTMDKHMIDGRMVEAKKAVPRDDQSITSKNNGSSIGSP

SEQ ID NO: 164241 - protein, 1457 aa, Oryza sativa
  Clone ID: PAT_MRT4530_6315C.1.pep
MTHHSTITRVSQIGSKLFLSPATVSCLLRTLAQSSFSIAEPAAVATEPAAAATEPPPPSIRTAAASSPTTPTEPTAASTEHATASPAQPPLTPVTPSTEPGAAAIEAAAAANSSFADSSLAEPEAAATEPTASTEPRTPDAASTEHAAASTEPPTPNAASTEPGAATTDPGGAATEPAASTEPCVDPQTISQQGESMSTTTSGSSRARTPRTGNIIPKERFHITAVDQVGLPTSPRKILSRFRSIYGVIGRQKFSILQDDIKHVPATEKDIAWLMFKLSFDYPAEHEDHIRRAAFKVLGNAWMNFKTKLVGEFIYNPANPDPKEKFPWIMEQTKNQHPHRLDTAGYAEEYNSNLHKSTPESRASSEAYRLLQTKNLHPHRLGTAGYAGKEEEWQHEDEEVEELNTPLVFGDIPHPRARNWARARYQKNVDGTIFMPNPDDQRVYEAIELVAKQQASQEACSQRREDDVITKALGNKEHRGRTRGVGSSVPWKYGFPDYAWQYKKRTSNKADKDARLEAKIRASIRAELTSEFDKKLESMRAKIRQEIREEQQNPLAAAAAAHEELESPTQKRSSCASTELAENPTSVDSAVDHITEPTSCTLTVRVMPTFTVPATEGLAYKPTPETRVHGAQLRGNCAKVQVDSVKPEYELFPLKYPPNDELQYDTDFGEDRTEADSKAIHEPPPMKKSRKAHSSPQRITLDKLEAKGRGRGGKEFQLGMPLVGDDVLAAMGTACKDLHAYYMEKSNARKPNKATDILGEHDGKPFLGPTNYIVVDFKDLFDLYRLRAVDTSLLKCYSFNAHWILLVITPKWSSCHYLNSRIDKNAYDSTPIQLAIDEAWAQYVQRGGLRKTGHDTLIHKKVFPVKQQIGDQCGFHVCHNMRLLYREKVKTLAEFEGIITKSLPTSFEEQAWLAKMQGLVGVFFLGEANDTEAGVFVSGGGRRRGGGSMRVSGARESGAGAGECGGGGGVWDGGEEDGAAEDGQGVAAAGRGGYNRPYQAVDRTAKILAVAAFFLTLCIVWKVRRLRVRLLLARSPGEAAHVPSNDKVFVYCSSAHLALFVVVLTLNSSCDATVEQHIGLMQDMLLLPQVIGNAAWRVNCKPLRGASTSASPSRACSRACMTSCDHVRWRVPIVLALPPNTLAADALLFSHGSDLVRHRSRPPRLPPPSSRLARHGVDVVLGSGCGGAGLADGRRPASTSLATPSLAEAMAATPGSKDVEASTGTAASTVVVIAMASDAGKLSLWALVKVCEKKKMWGPPVSPIILEVGGSGANRHRIPPFPWDDLDWQRRVEELVGDGLVVPALSVAHDTRAEPHHQHVELHLAQRVVAVLVAFLHHGCRLLHRNLATDSAAPQPQHTRRASPQALRGDGATRQVEGVGGRGGVGASAKEGLSPGGGRDPARTMMGGVPCRPLKGKGGKRGSPYRHGGSRRPAEHTVGARKGGHHETQLYRCNICK

SEQ ID NO: 164242 - protein, 472 aa, Oryza sativa
  Clone ID: PAT_MRT4530_63160C.1.pep
MEADSGKLFVGGISWETDEDRLREYFSRFGEVTEAVIMRDRNTGRARGFGFVVFTDAGVAERVTMDKHMIDGRMVEAKKAVPRDDQSITSKNNGSSIGSPGPGRTRKIFVGGLASNVTEVEFRRYFEQFGVITDVVVMYDHNTQRPRGFGFITYDSEDAVDKALHKNFHELNGKMVEVKRAVPKEQSPGPAARSPAGGQNYAMSRVHSFLNGFNQGYNPNPIGGYGMRVDGRYGLLTGARNGFSSFGPGYGMGMNSESGMNANFGANSSFVNNSNGRQIGSFYNGSSNRLGSPIGYVGLNDDSGSLLSSMSRNVWGNENLNYPNNPTNMSSFAPSGTGGQMGITSDGINWGGPTPGHGMGNISSLGLANLGRGAGDSFGLPSGSYGRSNATGTIGEPFSAPPNAYEVNNADTYGSSSIYGDSTWRFTSSEIDMPPFGNDLGNVDPDIKSNIPASYMGNYTVNNNQTSRGINS

SEQ ID NO: 164243 - protein, 176 aa, Oryza sativa
  Clone ID: PAT_MRT4530_63161C.1.pep
MTIKRKDDGQVVKQSVKAVGGGLLERVDSDDEEIVGRVPEFGLALPGTSTSGRGSVRVAGDAAATAAGTSSSSPAAQAGVAGSSSSGRRRGRSPADKEHRRLKRLLRNRVSAQQARERKKAYMSELEARVKDLERSNSELEERLSTLQNENQMLRQVLKNTTANRRGPDSSAGGDS

SEQ ID NO: 164244 - protein, 56 aa, Oryza sativa
  Clone ID: PAT_MRT4530_63162C.1.pep
MGCVWAAPNVAGFSDADGAFARQDKGAFSTVRFTSDGGDDHIKKLRPGVATVIGNG

SEQ ID NO: 164245 - protein, 160 aa, Oryza sativa
  Clone ID: PAT_MRT4530_63163C.1.pep
MGSGHSHPSHPNHRLRREKCSTQGAMCGLCHRRIKLGEMAYRCAAAEHFSCHRLDLTARADGGGVVPAGSSCDVCARSLDGYSHVGGGETAWSYRCSACPDVELCLQCAMGRDGDGNGDDTTCLCGGADAGQGAVCAGIVAGKFIKGLMWGMGCGCGTPI

SEQ ID NO: 164246 - protein, 121 aa, Oryza sativa
  Clone ID: PAT_MRT4530_63164C.1.pep
PPERAKRGGNTTSGRPKRARTRGGPPNRQAVKLLGKKNGGGPGAKTPKGKKGKARQAPKVGNARGLPGNGGEKKRSRELNGRGTERKESEDGRTGTQAWDLKKGRPIVSSFFFFFFFFFVF

SEQ ID NO: 164247 - protein, 67 aa, Oryza sativa
  Clone ID: PAT_MRT4530_63165C.1.pep
MGDRHRALGIGGIGFWGHAASGSSVGGVGVRGVRREERIEGRTVAARRKPNMPATACLCQPAASQPI

SEQ ID NO: 164248 - protein, 93 aa, Oryza sativa
  Clone ID: PAT_MRT4530_63166C.1.pep
MAGAETRLAVGAEARPATGHPVRLLRHRSPGSAGKLRLNSRTLGSPLSFFLPAAPAPAPARTEPRFRMRTDDFSPHENPFSGSQAMGEIASQQ

SEQ ID NO: 164249 - protein, 229 aa, Oryza sativa
  Clone ID: PAT_MRT4530_63167C.1.pep
MLLLLPSARAFVISAAHAVADCHPRYAIAFWFHTTRAPRTSCVHRKGSCVHQMAAEFVDQSSPYNFQRTAAGRLFYSITMHDVCNHDNTEMADGTHRRTKMFNPDRLDDKLRTVKYYCLQLTTSNEYPTSEVINYRPRIVPSPTSLATNRRGEGAPERHRKIDVGPDMLYRNDEDRAGRSNQRQGGGYALLNAKTHGAKLNFFVPICGLSGTKLLTRVGFCDGHDTKEA

SEQ ID NO: 164250 - protein, 233 aa, Oryza sativa
  unsure (1)..(233): unsure at all Xaa locations
  Clone ID: PAT_MRT4530_63168C.1.pep
MEITLRRRRRSSATTTTGTSSPAAAARRRRDPAAATSSSPAATSLRITALALASPSAETQAAPPPPRRSQSTSPRASXRRQHPRAGLPGRALPTTPTTTTSPRRRRRRRRSTTSTTGPSSPAAAARRRRDPAAATSSSPAATMVRRTTPTTSSPTSTSTYSSTATSIPPSPHPPPPPVTGTATTSPRPRSQKPATCPHSSVSRTPRPSILRSTASWSARRQRRRRAPPLAVPG

SEQ ID NO: 164251 - protein, 123 aa, Oryza sativa
  unsure (1)..(123): unsure at all Xaa locations
  Clone ID: PAT_MRT4530_63169C.1.pep
RSQPKPSRPPTCMRRPKPTPTLETDTATPXSASRQSKATAITDTCTTTPPSYKPQTKPNPPPTYKLAXKPNPSPTYRAAPATYKPQAKPNPPPTYKPKAKTTATAYTTPTYKPQPKPLPVPLA

SEQ ID NO: 164252 - protein, 579 aa, Oryza sativa
  Clone ID: PAT_MRT4530_6316C.1.pep
MDQSTIDRSWMYAKNLKRHSTEYRKDVINFMNAAEEDRIRRNSDYMCCPCADCKNKNMFDSGEDVHGHMIQRGFMEGYTYWVKHGEQESGSGAAADRSGAHNQEDEDEHDMFIPSLLGGEMVDVDHNLLQDILRDVEDPAQNERDGMKFIRLQYADLDACPVCKASRYKRKKSADEGNKSKRGGPAKVVWYLPIIDCFKRIFANPNKAKLVQGNPAMISMYSWSLLSTIWRFFGKKLQYDTDFGEDRTEADSKAIHEPPPMKKSRKAHSSPQRITLDKPEAKGRGRGEKVQTSLLAPRKLDLGKGQEETKGKEVKKKYVAPQEFQLGMPLVGDDVLAAMGTACKDLHLYYMEKSNARKPTKATDILEEHDGKPFLGPTNYIVVDFKDLFDLYRLRAVTQASLSWQWCQKHAPEVAFLDPQVVTVTNLQNDRQGMVNYIYDTLWSRREKQYIMCAYNQYAHWILLVITPKWSTCHYLNSRIDKNAYDWTPIQLAIDEAWAQYVQRGGLRKTGHDTLIHKKDFPVKQQIGDQCGFHVCHNMRLLYREKVNTLAEFEGTITKSLPASFEEAMINTYYATVMM

SEQ ID NO: 164253 - protein, 1347 aa, Oryza sativa
  Clone ID: PAT_MRT4530_63170C.1.pep
MDAAVQEAKLLRQVNALIVAHLRDHNLTQAAAAVAAATMTPLAPPEPDGDDSVPANQLLRLVAKGLAVEREETGRGGGAFDSAAAAAGYGGLLPPLGTNAVDFSTQDVKGSSKSFPKHEARHVSDHKNVVRCAKFSPDGKYFASGSGDTSIKFFEVAKIKQMMLGDSKDGPVRPVIRTFYDHTQPINDLDFHPESPILISAAKDNTIRFFDFSKTVARKAFRVIQVWRFNSYPFKNIVVSGHPQRPTNPFKQDNSIYLFSTTSVYVKDILYGTDHPVAHLYDINTFTCYLSANSHDSNAAINQVRYSSTGSLYVTASKDGSLRIWDGISAECVRPIIGAHASAEVTSAIFTKDERYVLSCGKDSCIKLWEVGSGRLVKQYVGAVHRQFRCQAVFNQTEEFVVSTDEQNSEVVVWDALTAENVARLPSGHTGAPRWLGHSPAEPAFVTCVVHLYMLLKLYTDDTVPNLVGKFWLLLAFMKPDVYSTVVVHGDDDDDDARGGGGGGRHALAEDDEEEDPSSLPPLLQRLPKDFGGGASFDEYDDPYSSDLDDASLSATVVVKRGAPASTSASSRSPFLDLRRSSPRAAEVDPYSTFVVHGTARSGGASSPRESASGTFVRRSGGSSSPRESVSGTFIRRTGSPSSPHESISGTFIHHTSGASSPRDTAQGGGGFGSSFWSPAVGQSEELRQPALLVQQQHQQQQNSRRKPSVSSVPESVTREDPSTKYELLHELGKGSYGAVYKARDLRTQELVAIKIISLTEGEEGYEDIRGEIEMLQQCSHPNVVRYFGSYQGEEYLWIVMEYCGGGSVADLIGITEEPLDESQIAYICREALKGLAYLHSIFKVHRDIKGGNILLTEQGEVKLGDFGVAAQLTRTMSKRNTMEQGMYLWLVPQISPHKYPHRPFSHVSNHSAIALRFSAMRIYFFASRHEVREFIGTPHWMAPEVIQESRYDGKVDVWALGVSAIEMAEVIFMISSEPAPMLEDKEKWSLLFHDFIAKCLTKDPRLRPAASEMLKHKFIEKCNPGASKMLAKIKEAKKIRAKVAAETELSGPDSTMQDATVRINDDFGETVPTNPQQQTNHETYDGGAGDFGTMIVHPEDGDEVDESPIFPSSEFIPGLGSINSFTHDPKRAELISNFWAENTADIEANKEQYLDEHPDMQEAKTMPPSTGTVKKLKVAEGTMPRHGNQVSSASPGVASTMTKLNSSPSRKAFSVQDKLWSIYAAGNTVPIPFLKAIDISPLALVSDSVVGNGLAGSNRTDALEAVRELFSGDGQTKKGRKGQNEVPLPPGVHHRLTTSPTLMNLAQALAYHKTCYEDMPLQDSQATQEQQTIQNLCDTLRTILRL

SEQ ID NO: 164254 - protein, 108 aa, Oryza sativa
  Clone ID: PAT_MRT4530_63171C.1.pep
IFKVHRDIKGGNILLTEQGEVKLGDFGVAAQLTRTMSKRNTFIGTPHWMAPEVIQESRYDGKVDVWALGVSAIEMAEGMPPRSTVHPMRVIFMISSEPAPMLEDKEKW

SEQ ID NO: 164255 - protein, 999 aa, Oryza sativa
  Clone ID: PAT_MRT4530_63172C.1.pep
MGEGSGAVVARGASSAAGEGGRSHAAAQGKEAAQGGKRRAGGTEERLGTGEEGGKPMGGGAWDGAEGLDRWEMLSSGARWQPRRSGWAEWGGDARPARSPPPRRRRPDVAAGWRGEGTSRVRGRGEKGTTHGGAEGEGAVVAPVRTADAVPARNAVAVAGGLATRGVERDAGQVVAREEKRHGGELGTKRGLEERAARSPPPPPPPKRRAVSAIRQFPPGCGRDAAAPVARGRGCDGGVRLLDEATAAPLAGSKDDSAVPGVVEKVASVDGGDSMANAHHHHHAMMDTVLMKSSHVSDENQVARKVGSLENGAEGSARGKGGHGGELLGRKEVLAQAANLLPKRRIVSATRRFPPGCGRDAVAPLAHREESKVGSSLEAMPVDAGWGVSKEVVTTDGRNNSVNQCASNIVGTVKCQELEEGEVAAEACCDVESQKVAGHGEKLESAVPVTSAVTEVLTRCGSDEMEGCSYAAEATEKHLSMGGKCSIGGPFNEIVHGKRVLGSDGIKREVPSLAMEDHGSIAHDQELVEVELTTGDHIQEAQVATTVNPHESTISRHEAAVSANTAPEVSIRHFSSVKNGNTSQHEETIYASAAADVVKVMNKCKGTKSKAAAEPWAEGPSKEHFKAKRECEKDGMKKSSMNVPTEVFRDGIMRTKLLLTARKAVKPPLNTLHIPFSMGKEESVVTNSASFGPKKKVKVKSPHESKGIPMKIVSTSGLAGKDNLINEKALSLEDDDILKALAVHNGKLELYLNVPSCVERHRQHGSENGNDRSKIRMLCRRFQFICNALLHAVEQGSLMVRRIDLEADKIIRKLPGFTKHGPTVGNVRGVEVGDEFLYRVELALVGLHRPYQGGIDTTDHNGVLVAISIVASGGYPDELSSSGELIYTGSGGKPAGKEKHEDQKLGRGNLALKNCIKTKTPVRVIHGFKGQNREDVSHSRAKQILTFTYDGLYLVLDCWREGLKGSRVLKYKLQKIPGQPKLPLHIAKYQNTRLGSQGW

SEQ ID NO: 164256 - protein, 83 aa, Oryza sativa
  unsure (1)..(83): unsure at all Xaa locations
  Clone ID: PAT_MRT4530_63173C.1.pep
SNLYVLTTKFGNISIGKEDXDRSGAEIDSRIEQESTRVRIGYDQDRLGPSQTGDMFGQKSAAKTYGILEFVRDKNRVRYGRSL

SEQ ID NO: 164257 - protein, 39 aa, Oryza sativa
  Clone ID: PAT_MRT4530_63174C.1.pep
MARPRPGDFGPAQWAARAFGTAWHGPTSDGSSLDLRCNP

SEQ ID NO: 164258 - protein, 115 aa, Oryza sativa
  unsure (1)..(115): unsure at all Xaa locations
  Clone ID: PAT_MRT4530_63175C.1.pep
HHNSCTSTHTVGCHHSIISPQGTPXXSSSHKFGTKYSGNFLHADCHFPXQGAQSQQWXMSPAQXSQSIXPTXTPRGCAAQWCARVGAPGVKWGGVITKTPTKPARTQTRIHXPPP

SEQ ID NO: 164259 - protein, 86 aa, Oryza sativa
  unsure (1)..(86): unsure at all Xaa locations
  Clone ID: PAT_MRT4530_63176C.1.pep
PSGGTTRSPDMPPPPRRQDPEPASSLAPPPXXARRSASHDLAPGGMPKPHTRHGTTLLTKLKNTRKYYQITPNVTSSRAADQISSV

SEQ ID NO: 164260 - protein, 91 aa, Oryza sativa
  unsure (1)..(91): unsure at all Xaa locations
  Clone ID: PAT_MRT4530_63177C.1.pep
MPLAAHRLAGGACGASGAFLIVGSCSSSLDVMHRTRLRAVVQCTTDGCRHLACPNDRLNHSRQDRRSXXITATTIHSLHDQHKLYNTNFNI

SEQ ID NO: 164261 - protein, 90 aa, Oryza sativa
  Clone ID: PAT_MRT4530_63178C.1.pep
MGAGMSSGRRPSFYCGGGGGGVGRPRGMLTLLALQVLLEYGRAGASRPPVTAALLAANALLYLPPGFLDALLPLVNRVGFNPYLIIYFWD

SEQ ID NO: 164262 - protein, 101 aa, Oryza sativa
  Clone ID: PAT_MRT4530_63179C.1.pep
SVRTSPRTSGSRRRRDGGRARAGGGRPAVAGWRRPGAGWRRPGAGWGGPAGWRTGGGGPAWAGGMEAGRRRPRPPLPQIRPEGKRRDGWLAGGGMGGRQVS

SEQ ID NO: 164263 - protein, 484 aa, Oryza sativa
  Clone ID: PAT_MRT4530_6317C.1.pep
MVDVDHEVLQDMLRDVEDLAQNERDSMKFSRLVSDSKTPLYSGCKAKHTKLSVTLDLMKLKPSSGWTDRSFTDLLGILKAMLPAENILPETTYEVKQVMCPLGLEVRRIHACPNDGILYHKQYADLDACPVCKASRYKRKKSADEGKKSKRGGPVKFVWYLPIIDRFKRIFANPNEAKWLPLRHAFRRKKKIFNGKRELQPAPKDLSGDEVHSMVKDISNEFGKKRKRSKIKEKGMWKKKSIFWRLPYWKDLDVRHCIDLMHVEENVCGSLVGLMLNIPGKTKDGLNVRLDLQDMNIRSELQPIRDAETGRVYLPPACHTLSKDEKIAMLSCLKDIKIPSGYSARISKYAKLDDLKLVGMKSHDCHQTKLCGPAFLREIWPFERYMGVLKSYVRNRAKPEGSIIEGYTTEEAIEFCVNYMSYADPIGVLAFRHVGRLSGVGTIGRKRIRPDQASYVQAHYAVLQYMAEVGPYFEEHLAKIRDEN

SEQ ID NO: 164264 - protein, 698 aa, Oryza sativa
  Clone ID: PAT_MRT4530_63180C.1.pep
MAFFEVRLLLLSPEPLLPAPFPFSSQLTLGGDGMAASVSAASCDAVVGGGGDKDEECRDEAAALRLKMVAVAAILIAGAAGVAIPLVGRRRRGGGGGGGGGRVLRAGLFVLAKAFAAGVILATGFVHMLHDAEHALSNPCLPHSPWRRFPFPGGKHRQEEAAAAAEEAAAALLEDGGALPVGDGEGRDGRGGKRDAMHIVGIHAHAAAHRHSHAHVHGACHGGAVNDAHAHGHGHGHEEGPSARHVVVSQILELGIVSHSVIIGLSLGVSQSPCTIKPLVAALSFHQFFEGFALGGCISEAQLKNFSAFLMAFFFAITTPAGITVGAAVASFYNPNSPRALVVEGILDSMSAGILIYMALVDLIAADFLSRKMSCNPRLQVYGLFMIFHIYYLRPESASYLGNLYMKGFMLLYPQKASEVSSWKAWGISVFDIKGPSAVTSFVRLSAMEYLSSSGKLYVSRLQVYKLELIDTKVVNCLFIRGHFEKKTQNSRVHLQAAACPELASVESALDKRKVLDDPKTVLVSDSQWWCSRAAKEQLSQSIRLNEYDTITAFQVSFVCGTRHHVMNTEHTIISLGSGNMGNPQQMEGTNYQECLVHMLIAFYKDEGTKDSQMIGPDSTCCINQTGFKLRGGGGDVGGCDTGGGKGVGDGEVVVTVMVVGGGMVASDGLLRAWQTAASDRCSIVWRRGRRPAWCREA

SEQ ID NO: 164265 - protein, 79 aa, Oryza sativa
  Clone ID: PAT_MRT4530_63181C.1.pep
IIPYARPRYPTGGGSDGSSESGSDAEDGASPIALTNLITTPVQTPVHEASHLSAHGFTSAFADSIDESITVVDKVVDDG

SEQ ID NO: 164266 - protein, 62 aa, Oryza sativa
  Clone ID: PAT_MRT4530_63182C.1.pep
MATQRRHAAVAWTPTTAATSPGSSREYMKAKCSIDSHVADNCNNPSIKSGMKRVVGNYCHVD

SEQ ID NO: 164267 - protein, 171 aa, Oryza sativa
  Clone ID: PAT_MRT4530_63183C.1.pep
PTRPLALIPLEPSTSSFSIAGGPAFSNGFSSGFGSSFSQDNSFSPLLRDAEDGYSFSNGTKDDIHGLSGLHNLGNTCFMNSAIQSLVHTPPLVEYFLQDYSREINTENPLGLQGELATAFGELLRKLWSAGRTSIAPRPFKTKLSRFAPQFSGYNQHDSQELLAFLLDGLH

SEQ ID NO: 164268 - protein, 77 aa, Oryza sativa
  Clone ID: PAT_MRT4530_63184C.1.pep
GGFGGFQMFPFLEGPAPPKAFVLVAPSTKATFGGIELPVENGKNGGFGFHPCQGGPPFRGCSFCSSNLIFFCFCPGA

SEQ ID NO: 164269 - protein, 36 aa, Oryza sativa
  Clone ID: PAT_MRT4530_63185C.1.pep
KLHFSFLPSLILGLITAANDAAVSAATSTALSAVSF

SEQ ID NO: 164270 - protein, 85 aa, Oryza sativa
  Clone ID: PAT_MRT4530_63186C.1.pep
MAKGRTRTAATWRSRRWPSRVTTATGTAAAHGQIIFPSPQSQGLYCTAPIHGWKSSGAARRGLGPPAPPPTLLPGRRVCCTWSLL

SEQ ID NO: 164271 - protein, 150 aa, Oryza sativa
  Clone ID: PAT_MRT4530_63187C.1.pep
MTTSDSSKSFAAVAANASAKGGAGSGQMGDAGFKTRQRPDAIRNSNIVAAKAVADAVRTSLGPRGMDKMIQTGNGDVTITNDGATILKQMSVIHPASKMLVELSKAQDIEAGDGTTTVVVLAGSLLDAASRLVAKGLHPTTIVDAFEKAA

SEQ ID NO: 164272 - protein, 218 aa, Oryza sativa
  unsure (1)..(218): unsure at all Xaa locations
  Clone ID: PAT_MRT4530_63188C.1.pep
APPVNKGGGRARPSAGRAREGPNNNDLADRIAKIIEEQFGIKHKEHTSAYRLPYPEWFDRVPLLHRYKVQYFAKFSXQDDTSTMEHISRFLAQCGQASAEEALKVRFFPLSLTGSAFTWFSSLPSDSIQGWADLEKQFHXHFFARIKELKLSDLITFEQQEGESXYGLSLSDEQLADLAFQGLSAPIRERFFCHEFDSLAHLMQTVPDNESRLRESRE

SEQ ID NO: 164273 - protein, 276 aa, Oryza sativa
  Clone ID: PAT_MRT4530_63189C.1.pep
MDLLLFRVNYLVGFLLTTKFEGPVQKTRFPKPIVEILQDTVDEAVHRALFDQSGVLMNTIQDVIKKNDLADRIAKIIDEQFGIRPKEHTSVYRLPYPEWFNRVSLPHRYKVPNFFPFSGQDDTSTMEYISRFLAQCGEASAEEVLKVRFFPLSLTGSAFTWFSSLPSDSIQGWADLEKQFHDYFFARIKELKLSDLISVEQQEGESTMKYIQRFRNVRGQCYSLSLSDEQLADLAFQGLSAPIKERFFCHEFDSLAHLMQTVSAYKSRLQEAREDR

SEQ ID NO: 164274 - protein, 96 aa, Oryza sativa
  unsure (1)..(96): unsure at all Xaa locations
  Clone ID: PAT_MRT4530_6318C.1.pep
HAGRREVDDDPAANGRRATAASGGANHGDTAKSEHTGRLLETRGDEPTARICRGLLDGGGLRRRQPAAGERGNGDEATRGXFPAVRASTRLRELNA

SEQ ID NO: 164275 - protein, 350 aa, Oryza sativa
  Clone ID: PAT_MRT4530_63190C.1.pep
MSEEEVNAKIMVTVENLADEQRQQMEQFLTDFQMRCLQCFIMTPEGPIQKTRFPKPIVEILQDTVDEAVHRTLFDQSGVLMSTLQDVIKKIVPKIVTQKNQLGGQAYQYRPEELCQYGHDEEYQYNNDSADRIAKIIEEQFGIKPKEHTSVYRLPYLEWFDRVPLPHRYKVPDFSKFSGQDDTSTMEHISRFLAQCGEASAKEALKVRFFPLSLTGSAFTWFSSLPSDSIQGWADLEKQFHDYFFAGISELKLADLISVEQQEGESAMEYIKRFHNVRSQCYSLNLSDEQLADLAFQGLSAPIRDRFFCHGFDSLAHLMQTVSAHESRLQDANEDQFWSYQDQTEDNFEA

SEQ ID NO: 164276 - protein, 118 aa, Oryza sativa
  Clone ID: PAT_MRT4530_63191C.1.pep
ATRTPNITSRYVMHKHYSRVDTRLIYPTHRVGRRRRSSCRPTISRNWAPAVATHLMHRIQRGAERGISLNLLDEQGHGQMDFVPENSPLQVQEIRDEMETMQMLAALDMHDLTGIERR

SEQ ID NO: 164277 - protein, 331 aa, Oryza sativa
  Clone ID: PAT_MRT4530_63192C.1.pep
MREEEEPSWFARWEEQLPAPDELMPLSQSLITPDLAVAFDIPTHGGGGGGGVGGGVVGGDGVGGGGGGGGGGGGGVGAGEMNGGASSAAGSSGGGGGGGGGDEPARTLKRPRLVWTPQLHKRFVDAVAHLGIKNAVPKTIMQLMSVDGLTRENVASHLQKYRLYLKRMQGVGNGGGGGGGGGAGAGGSHSSGSGTDAATEHLFATGPVPFLPPGRAPAGGDPYPPFAPMGGHHHHPPQIGHFHHHPAARPLGHYGSGPGAGFDHGFLSRAVAGGGPPVGPPGMHHRMVGPAAGMAMMAPSPFAEELELGSRGGGGGGGRRELTLFPTTGDH

SEQ ID NO: 164278 - protein, 216 aa, Oryza sativa
  Clone ID: PAT_MRT4530_63193C.1.pep
MASWDDDEFSDEEEQSMGKRLWEDEDAGDDFAAVKDTWDDDDDVKPGKETAATAASTKPPATKGKKSQANAKAKAEAADATPSETSTSNAAAEIAQKQPDDDEPIEKFVPKSEKEFAEYAERIAKDLLRPYEKSYHYIGLMKAMNKLAVASLTSTSVKEIVSSMTTVANEKLKAEKAADAGKKKPGQKKKRLHVNKAEGQKFRDADDDDDDDCLSS

SEQ ID NO: 164279 - protein, 142 aa, Oryza sativa
  Clone ID: PAT_MRT4530_63194C.1.pep
KPPTPRCHRPETICIPGDYGAVDITLSRFYGSAEATVQILISEVHCGSSLLLGGLASNLDKEIRLFDGVISESRGLKRSVVAVRRDSFIDLKFEVGAFPSSFDQHYVSFKEKIHGYDTQEIKTDFALISVKVTWSALLSGLE

SEQ ID NO: 164280 - protein, 347 aa, Oryza sativa
  Clone ID: PAT_MRT4530_63195C.1.pep
MATSLSLAPKPAAVAVAAAAIPRLVPPPSIDMSALSPPPPLVSVSRSMVAKHKAVVVMGATGTGKTRLAVDLALQFGGEVINADKLQLHRGLDVATNKATADERAGVPHHLIGVAHPDEEFTAADFRRAASRAAAAVAARGALPIIAGGSNSYIEELVDGDRRAFRDRYDCCFLWVDVQLPVLHGFVGRRVDDMCGRGMVAEIEAAFDPDRTDYSRGVWRAIGVPELDAYLRSCAAAGGEEERARLLANAIEDIKANTRWLSCRQRAKIVRLDRLWRIRRVDATEAFRRRGGAANEAWERHVAAPSIDTVRSFLHGEFTTAAETTAAPVPPPPFLPMFALAAAGAGV

SEQ ID NO: 164281 - protein, 222 aa, Oryza sativa
  unsure (1)..(222): unsure at all Xaa locations
  Clone ID: PAT_MRT4530_63196C.1.pep
STPKRLTGRLTLILAVVRGALASSAAAAAGVVAASSSASATRSSKPPPPPSSATSASDTRSSKLPPPLSSSSKCSTTXSTSPSMTPPSSTRSPTTTTTPSSLPSSAANSTSCGSSSSSSSTSNSTSCGSSSSSSSSTSNSTSYGSSSSTSNSTSYGSSSSSSSSSSNSTSYGSASSSAAAAASSRNAKNSASTSPSSHATGRRWPSNCTYSGRDADADDNDS

SEQ ID NO: 164282 - protein, 305 aa, Oryza sativa
  Clone ID: PAT_MRT4530_63197C.1.pep
MAGLDLGTAATRYVHQLHHLHPDLQLQHSYAKQHEPSDDDPNGSGGGGNSNGGPYGDHDGGSSSSGPATDGAVGGPGDVVARRPRGRPPGSKNKPKPPVIITRESANTLRAHILEVGSGCDVFECVSTYARRRQRGVCVLSGSGVVTNVTLRQPSAPAGAVVSLHGRFEILSLSGSFLPPPAPPGATSLTIFLAGGQGQVVGGNVVGALYAAGPVIVIAASFANVAYERLPLEEEEAPPPQAGLQMQQPGGGADAGGMGGAFPPDPSAAGLPFFNLPLNNMPGGGGSQLPPGADGHGWAGARPPF

SEQ ID NO: 164283 - protein, 58 aa, Oryza sativa
  Clone ID: PAT_MRT4530_63198C.1.pep
RLTEPILGEPNPLHYMHLSRIGKHSTFIFGSKNLPESFPTTLTREPMTRLLPDILFLL

SEQ ID NO: 164284 - protein, 68 aa, Oryza sativa
  unsure (1)..(68): unsure at all Xaa locations
  Clone ID: PAT_MRT4530_63199C.1.pep
ILDHKGRKALCSEFPKIMQQGFPYFPGGVCKSSIGRQASYXQAVAWKVFNYGVAPPRLRFKLVNWALM

SEQ ID NO: 164285 - protein, 386 aa, Oryza sativa
  Clone ID: PAT_MRT4530_6319C.1.pep
MLGRTLRLGTAGYAGKEEEWQQEDEEEEESNTPRVFADIPHPRARNWARARYQKNANGTIFMPNPEDQRVYEAIEPTSCTLTVRVMPTFTVPAAEGLAYKPTPETRVHGAQLRGDCAKVQVNSVKPEYELFPLKYPPNDEVLSLGNARGTFIQWPKDLIEIRVTARPTIEPGGRPPKRPSSSPSAPPAQDRHAQSYDVQLKYDTDFWEDRTEADSKAIHEPPPMKKSRKAHSSPQRITLDKPMQRGEEEEESDHWILLVITPKWSTCHYLNSRIDKNAYDWTPIQLAIDEVWAQYVQRGGLRKTRHHILIHKKDFPVKQQIGDQCGFHVCHNMRLLYKEKVKTLTGFEGKITKSLPTSFEEIREEIAGFILREIINPKGMFRLKLK

SEQ ID NO: 164286 - protein, 440 aa, Oryza sativa
  unsure (1)..(440): unsure at all Xaa locations
  Clone ID: PAT_MRT4530_631C.1.pep
CFDQREGINFNEVFLSVVRHFSIRVMIAFVALFDLELEQLGVKTFLHVDLEEKIFMIQPEGFAILGKKHLICHLKKSLYGLKQAPREWYKIMDSFMIAQQYSXSNYDNCVYLMKFPHGSFIYLLFYADDMLIASYEKSPINQCKAQFRYELEMKDLGLTKKIIGTKIQHDCKAGXLFPYQKRYRYKIVDXFNLRNCKLVSTPFVSHYKLSSSQCSINEDDKDYKSHVPYASAVGNLMHGMISICADLAHEVSVVSTFMHNPGKEHXNVVKWILRYLKGTSNFGLMFDMNKVKIDDVVWFVLNKRSISGYXSLCGSAVSWKASIQSVTALSTIEAEYISTTEXSRKLFGCEVLFLKLVFSRMXNIVYYDRQGAICLTKNHMFHAKTKHIDIKHHFIRDIVAQGQVFMRKIHTDDNPVDMLTKLLSVTKFNYCLYLVGICGT

SEQ ID NO: 164287 - protein, 49 aa, Oryza sativa
  Clone ID: PAT_MRT4530_63200C.1.pep
MTCDGREEDGEGRKKTERKRMDGKGLIYILQLCLLQANQSCILLLKEIS

SEQ ID NO: 164288 - protein, 63 aa, Oryza sativa
  unsure (1)..(63): unsure at all Xaa locations
  Clone ID: PAT_MRT4530_63201C.1.pep
VKVEXPKATIAMLGSTPGNTLWHKPVQHXVAHLVLARGHFACSFSCAPKETXIGHGTQQGLQQ

SEQ ID NO: 164289 - protein, 143 aa, Oryza sativa
  Clone ID: PAT_MRT4530_63202C.1.pep
VTSRVNKTDGFRPCPSSCWRLRARRGTRRTTPRRRTRMRKGRSLPTKRLTLFSLIISITMTNSKCNLYVLSPRTTFRPTWHASPSLSLTTFTTRKTNVLCHYHLKKVEAVRTILTLSDHSMFFVIHDNCRDEPFPEEPISSFT

SEQ ID NO: 164290 - protein, 342 aa, Oryza sativa
  Clone ID: PAT_MRT4530_63203C.1.pep
MAGGGVGASAAAAATIPEAALRSGKPMPLVGMGTASFPLDAPQLPATVRDAVLRAIDAGYRHFDTAAAYGTEAPLGEAVLEAVRAGMVASRDDLYITSKLWISDTHPGRVLPALRRTLRNLQMVYIDLYLIHWPRPLRVEQETPSPVYDNDFVMMDMEGVWKDMEECQRLGLTKAIGVSNFTCKKLNTLLSFATIPPAANQVEINPYCRQNKLREFCKEKEIQLCAYSPLGASGTIWGSNAVLDCPVLKHIAVQKGKTVAQVCLRWLHEQGDCIIVKSFNERRMRENLEIFDWELTDADRQEISALPEFRGNRDFYVHESGPYKTTDEFWDGEITGPQLKTC

SEQ ID NO: 164291 - protein, 77 aa, Oryza sativa
  Clone ID: PAT_MRT4530_63204C.1.pep
MREASLPTDGSDRPDERDEEKVGAVQLLGRRKEEGRGLAITVMTTVVARSGNYRENNVILPGSPGDACIGVTSRSPE

SEQ ID NO: 164292 - protein, 122 aa, Oryza sativa
  unsure (1)..(122): unsure at all Xaa locations
  Clone ID: PAT_MRT4530_63205C.1.pep
MPFSIPEPVALFALSTGAFSDPPVSLFSANKIHHQLQVPSTXFIQANVVASRQAFMLPKVLHYYAKDAALELRHVVELVCESISEAQQREIQLCLRRRIDKCVEWLPYKSSFRYVVHRDLAE

SEQ ID NO: 164293 - protein, 88 aa, Oryza sativa
  Clone ID: PAT_MRT4530_63206C.1.pep
QAERVRGSKSAGEGGYFRSVARPCDVVSLAARWPFVHQPAAPGVSPGYRALAVHGPCTARRGPPAPWPSFPWLNPSSNGFGSPCRPPC

SEQ ID NO: 164294 - protein, 460 aa, Oryza sativa
  Clone ID: PAT_MRT4530_63207C.1.pep
MRIVVPLQGVVQGRGGLVLGSLIPCALFYFFQLYIKRNRASPPPPPGSPTAASAAAVSPIHRSLSRGLLAPRAALPAISARGASVRDDDSLYYAGLRRCAADPYHPVTNPSGIIQLGLAENYLSLDLVGRWMEEHAAEAASMAGGEDEDERELSIRGLAAYQPYDGILALKMALAGFMRQIMQGSVSFEPSQVVITSGATPAMEILSFCLADPGNAFLVPSPYYPGWDRDIKWRTGIELIPVPCRSTDNFNISITALEIGNTPHPPPMHARRAAKAKKRGIKVRGVLISNPNNPTGSFVPKQTLHDLLEFAAEKNIHLISDEVFAGSTYGSGKFVSVAEVVDDLEDFDKGRVHIIYGLSKDLSLAGFRVGSVRDDDSLYYAGLRRCAAEPYHPVTNWGIECYKSSGGFYCWADMSKFIRSYSEKGERKLWDRLLEEAKDYPLELVMEWNNCFARSQLLPL

SEQ ID NO: 164295 - protein, 36 aa, Oryza sativa
  Clone ID: PAT_MRT4530_63208C.1.pep
PSSPHPWRRWAPVTTDSEKGKRWIVTRACNGGAGFE

SEQ ID NO: 164296 - protein, 261 aa, Oryza sativa
  Clone ID: PAT_MRT4530_63209C.1.pep
TNFFGSRFFFKKKKKKKKKKVRGVLISNPNNPTGSFVPKQTLHDLLEFAAEKNIHLISDEVFAGSTYGSGKFVSVAEVVDDLEDFDKGRVHIIYGLSKDLSLAGFRVGVIYSYNESIVTAAAKIARFSSVSTPTQRLLVAMLSDQKFISDYLKVNRERLRKMYHLFVDALDQVGIECYKSSGGFYCWADMSKFIRSYSEKGERKLWDRLLEEAKVNVTPGSSCHCIEPGWFRCCFTTLSEHDIPVLVQRLRTITDSHKPNH

SEQ ID NO: 164297 - protein, 99 aa, Oryza sativa
  unsure (1)..(99): unsure at all Xaa locations
  Clone ID: PAT_MRT4530_6320C.1.pep
WRTHLRTVGGAQWRQPRARWRASPVGGGSAKEEFAAAAPGSVEGGAGRWRCRXGGLREDDGGGGGIGGGGAWLGGGRRRSVEAAPGSVETAGSVAAAAG

SEQ ID NO: 164298 - protein, 171 aa, Oryza sativa
  unsure (1)..(171): unsure at all Xaa locations
  Clone ID: PAT_MRT4530_63210C.1.pep
MRGAVVVAWPERGGCHWRCSSAPHASLCLVDPAEGRGVGGGATGVEGSGGXSRPPLALPLPPKSGLGRRRRXAAPLPLHLPPRSGVGEGRRRRRGRRGGRQRGSPPSPSQNQIQSTGSGAECAREHRIQRRHCSSHACDGVDGEGCDNDDDLERTTMTTGGNHSQALLRRH

SEQ ID NO: 164299 - protein, 1524 aa, Oryza sativa
  Clone ID: PAT_MRT4530_63211C.1.pep
MEFTVSAARWVVGRALGPVTGELMEAWAASKKLGPNIRELKLLLLHAQAMLENAEGRDIRNGALDQLLSQLRDLAYDADDVLDELDYFRIQDELDGTYEAVDDAEEERGLVRGLALHARHTARAIARKLKCTCSASARSHADAEEGRCLPATAVGKLLPCCSPPTVHNDDAAGAKTNEQHLQAPKLKFVRVEMSKKMSEIVEQLKPVCDAVDRILGPLQPSGHSKNAKTQCIDLEKRPKTTPTIIEHELFGRKDLKRIVADEIMIGKYRDNDITVLPIVGPGGIGKTTFTQHIYEEVKNHFQISVWICVSQNFNANVLAKEIVEKMPKGNNEKENESDQEKIEKRIQSQQFLLVLDDVWEYHEDEWKTLLAPFRKSGTKGNMVIVTTRKQKIAKMVESTDCSIKLDRLDHEDSMRLFQACVFDNNKTWEDYPSGLQKVGVDIVDRLKGFPLAIKTVGRLLRNKLTLDRWTRVYESKEWELQPNDDDIMPVLKLSYNYLPFHLQQCFSYCALFPEDYRFCGQELINLWIGLGLLGTDDQNKTMEYLGLEYLDQLVDNGFFEQVGKEHDSPYVMHDLLHELATNISSHEIRCLNSSTLSSINEIPKSIRHMSIIVDNRHVENRIAFENHKKDLSTLGNKLKAGNLRTIMLFGEYHGCFYKIFGDVLIDAKSLRVIFLSGASYDVGDVLCNFSELVHLRYLRIKDSRMCGASLPNSITRFYHLLVLDLQEHYGELGFPRDMGNLLKLRHFLVHDDNIHSSIFEVGKLNFLHELRKFEVKREMKGFDLEQIGRLLVLRGSLGIYNLEKVEGIKEANDAKLAYLNHLDSLVLDWDNERCNRDPIREGNVLENLKPHDNIRELHIAGHGGVSCPNWLSGDLSIRNLESLLIKYVNWDTFPLPGKLYMTEGQERQGSVTSHDFHNLKRLELVNIQKLKRWHGDGTINLLPHLQSLTISDCPELTELPLSDSTSCQFQQSTICFPKLQKIKISECPKLLSFPPIPWTNSLLYVSIQGVDSGLEMLNYSKDESSLYITGKDAPGSMFWNMLDFNNLTELQEMNITKCPPISLDHLKMLTCLKTLQITDSGSILLPVDCENYVQYNLPVEKLIIRSCGTRGRELTHVLSHLPKLSTLLIWKCQNVARLGVAEQRTITTPESSLSPSANKAAKTLTTIPQQQTGEAEEMETATADDGLLLLHPQIKVFEISECRELSLDSGGIQGLLSLQTLGIYDCPKLLCSSSSSYSPFPTSLQTLQLWNVEGMETLPSPLPNLTFLYISHCGNLRGGEVLCNLLAQGNLTSLYVHKTPNFFLGLEHSCSQVDKQEDVHRSWRLQELSTDDFARVLATPVCHLLSSSLTKLDLRWNDEVECFTKEQEKALHILTSIEDLEFSRCKKLQSLPTGLSEIPNIKTLGIYGCLAISSLGNLPNSLQQLEISSCPAISSLGNLPNSLQRLGISYCPAISSLGNLPNSLQQLEISSCPAISSLDGTTIRSLAKDRLPTTLREIDVRYCGNEELKRQCRKLQGTIPIVKA

SEQ ID NO: 164300 - protein, 85 aa, Oryza sativa
  Clone ID: PAT_MRT4530_63212C.1.pep
MAGGAIPRRRVVTGTREAGRSAERGRRLYHGHGKLRLKAASGGGSGTRAACRRGEDCRPLGSMLVPLSGRPGGVRGEELWGGGLG

SEQ ID NO: 164301 - protein, 1503 aa, Oryza sativa
  Clone ID: PAT_MRT4530_63213C.1.pep
MEFTVSAARWVVGRALGPVTGELMEAWAASKKLGPNIRELKLLLLHAQAMLENAEGRDIRNGALDQLLSQLRDLAYDADDVLDELDYFRIQDELDGTYEAVDDAEEERGLVRGLALHARHTARAIARKLKCTCSASARSHADAEEGRCLPATAVGKLLPCCSPPTVHNDDAAGAKTNEQHLQAPKLKFVRVEMSKKMSEIVEQLKPVCDAVDRILGPLQPSGHSKNAKTQCIDLEKRPKTTPTIIEHELFGRKDLKRIVADEIMIGKYRDNDITVLPIVGKGGIGKTTFTQHIYEEVKNHFQISVWICVSQNFNANVLAKEIVEKMPKGNNKKENESDQEKIEKRIQSQQFLLVLDDVWEYREDEWKTLLAPFRKGGTQGNIVIVTTRRPGVAKEIDSTNCSIKLDRLDHEDSMRLFQACVFDNNKTWEDYPSGLQKVGVDIVKRLKGFPLAIKTVGRLLRNKLTLDRWTRVYESKEWELQSNDDDIMPALKLSYNYLPFHLQQCFSYCALFPEDYRFCGQELINLWIGLGLLGTDDQNKTMEYLGLEYLDQLVDNGFFEQVGKEHDSPYVMHDLLHELATNISSHEIRCLNSSTLSSINEIPKSIRHMSIIVDNRHVENRIAFENHKKDLSTLGNKLKAGNLRTIMLFGEYHGCFYKIFGDVLIDAKSLRVIFLSGASYDVGDVLCNFSELVHLRYLRIEDSGMCGASLPNSITRFYHLLVLDLQEHYGELGFPRDMGNLLKLRHFLVHDDNIHSSIFEVGKLNFLHELRKFEVKREMKGFDLEQIGRLLVLRGSLGIYNLEKVEGIKEANDAKLAYLNHLDSLVLDWDNERCNRDPIREGNVLENLKPHDNIRELHIAGHGGVSCPNWLSGDLSIRNLESLLIKYVNWDTFPLPGKLYMTEGQERQGSVTSHDFHNLKRLELVNIQKLKRWHGDGTINLLPHLQSLTISDCPELTELPLSDSTSCQFQQSTICFPKLQEIKISECPKLLSFPPIPWTNSLLYVSIEGVDSGLEMLNYSKDESSLYITGKDAPDSMFWNVLDFNNLTELQLLGIQKCPPISLDHLKMLTCLKTLQITDSGSILLPVDCENEVKYNLLVENLEINSYGASGRELTQVLSHFPKLSNLLIRKCQNVARLGVAEQRTITTPESSLSPSANKAAKTLTTILQQQTGEAEEMETATADDGLLLLPPQIKVFEISECRELSLDSGGIQGLLSLQTLGIYDCPKLLCSSSSSYSPFPTSLQTLDLSKVEGMETLPSPLPNLTSLSITSCGNLRGGEVLWDLLAQGNLTSLYVHKTPNFFLGLEQSCSQVDKQEDVHRSWRLQELWTDDFARVLATPVCHLLSSSLTKLVLSCNDEVECFTKEQEKALHILTSIEDLEFYCCEKLQSLPAELSQIPTIKTLWISCCPAISSLGNLPNSLQRLGISCCPAISSLGNLPNSLQQLKIDDCPSISSLDGTTIRSLPKDRLPTTLREIDVRYCRNEELKRQCRKLQGTIPIVKA

SEQ ID NO: 164302 - protein, 317 aa, Oryza sativa
  Clone ID: PAT_MRT4530_63214C.1.pep
MAALLQAVPKEMLCPLSKKDNAKEVWDAIKTMSVDGVMMIRDRASALVARVSRNKGRSYLLDLKVVRPMCLVASCAEVPWLSHARCGHLNFGSLCRLAQGAMVCGLPDIEQVDHICDCCQRAKQLHAPFLSEAKYRAMELLELVHGDLCGPISPATSGGRGVRRHLTMPCTPQHNGIIERLLKAMEMPGRFQGEAVVTAMHILNWAMTRALDGQTPYEAWYGQRLNVHYFRTFGCVAYVKNVIPHLSKLDRSEAMVFLGYEDGSKAYRVFDPEANHVHVSRDVVFNEEAKWDWAAAVTGDDEANPGTKRRSGTGRQP

SEQ ID NO: 164303 - protein, 782 aa, Oryza sativa
  Clone ID: PAT_MRT4530_63215C.1.pep
MPSLSFLRFLSGRSLADVCDGVKRRLGLGDDEGRDEEAGLAGGSSRPAAAAAVAGPPGECYACTQPGVPSFHSTTCDQVHSPDWDADAGSSLVPVQAQPSAAHHAAAAAARWVFGPVLDPRSKRVQRWNRWILLARAAALAVDPLFFYALSIGRAGQPCVYMDAGLAAAVTALRTAADLAHLAHVLLQFRVAYVSRESLVVGCGKLVWDPRAIAAHYARSLKGLWFDLFVILPIPQHNRYSPFTSPLIPLCVAVFYLRPFTVLGRYDRYLPTFFTSTVYFLRGNLGKNNVNKVIFWLVIPKLIREEQIKLIMTMLLLLFLLQFLPKVYHSIYIMRKMQKVTGYIFGTIWWGFGLNLFAYFIASHIAGGCWYVLAIQRVASCLQEECKIKNTCNLTSLACSKEMCFHLPWSDKNGLACNLTSFGQQNIPDCLSGNGPFAYGIYKGALPVISSNSLAVKILYPIFWGLMTLSTFGNDLEPTSNWLEVIFSIINVLSGLMLFTLLIGNIQVFLHAVLARKRKMQLRFRDMEWWMRRRQLPSRLRQRVRKYERERWAAITGDEEMEMIKDLPEGLRRDIKRYLCLELVKQVPLFHGMDDLILDNICDRLRPLVFSSGEKVIREGDPVQRMVFVLQGKLRSTQPLAKGVVATCMLGAGNFLGDELLSWCLRRPSLDRLPASSATFECVETAQAFCLDAPDLRFITEQFRYKFANEKLKRTARYYSSNWRTWAAVNIQLAWRRYKARTTTDLASAAQPPSAGGPDDGDRRLRHYAAMFMSLRPHDHLE

SEQ ID NO: 164304 - protein, 141 aa, Oryza sativa
  Clone ID: PAT_MRT4530_63216C.1.pep
STSRSDPEFQTDHLPSPRQITAPSTPDPSPPRRRSAFAPPPVSACEEERLAGRLGSLPPSSQSRSSRSTSDDCLSPPPQLASPLSPQPPPQPASPRIAVALPSPSRRIADFFPPVCITSTVSPSPTPRPRSPGSPVPRLKA

SEQ ID NO: 164305 - protein, 58 aa, Oryza sativa
  Clone ID: PAT_MRT4530_63217C.1.pep
MSPMSSGDLFCNQRPWMRLRNATPGATPKRNRYGSASTQLASLPVKSGCLRGTIKHRI

SEQ ID NO: 164306 - protein, 135 aa, Oryza sativa
  unsure (1)..(135): unsure at all Xaa locations
  Clone ID: PAT_MRT4530_63218C.1.pep
PRPPPPPRTPGAPPPPAPPTPPRPPPPXRPPNPTPNSTPRPPTPTAEHPRPPGPPKPPRPGPKNTXPSPSPGQGTPEGPRQAPPPQEPPPRHPAKPRPERPPANIGKPXPEPQPRPAXGPNKSSAPPPAPPMRRS

SEQ ID NO: 164307 - protein, 218 aa, Oryza sativa
  Clone ID: PAT_MRT4530_63219C.1.pep
MAAEALGAIGLEKSIPLLEESLAADPAVEVQETCELALRRIEQQKNAGVSESTTISPFLSVDPALPAKQGLSVHQLREILLNEQESMYERYAALFALRNDSRDAAVSAIVAALGAKSALLKHEVAYVLGQLQNKAASDALSTVLKNVDEHPMVRHEAAEALGSIADQESIALLEEFAKDPEPIVSQSCEVALSMLEYERSGKSFEFLFLQTPGVQQES

SEQ ID NO: 164308 - protein, 592 aa, Oryza sativa
  Clone ID: PAT_MRT4530_6321C.1.pep
MKHLDFLQMVEPMSKKNAPLFTGPPPERPENPVIRDPLFGKALPTPTDCFTLADAWARPRANGHHPGEPCAAPSLVWVETFCCLDHGPRQPGNDIDVFLEPVIDDLEILWKKGVETWDAYGQENFKLRVLLFCTINDYPALARITKYVKLDELKLVGMKSHDCHVLITQILPVAIRGILPPKVRHTIQRMCAIFNAIGQKVIDPEDLDGLQTDIVNTLCHLEMFFPLSFFDIMVHLPVHLVKQTKLCGPAFLREMWPLERYMGVLKSYVRSRAKPEGSIIEGYTTEKAIEFCVNFMSDADPIGVPASRHEGRLSDTWQGYDINGYTFYTVKQDDKSTVQNNGVRIDAFQDQVGSNTYYSRIEEIWELNYIKFKVPLFRCHWVNLRTGVKADKEGFTLVDLSRVGYADEPFVHAKQFEQIFYIKDPSNKKIHIVRTLALLSSSIVEPAAVATEPAATEPPPPSIRTAAASSPTTPTKPGDILRHRRRLLLSDARRRLHRARRRLHQPQRRPPPSPAPPPSRLSAAANSSFADSSLAELEAAATEPAASTEPPTPDAASTEPSAATIYPGDAATEPAASTELGAATTDPGDALY

SEQ ID NO: 164309 - protein, 132 aa, Oryza sativa
  Clone ID: PAT_MRT4530_63220C.1.pep
MDGSASSLAVRRRTGELFLGKCPLCGTQLVARTSRTPKNPNKNFVKCPNLENTPYACRFFMWEGQYEQFLADGHVGLGYQTGYEQFNVEALSSMGIEGLPLKGCAALGRMLVYLAVVQALLLLLILVVVISK

SEQ ID NO: 164310 - protein, 504 aa, Oryza sativa
  unsure (1)..(504): unsure at all Xaa locations
  Clone ID: PAT_MRT4530_63221C.1.pep
MPLFPPSIVIKINDLEILLYLRVAICFVDAANNALSCMKIQDCNVAVLSTVGFRQETWEQKHIFEVMSTNKHEIGLCRIVPSIEVVRGAHGDDTVRQFLEQYPLPKLLGALQSEADVPGMDETIAACLDKAFIQAGLLANSKNTRQLACKAVIHLLDKAGDSAVVVDTFVQHNLYPLLMNCLTEGDEEISAISLDGIKRLAQIPKGIEIIFPPNGQGSVQLHKVAAQSSSMARIRILSLIAKLFAVSTYTATAIYDSNLLSLFEDEIKDRRDMLKTLSALEVLNELVEHPHSNIFLLKTNLLQLMVDVINDSSADSIVRSRATLISGRLLSSADAFTTIDRNCVANLLLAIDKLLKMEESQNTDETESALEALGLIGSXETSPKLTPSALXLSVLQQDPDIRITGYRVISGLVAREWCLMEICSKLDIINLVTDPKMEMTKLGMEARHDCCLAISKALSSSHLLHEPSLSELIGKLNEAVKRGPYLSERKRVEPQPVVVPAERF

SEQ ID NO: 164311 - protein, 162 aa, Oryza sativa
  Clone ID: PAT_MRT4530_63222C.1.pep
MASGKADVGVGGGEAMRSTLVGIGSSPQVQQFWTPPTRLLPRVQPHRAARARYNERRKLASTELRRAGSRCPSVHPSSAHAPQHLSVILSLGVLVLLFTRRHGRISHGPMGMLLSFLIPGISKPQQILLWQVAILSFLVGAGFIGLYLKFFYWSSERKIKKA

SEQ ID NO: 164312 - protein, 205 aa, Oryza sativa
  unsure (1)..(205): unsure at all Xaa locations
  Clone ID: PAT_MRT4530_63223C.1.pep
MEAPAMEPGEMEAMLRAAAEFASYPGAHGDDTVRQFLEQYPLPKLLGALQSEADVPGMDETIAACLDKVFSSRYGASFLPSYGAFIQAGLLANSKNTRQLACKAVIHLLDKAGDSAVVVDTFVQHNLYPLLMNCLTEGDEEISAISLDGLXRLAQIPXALEIIFPPNXKGSVQLHKVAAQSSSMARIRILSLIAKLFGWVNLYCY

SEQ ID NO: 164313 - protein, 66 aa, Oryza sativa
  Clone ID: PAT_MRT4530_63224C.1.pep
IGTGEFGLQTRRKKDMVDDPSFSYNLSKPSKHTTLASCTHLKFNVTLAVTNNPNPLSPPPGWLDPP

SEQ ID NO: 164314 - protein, 472 aa, Oryza sativa
  unsure (1)..(472): unsure at all Xaa locations
  Clone ID: PAT_MRT4530_63225C.1.pep
MESSPPLHKRLRRSSESNGERRPPRGELLVDEILTRLPIAAAVRFRAVCRQWNAALTSDHFILAHRARAAAARHRHPELLFFAPGAAFAGGRATSFYACSLRDGDCEAPPPPAAARELLTVAGITAAHAVLSPTPCRGLTLIFDTYRSEYYFFNLSTGDHVALPPCQPAAAANLDSTLTLPTMNPTSYPPAWPAPWIELSTTGLGYDTATGEHKVVRLFKRRDGGEYSCEVYTQGAGGWRRGVGRVPPCAANLLPALPPVFVDGYLYWLLRPAGPGEEPIHRVLSFSIGGEQFGWVYVPPRLSSRICHLADLDGSLCAVYDNRLFGRVYGLFTWSGRSSSPSPSWSVRCSINLQILPEQVSEELAGERVIVPLCSAGGAGSSKIMLATGGHKVFVYDVXRNAVERVFRMQDMVAVPRGYLQAPLLLSVGLHDERIADVVHRRAGAVDGERRLKVKLGRPPDSTLVKASGGVL

SEQ ID NO: 164315 - protein, 37 aa, Oryza sativa
  Clone ID: PAT_MRT4530_63226C.1.pep
FCWGMSWKTFRDQVIELLNAFLRFCAPYPINISCKFV

SEQ ID NO: 164316 - protein, 59 aa, Oryza sativa
  Clone ID: PAT_MRT4530_63227C.1.pep
GRVGGRVGKTSWADVYRLKDEVRLVEARILSQESPSLLAVQCLPGTQVHGDALRQLSRV

SEQ ID NO: 164317 - protein, 132 aa, Oryza sativa
  Clone ID: PAT_MRT4530_63228C.1.pep
MAHPHCAVKPCCCFCCCCLLVAAVLAVAVFLAMSPPAAAAAAASSSQPAAAAALQRAETTATMYTAKELREKQDVTKGFLIWGVAGRGGGRDHDDDDDGVRRGVGEGGAHRAGPDPPPRPGAQAAVTIHFLL

SEQ ID NO: 164318 - protein, 89 aa, Oryza sativa
  unsure (1)..(89): unsure at all Xaa locations
  Clone ID: PAT_MRT4530_63229C.1.pep
AXGRDARRGDTPRTAPRRGERLADAASDCAISPRRRCCPTRSTTRRTARPGTTXRRQXRLARRRWMRREXGHCCCCCYRRERVFAIGVG

SEQ ID NO: 164319 - protein, 54 aa, Oryza sativa
  Clone ID: PAT_MRT4530_6322C.1.pep
MATTIIGMSSTTVILNMGWTGPARGFDGFILALNCRQQNPPHFALYSSRVKVKD

SEQ ID NO: 164320 - protein, 72 aa, Oryza sativa
  Clone ID: PAT_MRT4530_63230C.1.pep
AFRRRAPPVTSFWSHCRAFRASFTPFFLTSSPSDPPPWGSEPSLAMDRMTDHPGCPWLTLPVMDMKFNIVRT

SEQ ID NO: 164321 - protein, 51 aa, Oryza sativa
  Clone ID: PAT_MRT4530_63231C.1.pep
YSAYVDWSNDLVIIPDIYPSRGPPHLIYFLFFLWEEKSHIKISGHASIYQF

SEQ ID NO: 164322 - protein, 90 aa, Oryza sativa
  unsure (1)..(90): unsure at all Xaa locations
  Clone ID: PAT_MRT4530_63232C.1.pep
RVAPGVVDVGDDDXSAXVNEGPYXXSPMXREXXVTMXTFPSSRXVLCSMALSAAXGSWWXWRRPVDDCLLLSXSAAXIKSTAXIATQALS

SEQ ID NO: 164323 - protein, 79 aa, Oryza sativa
  Clone ID: PAT_MRT4530_63233C.1.pep
MVGCEHMVLKVVLMAIKDRLISGEKSVGVAGESMPLVIFIEGVIMIQEWCTMWYTSGQSKTIRIAVPTVMGGLSNVFRD

SEQ ID NO: 164324 - protein, 436 aa, Oryza sativa
  Clone ID: PAT_MRT4530_63234C.1.pep
METAIQRRLEQNDGESSSFTIFRVPAQVRHENRQHYEPRLVSIGPYYRGRDELRAMEQHKWRLLRHFLQRAATVPLSDFMRAVRAVEQRARCCYSERTAIFDDDDDDDGFAEMLLLDGCFILEFFFKLNCREPDALCDVGWGLPLLHSDLLLLENQIPFFVVETLFHAFFRGAVAQDMLVALLLLQLRPNGIVFPKLPSSCPAPAPTGKINHLLHLYHEGFVPKPHAPLATAPSRQEGASRRLPLVIPCVTMLREAGVRFVNKRSPRDMFDITFDSNKGVLELPPVAIDQASLPLLVNLVAFEQSRGHTGGAAAAPLTSYTVLLSSLVRTGDDVDELHRAGIVDNMLSNNDDAASGFFQRLGDCSTMNYDDHLFGALFAGVKRYHDASWHRHKARFLRDHCSNPWSVIALGLAVLAFVFSLFNQLVVIHSLIHHNG

SEQ ID NO: 164325 - protein, 314 aa, Oryza sativa
  Clone ID: PAT_MRT4530_63235C.1.pep
SVFMLQVDFINFPPEEDLPHAGPQPGPDDAADEDPDDGNVWQFGNPGNQGAREWDEAVQQQQAANEQQEDAWGQDHPMGQIEENPGQLILPQQMATPLPSARMTSVQDPVLDPQVQEFLARLNRIARNEAPRHPYFYPMKGILDKIDFLCKAKGIMQTLIQGKPIPAALRMSNYFSTLLLPRKSIFDSSPSVGQHEPEWVLQPFESISPPQPKRVVEDVLPINVRPPSSPISVASPISVAPVALLPPKAPAKRKDGKAILYSPYRRQSSRLLQGNATKELQMDPRMGIGKPRGKSVKKIKEFAGIAKLFIDSSM

SEQ ID NO: 164326 - protein, 111 aa, Oryza sativa
  unsure (1)..(111): unsure at all Xaa locations
  Clone ID: PAT_MRT4530_63236C.1.pep
RGLTREGFXHFPPRSGQRGXGETGGCRLPAPPSQICPEGGGRSTAAGGGVEEGRGGAATAARGVEAAVARRTTAWRGHAAAATDDGWAVADDGXVAAVIFLNVFICFLCYN

SEQ ID NO: 164327 - protein, 84 aa, Oryza sativa
  unsure (1)..(84): unsure at all Xaa locations
  Clone ID: PAT_MRT4530_63237C.1.pep
IXPPPLSYLLPPIPAGNYPQAPLSLLXHQLPPSMPXPELASDPXPSXQPPSELPPPPPXPIXAAVXCXPAPPXPHLLGRLLAPS

SEQ ID NO: 164328 - protein, 51 aa, Oryza sativa
  unsure (1)..(51): unsure at all Xaa locations
  Clone ID: PAT_MRT4530_63238C.1.pep
CQGLKAFKNDWXLVWRFVVPHRDPSLLPRQWRSAXGVQKSYNKSEAEKKKK

SEQ ID NO: 164329 - protein, 416 aa, Oryza sativa
  Clone ID: PAT_MRT4530_63239C.1.pep
MGPTCPTCHPPLSLLPPPSPPFSISPSFASCESGVRIGSGDGGRWTERRRRTERRRRIVGIKPPHKLWRDSEHGGGVRRRRDAAAAAVGAHEERHLRRAPDAWRWRRLPPRAALPIRRVLGRAAARPPRLPLPVPAAAATTTVRRRRPRAQGLPRRLKLLPRRCAGLLAGGGGGGGGVAVHRHCGHRDAALLPPRPPRQCHVVQRLGQHCHVCTTSVKPPSKTTEGVKLHQFCGDGRWCRATGRPNGGGHPARAAAALEAAPPSPPPGRPLSLSPRATGRRGRRGEKERRERGRKEEYGGGGCCTVRRSCPRPSCRRRSGPHLRAAAARSRRPPPTEGEEGKRKREKGEREEEEGLTCGPHMCHVNATRNKGSATIASVIVSSHENAIKSTDLGQVCTQIKSTEHVDQNQKPGHII

SEQ ID NO: 164330 - protein, 647 aa, Oryza sativa
  Clone ID: PAT_MRT4530_6323C.1.pep
MEGYTCWVKHGEQESGSGAAADRSDAHNQEDENEHDMFIPSPLGGPRQPGNDIDVFLEPVIDDLEILWKEGVETWDAYGQENFKLRVLLFCTINDYPALGNFSGQTIKGKKACSDCKEHTRSRWLKKSRKMPTPKDLSGDEVHNMVKDISNEFGKKRKRNKTKEKACHTLSKDEKIAMLSCLKDIKVPSGYSARISKYVKLDDLKLVGMKSHDCHVLITQILPVAIRGILPPKVRHTIQRLCAFFNAIGQKVIDPEDLDRLQTDIVNTLCHLEMFFPLSFFDIMVHLPVHLVKQTKLCGPAFLREMWPFERYMGVLKSYVRNRAKPEGSIIEGYTTEEAIEFYVNNMSDADPIGVPASRHEGRLSGVGTIGRKRIRLDQASYAQAHYAVLQHMAEVGPYFEEHLAKIRDENLGRSDAWINREHNSRFNEWFKNRDQVGSNTYYGRIEEIWELNYVKFKVPLFRCRWVNLRTGVKADKEVSRLLRTLAPPPTPPSPPSSSLAATATETATTVTKPAATAAEPAASTEPAAAATEPLHRPASAFLIVAACLFTDTNSSPYRGRRRPSSSSSPTPNRRPTPPARRRPPRPASTPTGAAAVNSSFAEPAACTEPAAASTDRRRPPPSPPPPPPSPPGRPHALNWGISQDST

SEQ ID NO: 164331 - protein, 693 aa, Oryza sativa
  Clone ID: PAT_MRT4530_63240C.1.pep
PPSFFLLPLSLLSLPPSSPTSPTGGDGRWRRATGRPNGGGHPARAAAALEAGRAEATASGDGAAQTTEASRRRATASTSTPTCSAATSRSASRSSRPLAPSRAPGRPRHPPRPTRRAHQASPRASWAEAARLERRRRRRATGQPKRRRPPGSSGGGARGGSSGGDSDGHQGGPSGGGDDSGGRAFLRAVLSLLAAGARRAANIAINRPLGFIDHTSTRSDDSGEREIVGDGRRRRRRPGRGDVPLAGVRPHDPLPPAVQAPRGEGPRRLLPLHAAKPRQAPAGAGEPFRSSPPPAAADADTVEGLPEGAESTADVTPDKDGLVKKACDGLAAPFAAFLAGRAKRPDWIVVDFCHHWLPPIADEHCVPCAMFHIIPAAMNAMFGPRWANARYPRTAPEDFTVPPKWIPFPSTIAFRRREFGWIAGAFKPNASGLPDVERFWRTEERCRLIINSSCHELEPPQLFDFLTGLFRKPTVPAGILPPTTNLVTDDDDDDDRSEVLQWLDGQPPKSVIYVALGSEAPLSANDLHELALGLELAGVRFLWAIRSPTAGGVLPDGFEQRTRGRGVVWGRWVAQVRVLAHGAVGAFLTHCGWGSTIEGVALGQPLVMLPLVVDQGIIARAMAERGVGVEIARDESDGSFDRDAVAAAVRRVAVGGEREAFASNANRIKDVVGDQEREERYIDELVGYLRRYS

SEQ ID NO: 164332 - protein, 42 aa, Oryza sativa
  Clone ID: PAT_MRT4530_63241C.1.pep
YIVPQQNTAETCTPSQNISIFGSRHSLRDATLPNNIYQNKMF

SEQ ID NO: 164333 - protein, 109 aa, Oryza sativa
  Clone ID: PAT_MRT4530_63242C.1.pep
GGGGGSWQRQRHGSAALGSGLELALAAAGAARPGASGGGGGDLGRRVGGDLVWRHHRHLLLTAAADDDEEATGQIRRRRFSSRPDPAAAGLVPLESNGGLGRRVAATSG

SEQ ID NO: 164334 - protein, 80 aa, Oryza sativa
  Clone ID: PAT_MRT4530_63243C.1.pep
KGWKDSWPGKRLYFAVYFPSKRGAPGVAPLNPKFNSAESFFETPKAFGWLANSGPMETAMPLNWGKMLLKTKRPTTWFGF

SEQ ID NO: 164335 - protein, 51 aa, Oryza sativa
  unsure (1)..(51): unsure at all Xaa locations
  Clone ID: PAT_MRT4530_63244C.1.pep
PEHQAQRARALWHQAHEEGRKLESNLPADLPREKSLVWNXAGLSIRSNPSP

SEQ ID NO: 164336 - protein, 89 aa, Oryza sativa
  Clone ID: PAT_MRT4530_63245C.1.pep
FTHTLNYPPLLLATGHICSTSLHYTAPKWANFYLLPPRFAAVGVAAVFSDRFTLALFDGGGVVAAAAPRFDGGRPTLFFGGAFFWTFLE

SEQ ID NO: 164337 - protein, 109 aa, Oryza sativa
  Clone ID: PAT_MRT4530_63246C.1.pep
MAVIVSSEIAVAATIINPGSVAAGPARRLRRGCVGEADYACCQSKAPMAIEARSHLLAVCRAPIVLCAIDLDFLPVMADGQMHVLLPEAAAERGRRSRLLLRRCHVCWS

SEQ ID NO: 164338 - protein, 97 aa, Oryza sativa
  Clone ID: PAT_MRT4530_63247C.1.pep
TSFWSPWSFQLIPWRVMHQQSLHELRLVHQHSRHQSFSSGQAISQHLPLHLGDVVHYAQQPVQVLALGRLFCASVCGFHLHTDIAYSRIPAVVGVCS

SEQ ID NO: 164339 - protein, 70 aa, Oryza sativa
  Clone ID: PAT_MRT4530_63248C.1.pep
AELHHHLQFLLCRFQPYILPPFHNVSHSSISYIHIDVNKSRHIYLYRFINIIINMGNAMMTYIVKRRKYN

SEQ ID NO: 164340 - protein, 65 aa, Oryza sativa
  Clone ID: PAT_MRT4530_63249C.1.pep
PRVRPRIRSCFLRGYVSTGAFLEEVNHPSRDSSQNELKGILEVCHWPLAYIDLQALRPVEHSSTR

SEQ ID NO: 164341 - protein, 451 aa, Oryza sativa
  unsure (1)..(451): unsure at all Xaa locations
  Clone ID: PAT_MRT4530_6324C.1.pep
MQLDRSRPPSPSLPPSPPTPRPRPPPPSLSPQPPPPSLLGPPFGPPPPPHRRAPPPEPAIAATEPLHRPDRCWPSSSSPPASSPTXRRRPPPSPIGHPQTMSQQGEPMSTTTSGSSRAHTPRTGNKIPKEWFRITAVDAVGLPTSPRKILSRFRSICRVIGRQKFSILQDDFKLVPAAEKDIAWLTFKESFDYPVEHEDRLRRAAFKVMGTAWKNFKTKLVGEFVYNPANLDPTEKFPWMTEQVWEEFHAKKSTPESRARSEAYRLLQTRNQHPHRLGTTGYAGKEEEWQREDEEAEESCTPLVFGDIPHPRARNWARARYQKNDDGTIFMPNAEDQRVYEAIKELVASQQASQEACSQRREDDLLTKALGNKEHRGRTRGVGSSVPWKYGFPDYAWQYKKQTSNKAEKDARLEAKIQASIRAELTSEFDEKLESMRAKIRQEIREEQQIP

SEQ ID NO: 164342 - protein, 143 aa, Oryza sativa
  unsure (1)..(143): unsure at all Xaa locations
  Clone ID: PAT_MRT4530_63250C.1.pep
TILLSESIKRHRRNKATTRKINSLFALLDLGVCSASAHRDADSQVDKLYQLQPHMMQNQQMLSPCAKFEREDXSSHTTPLLQLHGVELRYRQIMQPPSYRQHRTITTQLHXRDITSVYDTRQSVTMPQFASVYXDQPQAQAQT

SEQ ID NO: 164343 - protein, 178 aa, Oryza sativa
  unsure (1)..(178): unsure at all Xaa locations
  Clone ID: PAT_MRT4530_63251C.1.pep
MSIQIPSASWDFRGFLLCFIFFSSLPGTILTQEVTLDSVQIFTTHDWFSTKPTVFFQCKGENKTVLPDVKRTNVSYSFNGEESWQPLTELQGTKCKRCGIYEDDPLKYDTFDEWELCPSDFTAEGSYKRFKEKEFNATFLCHGCSQVGAGSNKESGTEKGEXKGGMHPGXVVLIVVLL

SEQ ID NO: 164344 - protein, 124 aa, Oryza sativa
  Clone ID: PAT_MRT4530_63252C.1.pep
FSTCLSGTEMNPWLVLCSRNYVFFFRVSSPLLSNILPLWSPRGINFHPHVIGDAPPCDFLPLSHSNIPHGRRCRYSVFFCKNAFCFRIEKFCRTSLSKAQNPLFLPLRVPLFSTNSKNCLFSVL

SEQ ID NO: 164345 - protein, 77 aa, Oryza sativa
  unsure (1)..(77): unsure at all Xaa locations
  Clone ID: PAT_MRT4530_63253C.1.pep
MGPMFFLLFFRDPIATEAPRQYHVGRGSSQTSHVGATSSKTRYNTAEGSRLHGFVKLXGMYCIRFSGLRMKIRLGDQ

SEQ ID NO: 164346 - protein, 141 aa, Oryza sativa
  Clone ID: PAT_MRT4530_63254C.1.pep
LFLLLHPFPYSSFSYHAWEAVEAISFLLVVVVVPRLLLLLGAAGFLVLGGGGGRRLLAGSVVSLVAGGPRRSWRRRWGLPGTARRSAAAASGAFLRSNLGLLDLTLFWAAAAFVLGGRSKRRRRRRRRTTSFSWRGQGLCA

SEQ ID NO: 164347 - protein, 348 aa, Oryza sativa
  Clone ID: PAT_MRT4530_63255C.1.pep
MHGRPSRPLASSSSSSSSRVFSFFLAPRVFLFLVVVVVVVFLPGRSSCWWLEGTEELEEEMGFAGDCSPVSGGGLSENGKFSYGYASAPGKRASMEDFYETRIDGVDGETIGLFGVFDGHGGARAAEYVKQHLFSNLIKHPKFISDIKSAIAETYNHTDSEFLKAESSHTRDAGSTASTAILVGDRLLVANVGDSRAVVCRGGDAIAVSRDHKPDQSDERQRIEDAGGFVMWAGTWRVGGVLAVSRAFGDKLLKQYVVADPEIKEEIVDSSLEFLILASDGLWDVVSNKEAVDMVRPIQDPEQAAKRLLQEAYQRGSADNITVVIVRFLEGTTTGGGPSREAASDQNS

SEQ ID NO: 164348 - protein, 34 aa, Oryza sativa
  Clone ID: PAT_MRT4530_63256C.1.pep
RCVKRPCTSTADCGTYCRKGRGAPGPGPGPRSHS

SEQ ID NO: 164349 - protein, 211 aa, Oryza sativa
  unsure (1)..(211): unsure at all Xaa locations
  Clone ID: PAT_MRT4530_63257C.1.pep
HLTSLSLTTLTHTRHALHHATISRPVCLNCSFCKCHYCNHHYAPILPPNITPXRAPTPTPRRYAPRHHSTRHTPVPRANRALRLPPRPIXSLVRTPNRPSCSSNVACSYNRMMPHVPPVGTHVRHHSTRTTPSXHHTVQFPVRPRQXSAPPPPPPPTPLHTTRAHRTIATTLCNMAPVNFQLSSCGRRRSNRPVYNRNLLTIKIKRRSGSR

SEQ ID NO: 164350 - protein, 137 aa, Oryza sativa
  Clone ID: PAT_MRT4530_63258C.1.pep
MTTTPNLATYMKPEMWGKCLGCINELMDILFANPNIFVGENILEESENLHNADQPLRVRGCILTLVERMDEEFTKIMQNTDPHSQEYVEHLKDEAQVYAIIERVQRYLEEKGTTEEVCRIYLLRILHTYYKLDYKAH

SEQ ID NO: 164351 - protein, 383 aa, Oryza sativa
  Clone ID: PAT_MRT4530_63259C.1.pep
MASCCGGFMEKAKPYFAMICLQFGYAGMNVITKVSLNHGMSHYVLVVYRHAFATISIAPFALILERPVIDQNFYYAGLKFTGPTFACAMSNILPAMTFVMAVIFRMEKLELKKVRCQAKIAGTLVTVAGAMLMTLYKGPLMEMAWSRHAGAGVAEAPAAAAAAISGRDWFLGSMFVIVATLAWASLFILQTHTIKQYSAQLSLTTLICLVGTLQAVVVTFAMERRRPSVWAIGFDMNLLAAAYAGIVTSSIAYYVQGLVIQRTGPVFASAFSPLMMIIVAVMGSFILSEQIYLGGVVGAALIVVGLYSVLWGKHKETQEKQADTKLSLPTSKGAAAAAEAEEITGAGEDDGDGDDDAERSKNHRSSGGVRSSSDSNGHGASAV

SEQ ID NO: 164352 - protein, 62 aa, Oryza sativa
  unsure (1)..(62): unsure at all Xaa locations
  Clone ID: PAT_MRT4530_6325C.1.pep
XFLARGKEAGGDGEREXGSRCXXXRSAPXSPPSSPPFSTDSTSSCLTSTTAFSSCLATFYSS

SEQ ID NO: 164353 - protein, 76 aa, Oryza sativa
  unsure (1)..(76): unsure at all Xaa locations
  Clone ID: PAT_MRT4530_63260C.1.pep
APRIIELSDKAXSIGVQQYLXDYITEQEWRFHFGARWDTFLQRKKAYDPLAIIASGQRIFRKASASLPLPSWQYLM

SEQ ID NO: 164354 - protein, 34 aa, Oryza sativa
  unsure (1)..(34): unsure at all Xaa locations
  Clone ID: PAT_MRT4530_63261C.1.pep
LQVNAKREGFRDLSLITLTYPYGFIEXXXXXTET

SEQ ID NO: 164355 - protein, 190 aa, Oryza sativa
  unsure (1)..(190): unsure at all Xaa locations
  Clone ID: PAT_MRT4530_63262C.1.pep
TGALMIFDEMHLLVADRGRTLVVMAWDCDAYDYKPNAQLCALVYHHGLAIDRDLLDCMGVRADGLYNCXLNVRPVPCEWHMQXYPAKSYGSRLNSMNSPGCAALMTPSPYKRSSVFCSFRRXTILTARDXIQCAASEEKPRQFLSIAHDSSCMFLXEVSDTNVRRTVPCAXGLHHAGLEDRDRSLVEELF

SEQ ID NO: 164356 - protein, 53 aa, Oryza sativa
  Clone ID: PAT_MRT4530_63263C.1.pep
NCAETFTFPMKQFIFHTSYKVGYPHTFSVAQKTNLVSGGTNSSTTNLIVELEN

SEQ ID NO: 164357 - protein, 120 aa, Oryza sativa
  unsure (1)..(120): unsure at all Xaa locations
  Clone ID: PAT_MRT4530_63264C.1.pep
LTXSIMXXHKKSPRIPXSHSTFHQPAIQPNSCCXALIQGYRGNPRALFCSLLPGVSSTQPLSLHTQFIQLAPSNHSPPAAQCTAGLASHXSAGSSKHACTHASAPQHTITPSDHKFVQAA

SEQ ID NO: 164358 - protein, 552 aa, Oryza sativa
  Clone ID: PAT_MRT4530_63265C.1.pep
MASPNRHWPSMFRSNLACNIQQQQQPDMNGNGSSSSSFLLSPPTAATTGNGKPSLLSSGCEEGTRNPEPKPRWNPRPEQIRILEGIFNSGMVNPPRDEIRRIRLQLQEYGQVGDANVFYWFQNRKSRTKNKLRAAGHHHHHGRAAALPRASAPPSTNIVLPSAAAAAPLTPPRRHLLAATSSSSSSSDRSSGSSKSVKPAAAALLTSAAIDLFSPAPAPTTQLPACQLYYHSHPTPLARDDQLITSPESSSLLLQWPASQYMPATELGGVLGSSSHTQTPAAITTHPSTISPSVLLGLCNEALGQHQQETMDDMMITCSNPSKVFDHHSMDDMSCTDAVSAVNRDDEKARLGLLHYGIGVTAAANPAPHHHHHHHHLASPVHDAVSAADASTAAMILPFTTTAAATPSNVVATSSALADQLQGRLFRDWTCAWHPSSQKDAFNIASLSGLDFRMHRYASFLAVINLPEGGAAPPPPSATVVAVSRDDETMCTKTTSYSFPATMHLNVKMFGEAAVLVRYSGEPVLVDDSGVTVEPLQQGATYYVLVSEEAVH

SEQ ID NO: 164359 - protein, 122 aa, Oryza sativa
  Clone ID: PAT_MRT4530_63266C.1.pep
MSSKGLVVFALLLLAAAFLATSEAANSQPTYPPANGGSDGQAGGSSAAGGNGKSAGYVAPYYPGPWWWPNGGGFYPPPPFNGGPGWYDPQFGGCPFGCCGYGAFNECLQCCARPWFPFWWWP

SEQ ID NO: 164360 - protein, 105 aa, Oryza sativa
  unsure (1)..(105): unsure at all Xaa locations
  Clone ID: PAT_MRT4530_63267C.1.pep
MHSKVVIIGSGPAGHTVAIYACRADLKPVMYEGFLALGIAAGGQVTTTDEVENFPGFKMIQGAXLMDQMRAQSEACGTEIVFRPXGKVDLSQRPLSTGSTPWRRP

SEQ ID NO: 164361 - protein, 49 aa, Oryza sativa
  Clone ID: PAT_MRT4530_63268C.1.pep
MEGDSVELMKGNDGKLTASPWYAVVKLMDTRMQGGLCYYTRQARMSSEA

SEQ ID NO: 164362 - protein, 73 aa, Oryza sativa
  Clone ID: PAT_MRT4530_63269C.1.pep
VPAEAPPTWPMFWLALRHNKGLSSVCMYVVIGWHLKSPHNSCPARSATPVIKRGPKVISWAKSRTWPPRVLLP

SEQ ID NO: 164363 - protein, 154 aa, Oryza sativa
  Clone ID: PAT_MRT4530_6326C.1.pep
MGNWSGGCREKFREVFEWKDADVAFEVGGGGGVRFAAHRCVLAARSKVFKAELFGAMKEGDAACVVRIDDMEPQVFRTLLFFVYTDSLPEMRKEEEEAICQRLLVAAEVYGMERLKLICESKLCKYIDVGTVASIMALVDQSCPFITEELIGML

SEQ ID NO: 164364 - protein, 47 aa, Oryza sativa
  Clone ID: PAT_MRT4530_63270C.1.pep
LNRAVVTFVGFIHNIYSFSIQNTFYTDYSIFLPLHIYTNLGKKKKKK

SEQ ID NO: 164365 - protein, 788 aa, Oryza sativa
  Clone ID: PAT_MRT4530_63271C.1.pep
MLARWLLVLLLLLPVSWCHQDRHGRRHYPRRWRSSGSRRELHEPLFPLENAPALPPPPPPPPAPFFPFLPDSAPPQLPPPVTTPAPAGGAGDGGTDAGAAATGDASSSSSSSASPHPTAPANISYMAMPIYHSAPLRSFLSSHRLLTVLLPVAAVLAAVLAAALVYLLTRRRRCSKGEPHAAHTKAVLLSPGNSTALYDGDHDQHGRGSTATAASSASSPELRPMPPLPRQFQQTRTSMPSTSQTIHEAGAEDKRAPPPQSVRPPPPPPPPPPPPPMPPRTDNASTQAAPAPPPPLPRAGNGSGWLPRRYTERAAPTVIRASAGAVHPEESPARASPEEKAADAAARPKLKPLHWDKVRPASSGRPTVWDQLKASSFRVNEEMIETLFVSNSTRRASKNGVKEANAACCNQENKVLDPKKSQNIAIMLRALDATKEEVCKALLDGQAESLGTELLETLLKMAPSREEEIKLKEFREDAVSKLGPAESFLKAVLAIPFAFKRVEAMLYIANFDSEVDYLKTSFKTLEASCEELRGSRLFHKILDAVLKTGNRMNTGTNRGNASAFKLDALLKLVDVKGADGKTTLLHFVIEEIVKSEGASILATGQTSNQGSAIADDFQCKKVGLRIVASLGGELGNVKKAAGMDSDTLASCVAKLSAGVSKISEALQLNQQLGSDDHCKRFRASIGEFLQKAEAEITAVQAQESLALSLVRETTEFFHGDSVKEEGHPLRIFMVVRDFLTVLDHVCKDVGRMNERTAIGSSLRLENAPVLARFNAVQPSSSEEESSSS

SEQ ID NO: 164366 - protein, 592 aa, Oryza sativa
  unsure (1)..(592): unsure at all Xaa locations
  Clone ID: PAT_MRT4530_63272C.1.pep
GAPSGIGLWAALLVAAAVLAAGGGAAAAAAKDEAYVTLLYGDEFVLGVRVLGKSIRDTDTSRDLVVLVSDGVSEYSRKLLEADGFIVKHITLLANPNQVRPTRFWGVYTKLKIFNMTSYKKVAYLDADTIVVKSIEDIFNCGKFCANLKHSERMNSGVMVVEPSETLFNDMMDKVNSLPSYTGGDQGFLNSYYADFANSRVYEPNKPTTPEPETQRLSTLYNADVGLYMLANKACXLFVNVAFLTLLQWMVDEKELRVIHYTLGPLKPWDWWTAWLVKPVAVWQDIRKNLEESLPGTGGGRNPHDQSVVKILFSLPLFMLICGYYGSCFQVKFSSCWKYFSLHISYIMYLFQKLSLLSXNNLXLLTPLQSHNGAHLKLPSYFGAITVLVCFISALISLAFAFIIIPRQVMPWTGLLLMYEWTSVTFFLLFGSYLRVVYNWGSSSANHVGHNNLDSSENRLQRNTSDCDTDAAFYWSGMAILSSIALLSPTVLGITALFAKLGLMVAGGVVLASFMTYASEHLAISAFVKGQRDRISLDPPGTHRRFARQMPPYLPSSLHSPLHMRPPPPDEDDLVPLENWVSQKGIQYGSAP

SEQ ID NO: 164367 - protein, 91 aa, Oryza sativa
  Clone ID: PAT_MRT4530_63273C.1.pep
PFPSFSIDPDSASATAARAPLSRLRRLRTSHAAPSILSRLRTPSILLRRRPSSVQWPTLAACRFMPRNQMAGPQLRSYPRRDAHWSLSASR

SEQ ID NO: 164368 - protein, 166 aa, Oryza sativa
  unsure (1)..(166): unsure at all Xaa locations
  Clone ID: PAT_MRT4530_63274C.1.pep
ASAARRESKRGGRGPKQRLGEVKGISGGLVARGYDKAMAVVGARLRVMTAGAEERRGHCSGIXTQTVMSRCPLGVVRGCRREVVGGELTDERKRHRWRGWSRGEPAGGGARPSGDARRRTQRQGGMDGVATAGRHGTEVARPRKEKEGDEDEADAAPRLPTPTPRR

SEQ ID NO: 164369 - protein, 147 aa, Oryza sativa
  unsure (1)..(147): unsure at all Xaa locations
  Clone ID: PAT_MRT4530_63275C.1.pep
VVAPAVAFILYNVIIPVSVMIPELFLPIWGVAYIPTALLIVTFWMNLICHNCLFTPXNLHTVPLWILFESVMSMHRLRAAVAGLLQLQEFNQWIVTKKVGNNAFDENNETPLXEIGLSVFLIFCASYNLVFHGKNSFYINLYLHPRV

SEQ ID NO: 164370 - protein, 550 aa, Oryza sativa
  Clone ID: PAT_MRT4530_63276C.1.pep
MEAGEAAGAVLFLLAAAVSLLAAVSTGALDFTYLVTVVGEGSSTSPGSGGGAWWREAWVGARSRAVAPALQVGVWACMVMSVMLVVEATYNSAVSVAARLVGWRPERWFKWEPLGGGAGAGDEEKGEAAAAAYPMVMVQIPMYNELEVYKLSIGAVCGLKWPKERLIIQVLDDSTDAFIKNLVELECEDWASKGLNIKYATRSGRKGFKAGALKKGMEWDYAKQCEYVAIFDADFQPEPDFLLRTVPFLMHNQNVALVQARSQKEHGDSLLNTGTLLGTAGVWRTEAINDAGGWKDRTTVEDMDLAVRATLKGWKFIYLGDLRVKSELPSTYKAYCRQQFRWSCGGANLFRKMIWDVLVAKKVSSLKKIYILYSFFLVRRVVAPAVAFILYNVIIPVSVMIPELFLPIWGVAYIPTALLIVTAIRNPENLHTVPLWILFESVMSMHRLRAAVAGLLQLQEFNQWIVTKKVGNNAFDENNETPLLQKSRKRLINRVNLPEIGLSVFLIFCASYNLVFHGKNSFYINLYLQGLAFFLLGLNCVGTLPDHCCF

SEQ ID NO: 164371 - protein, 180 aa, Oryza sativa
  Clone ID: PAT_MRT4530_63277C.1.pep
MEVGAVSCYRRGSWRRCAAALALAVVVVFAADTQRLRREHRAPSRPAAPLPPSSCPPTRAELADASPHPRGSGRRPLPPGACSRPVDLAVVVSGPAGLAVALRIAEAGLSVCRPAAAIKLAPAPTSSHRAGSRCIRYYGFGTLTSAREHDPWNQIIAYKNINRGEVRYPPAKIDFRRRTT

SEQ ID NO: 164372 - protein, 549 aa, Oryza sativa
  Clone ID: PAT_MRT4530_63278C.1.pep
MGNTCGVTLRSKYFASFRGASQRHDEAGYAPVATSAAAAAAADEPAGKKAPRGSAAAADAPHAASMKRGAPAPAELTANVLGHPTPSLSEHYALGRKLGQGQFGTTYLCTDLATGVDYACKSIAKRKLITKEDVEDVRREIQIMHHLAGHRNVVAIKGAYEDPQYVHIVMELCAGGELFDRIIERGQFSERKAAELTRIIVGVIEACHSLGVIHRDLKPENFLLANKDDDLSLKAIDFGLSVFFKPGQVFTDVVGSPYYVAPEVLRKCYGPEADVWTAGVILYILLSGVPPFWAETQQGIFDAVLKGVIDFDSDPWPVISDSAKDLIRRMLNPRPKERLTAHEVLCHPWICDHGVAPDRPLDPAVLSRIKQFSAMNKLKKMALRVIAESLSEEEIAGLKEMFKAMDTDNSGAITYDELKEGMRKYGSTLKDTEIRDLMEAADVDNSGTIDYIEFIAATLHLNKLEREEHLVAAFSYFDKDGSGYITVDELQQACKEHNMPDAFLDDVIKEADQDNDGRIDYGEFVAMMTKGNMGVGRRTMRNSLNISMR

SEQ ID NO: 164373 - protein, 157 aa, Oryza sativa
  unsure (1)..(157): unsure at all Xaa locations
  Clone ID: PAT_MRT4530_63279C.1.pep
MASSLATAGVASISSIAAISSAKELSQVTNGSALVMRKTGGSRNVAGLKTQPGAGGLAKWYGPDRAKYLGPFSELEGGTPAYLDGTYPGDYGWDSSGLSADPESFXRNRELEVIHSRWAMLGALGMILPEVLADSGVPIKEPVWFKAGAQIFDSDGL

SEQ ID NO: 164374 - protein, 73 aa, Oryza sativa
  Clone ID: PAT_MRT4530_6327C.1.pep
GFFFFTGEVTTLYSQMIRVYLHTCMHAYIHIMLCKCSVTYSTHSYYIQINRGIVKMKIKLEQLPISPRALVKS

SEQ ID NO: 164375 - protein, 126 aa, Oryza sativa
  unsure (1)..(126): unsure at all Xaa locations
  Clone ID: PAT_MRT4530_63280C.1.pep
PPEMEKPVRNKRVRRLSKKYSXTDMLNKFPEEDLNAINNSDLVAESSGLQNSDPEAELQSPIKEHNGGDDSQKTETTPVEGGDVKKPKQATTPPMPPSPPKAAQPEEIDQPAQPVADNQSNDRADL

SEQ ID NO: 164376 - protein, 43 aa, Oryza sativa
  Clone ID: PAT_MRT4530_63281C.1.pep
MAAGGGPSPPAAGFGGDGRGCAPSPTGQQISGPKLLIKNYVAR

SEQ ID NO: 164377 - protein, 109 aa, Oryza sativa
  Clone ID: PAT_MRT4530_63282C.1.pep
MALQLATRSSKSLTLLVVVAAVIAVPLVLMCLLVAVAAASASAAASSGEYRPSYGDTYATCIPVAACDDTGCAIRCRDLGYNPGSACWTSKDIKLYCCCGHGRRLPSVA

SEQ ID NO: 164378 - protein, 191 aa, Oryza sativa
  unsure (1)..(191): unsure at all Xaa locations
  Clone ID: PAT_MRT4530_63283C.1.pep
APALRDSSMAGSIXSKKTLGFHPENALMGELPQRADAGKNSQSVKGLVILLFETALLTPGFSLGGPHPFGPRVPRMLKLGLSIDEGGSPEAYPAIPPLGGAPGESKMGGVVLTSWAPGCPSVPSSYPPPSFLFKAIWLLLFAFFLGRWRPPFCLCFSSSPMGGALSYCLGCHASSRSFCPLFFPTFNVFFF

SEQ ID NO: 164379 - protein, 81 aa, Oryza sativa
  Clone ID: PAT_MRT4530_63284C.1.pep
MGWTLVLRLHGLDRREEADQTRGGSSETSSPVKTMDDQMGCLARHGPGMIGPGLRSIGPARPDQQARPGWTCPQATRTAQA

SEQ ID NO: 164380 - protein, 120 aa, Oryza sativa
  Clone ID: PAT_MRT4530_63285C.1.pep
MVTVSLSHVRMADGQSPSLSTLAIAARLTETKARNDQGPVVDHVVHRTTWRTIRKTSEHKASMIFSIKFAAPIAFWSFSSKLFIRSERRPQQASVNISIQYEISRKPTKMIVGNNLAKRT

SEQ ID NO: 164381 - protein, 106 aa, Oryza sativa
  unsure (1)..(106): unsure at all Xaa locations
  Clone ID: PAT_MRT4530_63286C.1.pep
SISLPLAPPNRISISLLSLSLQLASPSPATSSPPARVRPGAPLVCGGGGGRKDGGVLXPPRPRQPLYASRERAGHSGHPDRPAPYEVLLARPPLACLMCNSYGVHT

SEQ ID NO: 164382 - protein, 157 aa, Oryza sativa
  unsure (1)..(157): unsure at all Xaa locations
  Clone ID: PAT_MRT4530_63287C.1.pep
LRLQTLMATHATLYTLLXTWCLPTFACTLTYTRPTTYVRSTHLPHVCYTCMTRTSNTRTTTGLQHNQRTNYFTHGHHVSGFAKLPLQAITLPDXSIRSPQAFHSHPHWGGLPPWPLPYWGGTLSPSICKGQLPNPRPYSGAILYKAKAGPWLGXIPI

SEQ ID NO: 164383 - protein, 185 aa, Oryza sativa
  Clone ID: PAT_MRT4530_63288C.1.pep
MAKELFMSGNLVVRLMVCTRITAHSIMLGFVLSFVIEPVAGAYSDPFSVRPEAESSRQLRRLLRLSARRLHRWSIDGGSCGRYVVRAKGSADGRWSSEGAAGSNGTGRGLLLLIEITRTLMDMGMEGTEAGGSSGWARRSIGVGGPLPIQWHDDEQAAACCCNPLARLPPSLLQCPPPPLHCRHG

SEQ ID NO: 164384 - protein, 71 aa, Oryza sativa
  Clone ID: PAT_MRT4530_63289C.1.pep
LENKEVKPVTNCRDTHEVKLEHGLQMSTIFKNHESGRNMLEDLDFYEQREKVLLENRRQLLPARPELQKLV

SEQ ID NO: 164385 - protein, 309 aa, Oryza sativa
  unsure (1)..(309): unsure at all Xaa locations
  Clone ID: PAT_MRT4530_6328C.1.pep
DMIENVLEIKDTHVREXLTSRVPVFEERIDNIVGIAYAMDMLEYVEEVEKLKEITVKEIAHMPTYFVPDSMSVWNLLREFRIRQVHMAVVLNEYGGTIGIVTLEDVVEEIVGEIFDENDSKEEIQKKTGYIVMLDDGTFDVDANTSIDHLSEELGVKIPEGHQYETVSGFVCESFGYIPEEGGKMLVILEKDNREENDEYKEEGSDNQDDKERTQAYELEILEANARKVGKVRFKPISSECVDVDSKGVNRMISKKIIKRKKQNPGDSSDSDDEECTDTSENGCPAELLYYSDDNSAQLEDAGNSAATR

SEQ ID NO: 164386 - protein, 646 aa, Oryza sativa
  unsure (1)..(646): unsure at all Xaa locations
  Clone ID: PAT_MRT4530_63290C.1.pep
MGFLNLVGNSFGCSASGERLVSAARDGDLQEARALLEYNPRLAWYSTFGGRNSPLHYTAAQGHHEMGKRTAILHSHFLLLACSNCFSVARIRRQDQPQELQGPGTSDELIPSAYDSMEARHDQAHKTRAFPFPQNLRTVRIRPLHVSTRPSSTSAPHRTVAPASPTSPAAAPLISAGRLLQASATRTAEMYRIAGSHLRSLKRYSYSRFASTSVVKQSSGGLFSWLLGEKSSQLPPLDVPLPGITLPPPLPDFVEPSKTKVTTLPNGIKIASETSVSPAASVGLYIDCGSIYETPASSGASHLLERMAAELNLRAAPDGRTRVSHLPGGGSPHLRRSPPPSLRDAHGRDVPHRREPLALSQEIQXSRFASTSVVKQSSGGLFSWLLGEKSSQXLLLMSLSRVLPFLHHCKTFLEPSKTKVTTLPEDFITENYTAPRMVLAASGVEHGELVSIAEPLLSDLPSVKRPEEPKSVYVGGDYRCQADSDKTHIALAFEVPGGWFEEKTAIIVTVLQMLMGGGGSFSAGGPGKGMHSRLYLRILNNYHQIESFSAFNSIYNHSGLFGIHATTSPNFASKAVDLAAGELLEVATPGKVTQEQLDRAKQATKSAVLMNLESRVVLLSDLPSVKRPEEPKSVYGGRRLSLSSGL

SEQ ID NO: 164387 - protein, 51 aa, Oryza sativa
  Clone ID: PAT_MRT4530_63291C.1.pep
VDMQKTCIAFDLISVNLGDLPVLPKVLPHLKLLFKNKMVVDESDEIQEAVM

SEQ ID NO: 164388 - protein, 78 aa, Oryza sativa
  Clone ID: PAT_MRT4530_63292C.1.pep
FVFFFFFFFFFFFFFFFFFFFFFKQTKNTLGDFHSGITGRKPPRIPTKLPRGKTLEDPKALAPPKGYQPPRVGPKKGS

SEQ ID NO: 164389 - protein, 49 aa, Oryza sativa
  Clone ID: PAT_MRT4530_63293C.1.pep
FEHLCAAYFYQTQADAHATVASNVESICGIYPNYYIAARSIPTTGGDED

SEQ ID NO: 164390 - protein, 96 aa, Oryza sativa
  Clone ID: PAT_MRT4530_63294C.1.pep
KKTKKNWPNESSTTNNSTQWKNPLSRSSSPAKNKLKHDTDQHRHDEISATASRTPHRGEIASKSLSHSTSRTPYLSLSLSLSTRVLERTRKIRTKA

SEQ ID NO: 164391 - protein, 56 aa, Oryza sativa
  unsure (1)..(56): unsure at all Xaa locations
  Clone ID: PAT_MRT4530_63295C.1.pep
DTSFFENTDRIQVMTTNPETTLLISSYESKLVLLMFIDDKGQIRSNHIGXHPWRSG

SEQ ID NO: 164392 - protein, 136 aa, Oryza sativa
  Clone ID: PAT_MRT4530_63296C.1.pep
MRTRCAINAARPLRIDGKASRCVTDCDGGPALPILPIGGTRSTVLKGEVPPSASTWRSPRGVASMDEWRPPIPDPEGRAASTPRGGHHVAAMQRRLVGTLPRPPNRIQCGRSERALQGRDGTAASHARLVCPVPSR

SEQ ID NO: 164393 - protein, 52 aa, Oryza sativa
  unsure (1)..(52): unsure at all Xaa locations
  Clone ID: PAT_MRT4530_63297C.1.pep
RMQTHQGVVVTKRLAHNTFKKQGYSVSLRDLVKAGVVXRPNALFASGPYFFS

SEQ ID NO: 164394 - protein, 85 aa, Oryza sativa
  Clone ID: PAT_MRT4530_63298C.1.pep
MRCWLSPRGEATRRSSWAMLDDEDRRVRQFATKSTIHDEPSLRAKAVKRNKRVSPKLEVASVEGLGDTVAPGGLLPLMGRPKEFT

SEQ ID NO: 164395 - protein, 94 aa, Oryza sativa
  Clone ID: PAT_MRT4530_63299C.1.pep
DIPPFFWGPPGAPFWGLLSLKPGIFFGQKLWGRFNLGGKIWGPWAKLIFFLGTLGGLGLSKEGLFLGDRWGENTFKGFFFFYLLFWGGCPGEPG

SEQ ID NO: 164396 - protein, 89 aa, Oryza sativa
  Clone ID: PAT_MRT4530_6329C.1.pep
TSSLSFGYSKNQAPSMNLLWLKDRLQINKLVLSVLDTECSYVRILAKAGIPRISLELKPISRIPPIPISYSHHPSDLFSSWHWLCGLCG

SEQ ID NO: 164397 - protein, 159 aa, Oryza sativa
  Clone ID: PAT_MRT4530_632C.1.pep
MAATACSTAPLLGGARLPAVGAALPPPSVLLLPQRNFPSPLRLHDAPRLSLLRARASSDDTSSSAATGDELIEDLKAKWDAVENKSTVLTYAGGAIVALWLSSVIVGAVNSVPLLPKFMELVGLGYTGWFVYRYLLFKESRKELADDVDSLKKRIAGTE

SEQ ID NO: 164398 - protein, 105 aa, Oryza sativa
  Clone ID: PAT_MRT4530_63300C.1.pep
RKVESRKAPNPNPSAQLESSSPPSPPNTTFRLLELSGASQFLAGLPRQMHSVTVGRDVEAGGDGEEGERQRAQPRQRRRHLRRPPRRRGGWPSHGLVSFRATTSC

SEQ ID NO: 164399 - protein, 104 aa, Oryza sativa
  Clone ID: PAT_MRT4530_63301C.1.pep
HVGAVADALNGDRVVALDVERDLHVLVVLLEPRAPPGRAPSVRAPVIGGAVAATAKCNRALLPAGHDQLTEQQCQTRTPQFTHTHKKNLRIFQQPETRRTIKNS

SEQ ID NO: 164400 - protein, 91 aa, Oryza sativa
  Clone ID: PAT_MRT4530_63302C.1.pep
LAEFESDKVSRLSRIRQCDMFEQKSAAKTYGILEFVRDKSRVRHRLVLIKSTGTLTHLKASFWTCTGVKQISQASCFYINTVPSQLSSLPL

SEQ ID NO: 164401 - protein, 86 aa, Oryza sativa
  Clone ID: PAT_MRT4530_63303C.1.pep
MRIYVKTLKGRIISLEVARSDTIASVKHKIYAERGIRTVQPPSPVRELGFEFDEQRRQVGFEFDEQKRHRPGKCQNSALPRLPGPS

SEQ ID NO: 164402 - protein, 177 aa, Oryza sativa
  Clone ID: PAT_MRT4530_63304C.1.pep
MPGGMGPPPACFTNIRFPLVYSTQGYNFVHLGTNQISNEKIQFNYVNIQQQVFDKTVSSMITAVLSKVTNLSTRFAKGKELLIAYNYKYIIYGLAQCSSELTCLQCQLSLYTKLEVSNSVTDTGKRENTGKVMCPSALASFEEITTSAHGKRVALFLDYDGTLSPIVDDHERTFVLP

SEQ ID NO: 164403 - protein, 60 aa, Oryza sativa
  unsure (1)..(60): unsure at all Xaa locations
  Clone ID: PAT_MRT4530_63305C.1.pep
FFFFFFFFFFFFFFFFFFFFFFFFFXKAIRSSIXXFIXGKHEYREHHLPFPPSVLPQQSN

SEQ ID NO: 164404 - protein, 78 aa, Oryza sativa
  Clone ID: PAT_MRT4530_63306C.1.pep
SIIITAKFKILKAPIDLKTKHRTQLYPKLGEPWPPPRRKGDNHLNPVAGGATLLRAGVGRRGHLLLALDPGEVGHAER

SEQ ID NO: 164405 - protein, 148 aa, Oryza sativa
  Clone ID: PAT_MRT4530_63307C.1.pep
GGNEPSRARLGSARGSSRNARLGLARLGSPTELYIRLGSARGLARAGSSWLDSSRTEPGEPEPSLSRVHEPELFVQPYLPRESVAGDRSESTWEKWMSRDQEIMRYTDSKVRSNRREGGGLTTGSVVVTPAVGGQFDRRLQDFVAYFV

SEQ ID NO: 164406 - protein, 72 aa, Oryza sativa
  unsure (1)..(72): unsure at all Xaa locations
  Clone ID: PAT_MRT4530_63308C.1.pep
PELGKDGNLKELEVVVVRFEAGFDQGTAGLDDMXRQCRTRAMMMGAPGDEKVVEESLEKLKKVLEEYKARLT

SEQ ID NO: 164407 - protein, 105 aa, Oryza sativa
  unsure (1)..(105): unsure at all Xaa locations
  Clone ID: PAT_MRT4530_63309C.1.pep
STIRSILIQTVSASKCTQGSLMYWLSVGPGDFQLSSAGCAYSALYAIVIESXIVPVPAGCKVITSSIPIKSQQFAVMKSVNYLPNALTKVEGEENGGFTGIWLDD

SEQ ID NO: 164408 - protein, 263 aa, Oryza sativa
  Clone ID: PAT_MRT4530_6330C.1.pep
MATATSTATSVAAALLLSLLLARARGDDDYSGFVYAGCSQGRYASGTQYASDVDSVLTSVANSAPYSPYANFTSPTSNSVVGVYQCRSDLPASVCTGCVRSAISRLSSLCAWATGGAVQLRACFVRYGNDTFLGKQDTAVLFKKCGGSPGDAGGAAMRDSALGALVAAAAPAGGGYRAGGSGGVQAMSQCVGDLGAKACSDCVSAAAGQLKAGCGYATAGEVYLGKCYARFWGNGGGGFSSGAAGDAYGSGHRVSGNRFTPCA

SEQ ID NO: 164409 - protein, 99 aa, Oryza sativa
  unsure (1)..(99): unsure at all Xaa locations
  Clone ID: PAT_MRT4530_63310C.1.pep
MATMDTIVAHIMDQQEDFKIKSSKCWDPIRPPATLLTSNDHRIYIRHPFRPIQPQFRIPYRFAAIKETRCSVTNSGPRGXIRLICIGKINNPWRGVSIA

SEQ ID NO: 164410 - protein, 57 aa, Oryza sativa
  Clone ID: PAT_MRT4530_63311C.1.pep
FRAQLTGVGSQPNFYGGLGGGPVKIFKPNFNFLRGPAPQGGFFFGPKLLNLKIPGGG

SEQ ID NO: 164411 - protein, 52 aa, Oryza sativa
  Clone ID: PAT_MRT4530_63312C.1.pep
ACSFLAIFRVLSLICCVADASRGHLSSWLQYYLERGPLGKNKGGNVGRQLVV

SEQ ID NO: 164412 - protein, 37 aa, Oryza sativa
  Clone ID: PAT_MRT4530_63313C.1.pep
NWYPDYVCSLYVKCTRMFFMLNPCIFKCRNNSSCDGP

SEQ ID NO: 164413 - protein, 205 aa, Oryza sativa
  unsure (1)..(205): unsure at all Xaa locations
  Clone ID: PAT_MRT4530_63314C.1.pep
ALPSKPPPNVILLLPGVNRANSCRTVGLKIDGGIPSHNSNHSPPSRPFSPSPPPRVAPRLAPTRRQPIPTAVKSILRRVLGPNRSSASSFTSPHQAKHRRPCATLFFSAAKFFRPQSVVSIDLAARPSTHQISSIAAARRRRRSLAPSPPRPQPLSPSTARFGERPEVEEEXERERLTGLEDSSDTLDNINQSQDIEQGKLPYTC

SEQ ID NO: 164414 - protein, 72 aa, Oryza sativa
  unsure (1)..(72): unsure at all Xaa locations
  Clone ID: PAT_MRT4530_63315C.1.pep
LHHHHQHQHHHQQQLFGSHYYSIDVKDASSAMRTXLLTSSLQLPQRMRLCRTYHFLIKDHKLCVFYLLMVRY

SEQ ID NO: 164415 - protein, 173 aa, Oryza sativa
  unsure (1)..(173): unsure at all Xaa locations
  Clone ID: PAT_MRT4530_63316C.1.pep
MSSRPHNEEPLPLLSAEERDRDMKGELDVEGDAGRAEPPKNNNLEHEYSIPSTVKFAWLGTYFFFSLLLTLYNKLVLGMFHFPWLLTFLHASFASMGTYAMMQMGYFKLSRLGRRENLALVAFSALFTANIAVSNLSLAMVSVPFYXTMRMLCPIFTILIYRVYYGRTYSYMT

SEQ ID NO: 164416 - protein, 112 aa, Oryza sativa
  unsure (1)..(112): unsure at all Xaa locations
  Clone ID: PAT_MRT4530_63317C.1.pep
MSDVVPGATVGDMGPGGRGLGVPRHAPRALALLCPEALTQPPFGGGSKRGRGLDXTSFNARSADGGHHKSSSINEGMTGLSPVSGEGRRWAPLKDKLWFSFQAKARVEFQSR

SEQ ID NO: 164417 - protein, 150 aa, Oryza sativa
  Clone ID: PAT_MRT4530_63318C.1.pep
LFGTSKEEIVIWKEACRGFHQGFRSCFFKLCWEDAFPASETSVSAWTVVSPCLRRRFHSSAGEPLQRSSRSLPAVARIRSSTARWMNGSEWQIYSSIDEGNKSTREGQQLLTLVGPMDGVWTSQIKAQCRQEEKKNQSSGRPWSIVGVLQ

SEQ ID NO: 164418 - protein, 80 aa, Oryza sativa
  Clone ID: PAT_MRT4530_63319C.1.pep
PFRSNLNPPRELTPTFYPQTSLPFLAFILKFSEPGEVKLCTGALNHPPPPPNKYWAFSSSPKKKMPRGGLIKQIFIPNQL

SEQ ID NO: 164419 - protein, 650 aa, Oryza sativa
  Clone ID: PAT_MRT4530_6331C.1.pep
MPDYKVPGIEIVSNVISMTSSGLPVESRRLKVWAFVSDVRGHWASASPAQSWSRGWRCPLLPAAATSPAAHLAPAAAGGASLLRDSPAGAEREAPLAAAAAAAGRGVGRVGRRRGESTAMVFGELFSRASLPPPWSLLAYGLVGPVLLWQAGRLLDRLWWRPRRLERALRAQGLRGTAYRFLLGDLREFGRLNEEAWSSAPLPLGCHDIVPRVTPFVHRNVRDNGRPCCFSWFGPIPSVTITDPAQVRDVLSNKLGHFEKPKLPALTKLLADGLTSHDGEKWVKHRRIMNPAFHLEKLKLMLPAFSTCCEELVGKWMDSLGPDGSCELDVWPEMQSLTGDVISRTAFGSSYSEGRRIFQLQTEQAELFIGAIQKFVIPGYMYLPTKKNRRMRRINSEVESILRGIIGKRMQAIAEGESTNDDLLGLLLESNMRHADENGRSSPGMTTEDVIEECKLFYFAGMETTSVLLTWTMVVLSMHPEWQDRAREEVLGLFGRDKPEYEGLSRLKTVTMVLYEVLRLYPPAIVFSRKTYKEMEIGGVVYPRGVILELPVLFIHHDREIWGRDVHEFRPERFAEGISRASNDRGAFLPFGWGPRVCIGQNFALLEAKMALCMILQRFEFELAASYTHAPHTVMTLHPMHGAQMKLRMI

SEQ ID NO: 164420 - protein, 73 aa, Oryza sativa
  Clone ID: PAT_MRT4530_63320C.1.pep
MGSMPFPPGVGERSSGEIGNTENYEVITADRAIDESNVGNRILRNMGWQEGLVRSITNFGYYSLMAFLAAAWI

SEQ ID NO: 164421 - protein, 81 aa, Oryza sativa
  Clone ID: PAT_MRT4530_63321C.1.pep
MRDDDSSTCGKPADGGGEAATRDDGADTMMTTPAGKPADGAEAAMRDDDTSGCGSGQRMKAGGPYTRLEKLFLTVQKHFFY

SEQ ID NO: 164422 - protein, 92 aa, Oryza sativa
  unsure (1)..(92): unsure at all Xaa locations
  Clone ID: PAT_MRT4530_63322C.1.pep
QRRPWRPSHSKRLVLSMDYYRMSCPFAEIVERSVVSHALMGDPSIDARLLRLHFHDWFKQGXDNSVLLDVTPDNTVRKDTLANKRLRGIKGH

SEQ ID NO: 164423 - protein, 171 aa, Oryza sativa
  Clone ID: PAT_MRT4530_63323C.1.pep
LVGGFAGHAGDEEEEESALRALVHVSQICQRSAASKDLVRRRGVLRAVAEMLKSGSRRLRLKSLQVLRVLVEDNDDNKEELGKGDTIRTIIKFLSNEHVQERELAVSLLHELSGHEPTCERIGAVYGAILLLVGMGSSKSESAVAVDKAESTLRNLDRFDANGQQMADNGR

SEQ ID NO: 164424 - protein, 467 aa, Oryza sativa
  Clone ID: PAT_MRT4530_63324C.1.pep
MVLKKSTGRSSGHASTSYDASAGGGAVAVSAYEQRIRRNAAVLEKVAVSVHDSLASTREAALAELIAALEGFLSADDAEGGHTDEILRGCYVSIKKRAAREACVALRAVALLAVTLGPGATSKKIAAVETAANPLGSGANKIMKATYPLASRILEAPQADASLVVAALECLAVVAFVDVAAENMDDTEACMNALWAVICPSAGPKLASAAKGTASPRVLAAAVSAWTLVLTTTGGWNKKKKVSPAAPWRGAAAHAHLVSLLGSDSREVRMAAGEALAVAIEMKLFTEKNNGALFSKMEARASDLANDAAGAGVDKTNFVEQKELFKDITTFLAGGKPPVISVRTSSSNYGLLTTSTWTDNVRLNFLRRFLAGGFLHHLQGKGLMGQVFVIDDDEVTGKLSAARSKRSLMKDTRIVKELNGGRGGGGGAMDEKKEKKQEMIKNSLEKKRTVKKERLIAHELKHGSSDL

SEQ ID NO: 164425 - protein, 166 aa, Oryza sativa
  Clone ID: PAT_MRT4530_63325C.1.pep
MASGAGGGTAATERLIRSAQKSTNQLKAMLAGGGGGGGRSSGAVEVILADISDSLSQALASLMLRAACDDQSLPAAAAAAAAGGELVAVLWAVCGGEQRRPVSLEEESSTEKMSREDTEKVFFFSSRFSPEKEMVVYLDLERVRASLAVAPTFESLKVKWGLPSMF

SEQ ID NO: 164426 - protein, 852 aa, Oryza sativa
  Clone ID: PAT_MRT4530_63326C.1.pep
MAGEGVEMSEEEGAFEAFVCPLTKQVMRDPVTIETGQTFEREAILKWFRECRDNGRRPTCPLTQRELRDTEVSPSVALRSVIHEWRARNEEKDLDRACASLVGGFAGHAGDEEEEESALRALVHVSQICQRSAASKDLVRRRGVLRAVAEMLKSGSRRLRLKSLQVLRVLVEDNDDNKVANPIHPPNFNLPPNQARIDRFLVLILQEELGKGDTIRTIIKFLSNEHVQERELAVSLLHELSGHEPTCERIGAVYGAILLLVGMGSSKSESAVAVDKAESTLRNLDRFDANVKQMADNGRLQPLLTRLLRGEPDTRVAMADYLGELALANDDKAAVAEQAGPLLVGMLRTGATPAKEATLKALREISSSEASAKLLLQRAGVLPPLVNDVLFSTGHLPMKLKELAATILANLVASGADFRSIPLDDDEDDDGGGGGRGRRRTLLSEDVVHSQLHLISNTGPAIGCRLLSVLAGLTSSRATVADVVAAVKSSGATISLIQFIEAAHRDIRVESLKLLRNLAPYMGAELADALGGSLSSLLRAISSDGGGVTEEQAAAVGLLGDLPEGDSSLTRQLFDLGAFRALAPKLAELRRGTIRGGNRYVTPLTEGVVKVMYRVTCALEEDAEYVEFAREAGLAPLFVELLHTNGMDTVQLYSAMALEKLSLQSSHLTAIPAPPSPPAGFGCACLGRRPAAAAVPAGVCRVHGGFCSLRETFCLAQADGGKAVERLVACLDHLDGRVVEAALAALSTLVCDGVDAREGVVVLGEADGLRPVVDIMVESRTEALQRRAVWAVERILRVEEIAGEVAADQTVASALVEAYRNGDPRTRQTAERALRHLDRIPNFSAAFQSKRS

SEQ ID NO: 164427 - protein, 54 aa, Oryza sativa
  Clone ID: PAT_MRT4530_63327C.1.pep
FFLFFLEILIILDFGLKRMLWIECVKEQYIDKETVSQSQKSIGLQNKGFVLFCN

SEQ ID NO: 164428 - protein, 314 aa, Oryza sativa
  unsure (1)..(314): unsure at all Xaa locations
  Clone ID: PAT_MRT4530_63328C.1.pep
QPHVIVNCAAISVPRQCETDPAAAMATNVPSSLVTWLLSFGNDNTLLIHLSTDQVYEGVKSFYKEDDETLPVNMYGKSKVAAEKFIIEQCSNYXILRSSIIYGPQTISPVAKSLPIQWMDSVLSQGQQVQFFNDEFRCPVYVKDMVDVVLSLTKSWLADGKAVQVLLNVGGPDRVSRLQMAESVADVRGYSHSIIKSVSASSVDRGVASPPDISMDITKLTQMLGIKPISFQDGVRATLAAEATILLGEASTNFAENCGSIKTVSGPSATSLMQLLNLKFYTCEALYQSLKRSLNTLFCDFQQMESMLGKILIL

SEQ ID NO: 164429 - protein, 91 aa, Oryza sativa
  Clone ID: PAT_MRT4530_63329C.1.pep
PFSSIDHVIIRACAIISSLSIWPLNLVFKCFLSNTGHSSISFIASIMVTPGCLLIVIQNTPLSGAVVYFTSVLPSAPRGHPVQCPLSIQLR

SEQ ID NO: 164430 - protein, 63 aa, Oryza sativa
  Clone ID: PAT_MRT4530_6332C.1.pep
MGSKDGFSDNKLFDDFAVGRSNPTEKNYYQTVKTEFVTFVDYQKWVFHLPPGDMTGSLGEKLI

SEQ ID NO: 164431 - protein, 716 aa, Oryza sativa
  Clone ID: PAT_MRT4530_63330C.1.pep
MASPRNEGFLTQDQREKLRIAVQNAETLSLASPRSPTGGSTSALLQQYEQQRAAAAAAAARGGGGGGGGGGVRHVRRSHSGKTIKVKKDGAGGKGTWGKLIDTDTDACLDRNDPNYDSDEEPYELVEAPVSTPVEDYKKSVAPIIEEYFSTGDVKLAASDLKELGYDDFHRYFVKKLVSMAMDRHDKEKEMASVLLSSLYGDVISSTQIRLGFVMLLEAVDDLAVDILDAVDVLALFIARAVVDDILPPAFLSREKASLSESSKGMQVVQIAEKSYLSAPHHAELLERRWGGSTRTTVDAVKLRITDLLKEYIKNGDTAEACRCIRELAVPFFHHEVVKRALTLGMESPTAEALIVKLLKEASEELLISSSQMMKGFSRVVDSLDDLSLDIPSAKSQFQTLVSKAVSEGWLDSSFVHVGANGDVQDDEHEKLRRYKKEAVSMIHEYFLSDDVPEIIRSLKELGSPEYNPVFIKKLITIAMDRKNREKEMASILLSSLSMELFSTEDIVKGFIMLLESAEDTALDILDASDELGLFLARAVIDDVLAPLNLDEISGKLPPNCSGAETLNMARSLATARHAGERLLRCWGGGTGWVVEDTKDKIAKLLEEYESGGDVGEACNCIRELHMPFFNHEVVKKALVMAMEKKNDRILGLLQECFGEGIITINQMTKGFSRVRDGLDDLALDIPDAREKFLSYVEHAKKSGWLLPSFGVATSA

SEQ ID NO: 164432 - protein, 55 aa, Oryza sativa
  Clone ID: PAT_MRT4530_63331C.1.pep
RYIHQQLYYFEIFINMRVFHQTILYSTYIILFFTQHLSHSIKYIQHFTTFLFPHF

SEQ ID NO: 164433 - protein, 264 aa, Oryza sativa
  Clone ID: PAT_MRT4530_63332C.1.pep
MDPQEKNSQSTSFGASMEEIIVVCKNIFKMTGTLPHWVSNGIKGGNWPHFNARSFSKVVTNHCFKQNDNRLIGLLFTARHMFSGLDDDMVPKQNMVFKDYDSVYDFYEKYAYHAGFDIRKSRTKKTIREICCSREGHHKFYKGDEFERERNHRTKKTGCKAYMKVKNVMVDGEVSSVVYDVVVLEHNHPLTPSLAAVKHMRSHKHTDDTIMEFVNTMQENRVAQNSLIGVLADMHGGQENIPFTSRNLENRFVSCICHLPIELH

SEQ ID NO: 164434 - protein, 61 aa, Oryza sativa
  Clone ID: PAT_MRT4530_63333C.1.pep
RSNQVFVSWVQALSRCVSWGSFLFLPVHDAFLSQIEPSMCFLGSGVEQVRFLGFFLVSPCA

SEQ ID NO: 164435 - protein, 59 aa, Oryza sativa
  Clone ID: PAT_MRT4530_63334C.1.pep
TLGGPAKLQELDRFACMPTYKEECAYKRRKPIRNIMTLGTEIRIDLKEVTTDEKMLEHR

SEQ ID NO: 164436 - protein, 105 aa, Oryza sativa
  Clone ID: PAT_MRT4530_63335C.1.pep
MAREPPRFPVPHARLRRGVVGAEEAVRGYDYETRYFRQRLDHFKNFCSCYVPTLVIMLLRHFYETDLKRDSMGEVSRCTLVIMLLRHFYEKDLKRDSMGEVSRWI

SEQ ID NO: 164437 - protein, 30 aa, Oryza sativa
  Clone ID: PAT_MRT4530_63336C.1.pep
IRETQLICTYQVLMFQHHSNMNISSEQLSL

SEQ ID NO: 164438 - protein, 276 aa, Oryza sativa
  Clone ID: PAT_MRT4530_63337C.1.pep
MDGICLVNKKRRLMLRPCVGEVDHSSKRVRSQCVKFESLPELLLKCSALEWLTIRMCSQLHNLYAPEPLPRLAFLCVQDCAIDKIDVHAPNLTTFKYRGRFKVVIALRECLKLKTASIASPIEDNLYYIFTELPNGLPHVERLHVNVFVKTQIPGFTQAPHKFINLRHLTMRITYEIAKRFGRNAVLQLAYFLEAAPFLVDLHLDSLKRACITGFNGNGGQVALVKFILRNAVKLEEMVIDPKGRITNQMMGEHKGRRMIKEKLVPKDKNGLLVIL

SEQ ID NO: 164439 - protein, 51 aa, Oryza sativa
  Clone ID: PAT_MRT4530_63338C.1.pep
RQYLRKAAGRVGRPGNSGPVPARRTHAFPYYVTSYLEAWRNSVVTSCFLVV

SEQ ID NO: 164440 - protein, 543 aa, Oryza sativa
  Clone ID: PAT_MRT4530_63339C.1.pep
MAAPEDGEDKNFGKNKHGLPIGFYFAPTDQELLAILEAKRLGRPLSRAHDAFFHDIRILDFHPAELYEKYAKDEEKGYFYFFSKREFPTSSKKRPLRVAEGGAWNSSGAVYKVVKSSKSGGGYDVGHKKTLVFHQRFPGDKEAVKTNWAIQEFTRIIGPQNEVPDLAVYRLYKMRKEGRETPADLAADEAAAAAAMNNRGQQASAAAMALPPPATGLPGGRMMSMADKANMASTSKAYGPSKSSSSQLQQDAAAAAAPPNAAGASNWAPRPCNCRECAPAAGHYGYFAAAAAMNNRGGQASAAAKALPLPAPGLPGVRRMSMADKANMASTSKAYATSQSSSSQLQQGAAAVAAPPNAAGPSNWAPRPCNCRECAPAAGQYGYFASMVPRPSLDRKGKGKAPMDCAEQAGGGGGCHAESTSTPAPPKGAEYYGCSVAVEDDDEELLKFLQAMVRGEEVEGDGDHAMADERGPQQGSSPVAAAAASGSAPAGHDGRRGSLQGGHHGSSSPTSLAAAAATGDDVTSAASAGDDVSGSQQEDHPAR

SEQ ID NO: 164441 - protein, 100 aa, Oryza sativa
  Clone ID: PAT_MRT4530_6333C.1.pep
MAKARVNLTVLGLSSLVALLVLIIAVEDVAVVAQVIDYSSMNRDHIPGTPQLNHPGDIANKYTRGFAALAKFAMIFARKHCKNVDLLMDVYHKIIYGVLL

SEQ ID NO: 164442 - protein, 484 aa, Oryza sativa
  Clone ID: PAT_MRT4530_63340C.1.pep
MDGICLVNKKRRLTLRPCVEVDHSSKRVRSRCAKFESLPEGLDADAFVQTHYQDIVSRIISQLTLKEAVVMSSTSTKLRRAWIYHPNLYLDTSIVFGSSDRQKRVPSTETFIDTVNFILRTHSGLGVNKLAVMFELRKEHAHDIDGWVSFAVTSKARVVTLNFSPYHGSHDRSYNFPCHLFNGKSGSHLQVLQLDTVTLGPSPPGFCGFANLTMLTLENVLVLGDLQFLLKCPALEWLTIRMCSQLHNLYAPEPLPRLTFLCVQDCAIDKIDVHAPNLTTFKYRGRFKVIIALRECLKLKTASIVSPIEDNLYYIFTELPNGLPHVERLHVNVFVKTQIPGFTQAPYKFINLRHLTMRITYEIAKRFGRNAVLQLAYFSEAAPFLVDLHLDMLCLDFYESRPARDVIMNRPHYSLKRACITGFNGNGGQVALVKFILKNAVKLEEMVIDPKGRITNQMMGEHKGRRMIKEKLVPKYKNGLLVIL

SEQ ID NO: 164443 - protein, 477 aa, Oryza sativa
  Clone ID: PAT_MRT4530_63341C.1.pep
MARWTDNVLAEVIGSGAEAVEGGTACRPSRRRAPRRGSDVATVEGGARYHRYQIKDITGIRYHVAGITTARMSSRRPRRLLLTLPDEVLEEIFLRLDALPDLARASAACATFRRLITARAFLRRLHSLHPRPLLGFFKREGPSCEFFPAAPPHSSSAAASAVARGAADLTFSFLPATPGGWRLRNIRRGLALLSTRDGGGGCFFPDVVVCDRLHRRYAQIPQIPDDLAAPIRRSGSLPKGFDYLLAPARREEEEEEEEDSSFKVVCRPRLTEECDITVFVFSSGAGIWRAATLGSSLATAISVTSRPRCVHRCVYWLTRFLDRLLILDTDEMELSMFDNFPPSTGFVLNHTTAAIAEAGEDRLGVFNLDVHNVNLLSRAIRGSADEQWRHDKTIPLLPGYSIWRFVNHADVDGYILLGGVLGSGLQSDPITDGLQYFSLDLKTFRLERLCPMTIYQARNSPTELYTSFPPPLSLSSI

SEQ ID NO: 164444 - protein, 135 aa, Oryza sativa
  Clone ID: PAT_MRT4530_63342C.1.pep
PTRPPTRPAKHMSRLLMLATTATMEEEMLEEQGESRRVVRLEQEVLIHIQVRRIKQEDEKARGLLQRLQLLEMRPTATAVIGFRELARPPSPSPLRRAGCIVLVFLFDPFLAGIASDKNAEVTSASKADEAKRED

SEQ ID NO: 164445 - protein, 99 aa, Oryza sativa
  Clone ID: PAT_MRT4530_63343C.1.pep
MFMVVSFFLTLRSHVRREHTYATQSRKIQHRNNTTCNLNNTILNKSVWFYKITTHNLPFLLQMSSLVNLSRIGADDAPTYANSDKVNAVITLNFKQTNK

SEQ ID NO: 164446 - protein, 441 aa, Oryza sativa
  Clone ID: PAT_MRT4530_63344C.1.pep
MGELGTGMTRAEVDVKRREQRGARVPRYSGSRIGEATAVEKSLSPRMSRLATAFAHSRAAYGDGATQSPLLSPAPPSTARRAVAPPFSAEPSLQLACAAPSSLGASPQASAQPGLMTRCSGGNPGMLKAKGFPDQWCDWIMKVVMGGKVAVKVNDQIGHFFKTYKGLRQGDPLSPLLFNLAAEALTLFLQRAEENSLIEGLGTTGDNQIAILQYADDTIFLIDDKLDHAKNLKYSLCLFEQLSGLKINFNKNEVFCFGEAKEKQDLYSSIFTCKITKGVQERIDYFRKRFLWQEDQGIRKYHLVNWPLGMGKKTLFWEDSWLGGRPLAIQFPSLYGIAIIKRITIADLNRKGIDCMKFRRDLHRDKLRDWRKIVNSWEGLNLVENCKEKLWWTLSKDGKFAKQEASRRNLQLGTRLLKQVANDVFNSRHGWRGGTRRIGVG

SEQ ID NO: 164447 - protein, 1026 aa, Oryza sativa
  Clone ID: PAT_MRT4530_63345C.1.pep
MMMLCTGKGRLTYGAICHCQSAICTVDNRKRHQLTSVYVSLVSTREHDEIKIIIQGFKHDYGERHEIFSRNLKVYVILVGKSLLHISVDQEKYIFYVILVRFRGVTRSSKNCTLAFLEVLIARSSQVGYVLNVLISIEYACPQQEDEFLSPSSGRASKYRCAVHGLYWIRTSNPVYMWQKRHMLVQDGVCIEGQRDLMMYITNFYKNLFGHSQEVSISLSLDNVMKVTEEDAIGLITPVTMEELRNVVFDLKKNKSPGPDGMPGEFYIHFWDLIKHDLLDLINDFQRNSVNIDRLNFGVITLIPKTKDASQIQKFRPICLLNVSFKIITKVLMNRLNGTMAYIISKQQTAFLKNRFIMEGVVILHEVLNSIHQKKQSGILFKVDFEKAYDKVNWVFIYRMLKAKGFPDQWCDWIMKVVMGGKVAVKVNDQIGSFFKTHKGLRQGDPLSPLLFNLAAEALTLLVQRAEENSLIEGLGTNGDNKIAILQYADDTIFLINDKLDHAKNLKYILCLFEQLSGLKINFNKSEVFCFGEAKEKQDLYSNIFTCKVGSLPLKYLGIPIDQKRILNKDWKLAENKMEHKLGCWQGRLQSIGGRLILLNSTLSSVPMYMISFYRLPKGVQERIDYFRKRFLWQEDQGIRKYHLVNWPLVCSPRDQGGLGVLDLEAMNKAMLGKWIWRLENEEGWWQEIIYAKYCSDKPLSGLRLKAGSSHFWQGVMEVKDDFFSFCTKIVGNGEKTLFWEDSWLGGKPLAIQFPSLYGIVITKRITIADLNRKGIDCMKFRRDLHGDKLRDWRKIVNSWEGLNLVENCKDKLWWTLSKDGKFTVRSFYRALKLQQTSFPNKKIWKFRVPLKIRIFIWFFTKNKILTKDNLLKRGWRKGDNKCQFCDKVETVQHLFFDCPLARLIWNIIACALNVKPVLSRQDLFGSWIQSMDKFTKNLVIVGIAAVLWSIWKCRNKACFERKLPNDPIELVYLACNWVDSWAILQKQEASRRNLQLGTRLLKQVANDVFNSSHGWSGGIRRIGVG

SEQ ID NO: 164448 - protein, 78 aa, Oryza sativa
  Clone ID: PAT_MRT4530_63346C.1.pep
RPWRRSGCTRRSGSPSRQCLGLGCGPWWRAPGELLLAVDTNSSAQQQPSWGAGGAGAHRVRERSRRRRWCCRGGGMHM

SEQ ID NO: 164449 - protein, 230 aa, Oryza sativa
  Clone ID: PAT_MRT4530_63347C.1.pep
MVREAPKPKGGDEHLAPPAPTRGRSPCRSHATRAEAPRPPASRRTAARPPASPRHGTCGGRLVPTSRPAPAGRRTAAWRRPERARRRCCRCASRGSPRPPRRGTKASGGRTRWRRPETAAARASCTRRRGAWRPRRAGGRRRRRRGRPRSAARRRRDHPPRPRGRGVRRRQSGRRGAAAGGTGRGGGRRGRRRGRGGCGGGGGGGRGGSRRARSRWRRGGSRGRGAARRR

SEQ ID NO: 164450 - protein, 336 aa, Oryza sativa
  unsure (1)..(336): unsure at all Xaa locations
  Clone ID: PAT_MRT4530_63348C.1.pep
GDIQDHPVGVGYSHADDRSXGLATTDVQAAADATELVKALATRILPDLKSSPLFIVGQAYGGKLAAMIGASLAKPIRAGDIDLTLGGVVIGNGWISPADFSTFTGRDTAISYFKFSLVIRVPIRLTYARMLSDVSWLDGNAIDDVNKMAGKVKEQTAAGQFATSLQTFTDLLYLIDSKSDSVVXMFNYMTGTGMGMMLITGGNTPEAARRXLTRYLGRDISTIMNGVIKRKLKIIPKDLVWQQFSLDVYEAMKNDFMRPAINVVDELLSLGVNVTLYNGQRKPLHFCLPYYIPNGFVKAHKNLQHYSILQAGQAVPVDQPCTVLHMIGAIMQSPDV

SEQ ID NO: 164451 - protein, 110 aa, Oryza sativa
  unsure (1)..(110): unsure at all Xaa locations
  Clone ID: PAT_MRT4530_63349C.1.pep
GLGFFFFFFGFQNTISFKKISQVHKPLVHMPRTTKLLEELHDKFVGYKPNDFWGGRENSRAASVSSFXFCFFSPALGALGGASPGGGPGGGPSPIGGAPPTGPMVTLKTG

SEQ ID NO: 164452 - protein, 143 aa, Oryza sativa
  unsure (1)..(143): unsure at all Xaa locations
  Clone ID: PAT_MRT4530_6334C.1.pep
MARQQHQREEERAPMGSAQRRLRAVYCHLQPPTESGXVDLAANPTAGEYSHVQGYSAVLPEKLQTGKWNVYISSXSPLKLINRFPDNPYIGTLHDNFVCAVETFRDCRYLGTXVCVDGTVGDYXWMTYGEASTRPTAIVLVLL

SEQ ID NO: 164453 - protein, 59 aa, Oryza sativa
  Clone ID: PAT_MRT4530_63350C.1.pep
RNSLFASVSWPLPLITSLKLLIHSMTLVLNFYPLFAPPITLRTVQISKGQIEDNRLEKG

SEQ ID NO: 164454 - protein, 530 aa, Oryza sativa
  Clone ID: PAT_MRT4530_63351C.1.pep
AQQLNEVKSISLVKLNGLNVDFQVCSLQLKEVKVISLLQLNFLAFVSDAGMLFGWYGGVAALYLPLGLAYVVRASFRLLGYGVHFLIYKRPWLAYWQLFLLACLAGIGLSWSNTVRNLLCFKTFPSKSRGAVSLRYSKEEVNVLLNAVVPMLVTLVAAPSLRVVELTSHRRTDPAFLAMFAITLATGACAVVGSIGSKSIGLSTSEHMISLYILLALPVLIPAALKVRESMDKLREAKRENRVHDVAAATDVPETAVSVLEVAEAAENKEEDDAAAGESGGQDEVGGIRLLRRLDFWLYFLSYMFSGTLGLVFLNNLGQIAESRGLSDPSTLVSLSSSFGFFGRLLPAFLDYYTAKSGYSLSRTASMAALMAPMAGAFFLLLDPRDMFLYTSTAVVGTCTGAITSVAVSATGELFGRKNFGVNHNVLVANIPVGSLCFGYLAAFLYQREARGASRCAGAACYRGTFLVWGATCAVGTALCTVLYARSRGFAGRLPPPARSTTMPCAGQRPATNLGDDNKGPEPEVSSTAV

SEQ ID NO: 164455 - protein, 609 aa, Oryza sativa
  Clone ID: PAT_MRT4530_63352C.1.pep
MLLPVCSAAPTCSPLCPVTSSVAHVVGAPALRGRVVEVSALRSYADPLVARPVPDRPLLADSSILSPYSASPDDIVRGLAAAEVPSADATAAGDALCCGGVEPATLTAVSDLAATTADAAVTDAAERALLDAPVPTTFPADASDAEAAFARLIDSLGKKIFQAEDALTEGYDKLRLSAYQSLSAWRKSVDGAVGGLTASVDATKKQAAGGVTDASGALQDKVAGAGTVAVDVLRKAIVAAEDSLGSAATSIGYYYGSTKSSLPPNVKDLLNSSEEKASLVLKPIGGALQQVYVVVEGIEKNVGLDPSDPIVQLAVLLGGSTTIGLTYWLFAYGGYSGDLSPESTLELLRNDDKAVLIDVRSEDLRVKDGIPDLRRAARSKYATAASPEIKGSVKRLLKSGRDVDDALLAVIIRNLKLVKGDSKVIIMDANGSRSKAIARLLKKLGVQRPYLVKGGFQSWAKKPRVKELKPETALTVINEDAEEILEDIKPTPTLVLGSLLGLSAAAYALLEWETTLQYIGVLSLGLTIYLRFSTYEGSEDLEQDLKLLLSPLRVGAEAFSWAAKKLEPSKIGLATSPSTTAVQDRVLQAAAKHESQPSDAEADSLVSEA

SEQ ID NO: 164456 - protein, 37 aa, Oryza sativa
  Clone ID: PAT_MRT4530_63353C.1.pep
HEEWIGSRATSPSLLKMHFHFTDSVIQLTNKVSTKDE

SEQ ID NO: 164457 - protein, 146 aa, Oryza sativa
  Clone ID: PAT_MRT4530_63354C.1.pep
AKFGTGHSKIVVFAQHDAFYRPRHAQQQQHSVWLLVHTDASHPLGADVLRSDAHRHQLPQHASPVSDASSRFMPRSVRPPPRSALYTVPKLPLPMEYASLKCSVADRMLPQDVLMEIFALLEVPDLVRAGSVCSSWARSYISLCKP

SEQ ID NO: 164458 - protein, 226 aa, Oryza sativa
  Clone ID: PAT_MRT4530_63355C.1.pep
MAAMASSAPTAAKPVALLPAPICRCGGGGLRSTLLALMPPAAAAASRFRVSASASDVPDFLSSDWLETRKKKPFGPRLNFNAEEAVEYQLEALKYNDQPRQDYGIEVMYRFAGFDPFERSTYFGRQFDLGQNLYKQRVWVRGSRPEEEAIFQFTMVQRVGGSWDGYWLTESLINDDGDALSEVELLTAQVPDFRVYLRCFLIDLITWLMTAGDEGVREPCGVPPNR

SEQ ID NO: 164459 - protein, 220 aa, Oryza sativa
  Clone ID: PAT_MRT4530_63356C.1.pep
MAGTRRAEEEYDYLFKVVLIGDSGVGKSNLLSRFTRNEFCLESKSTIGVEFATRTLHVEGKIIKAQIWDTAGQERYRAITSAYYRGALGAVLVYDVSKPTTFDNISRWLKELRDHADANIRIMLVGNKTDLKHLRAVATDDAHKFAEAEGLSYIETSALEATNVEEAFQLILGDIYRAISKKPVASDEGGAGAAGGVKEGKTINVAAGDANSEKKQCCST

SEQ ID NO: 164460 - protein, 62 aa, Oryza sativa
  unsure (1)..(62): unsure at all Xaa locations
  Clone ID: PAT_MRT4530_63357C.1.pep
MKEHVDATLEIIIVTDLQLSAVCFAFHTSDVSCYSSGTTICCPLFCFRNRCXTHIMRFGGGT

SEQ ID NO: 164461 - protein, 77 aa, Oryza sativa
  Clone ID: PAT_MRT4530_63358C.1.pep
MGLVLELTDDGEELHDSVHATSDFLRIAKHLHPTGERNYLVHVSKVDKSPPMESQSLLAVRKNISVAVSGPSIRFRV

SEQ ID NO: 164462 - protein, 83 aa, Oryza sativa
  Clone ID: PAT_MRT4530_63359C.1.pep
DKYMNINLNPNIKIRPFEAYMNSPFNFSTNKFIQIILTIYIYNVSHLLKELQCVQRPYYPSYTCTTQLTYIINPRSLMLQPLP

SEQ ID NO: 164463 - protein, 83 aa, Oryza sativa
  Clone ID: PAT_MRT4530_6335C.1.pep
SPEKQRCALSISKKGNPKATQPRGQHQQIILSYCPSQHHCKPNHQKTHILHTHTHTPHQLSLLPYTQDTYTDTFYPFIHSVGR

SEQ ID NO: 164464 - protein, 430 aa, Oryza sativa
  Clone ID: PAT_MRT4530_63360C.1.pep
MASTGRGAGRVVRELQVYSNNNSWRWGTSWAQKTNGTRSLAYPDEGGYSLPLLEAWIIGFERLKSIMPSAIYSVDGIGGSNVYEHVNNQLSLKASSAGPAPPSLAFLLPGSAGDADRLLRVFFATYHPRNLYLLLLDGAASAGDRARLARQARAGPGRANVHVVGDPGFANPRGASTLAATLHGASLLLRVGQDWDWFVHLDAGDYPLVTPDGDSSLHLFGSRQIRPIVVDPGLYLSSRTDIFYATQKRELPNAYKLFTGSSSVILSRKFIEYCIIGTDNLPRTMLMYYTNMPLPHRKYFQTVLCNSPEFNRTVVNHDLHYSKWDSSSKKEPLLLTLDDVENMTQSGVAFGTRFSMDDPVLNHIDEEILHRQPEEPAPGGWCIGVGDASPCSVSGNPDVLRPGPAAMKLAKLLAQRLTYRNFYSQQCIWD

SEQ ID NO: 164465 - protein, 74 aa, Oryza sativa
  unsure (1)..(74): unsure at all Xaa locations
  Clone ID: PAT_MRT4530_63361C.1.pep
FFFFFFWVTXLKNMFSARGDTXTHLLLHSHLNSDTHYSSFSSHMVHTIAHSKSTPSTVQLAPPWPTTPWPVHHV

SEQ ID NO: 164466 - protein, 123 aa, Oryza sativa
  Clone ID: PAT_MRT4530_63362C.1.pep
MAPMRGGDGALGIASRHGGTAERRHRTGDWIQFGNLDVGGMWERRSRTSSMRERCAHPSCGTGAVPHPRPAGPARSRFLVPHDRLRFRSFIPSLRFVLVPAQPFRRLGIFLQINHSQVWQISI

SEQ ID NO: 164467 - protein, 307 aa, Oryza sativa
  Clone ID: PAT_MRT4530_63363C.1.pep
MATLAPRPHELLALRRPRLRTPRARASGPRARGAPVAPQAARPRRVFLGLGAAFVDQLARMASGGAPSRSFVASARPRQGVSPVEQILKNVEWPDEFPFKAEDFSRFDESSDALFYSAPRYVTHIDDQAIEALTKYYSEVLPPSNTPGVAILDMCSSWVSHYPPGYKQEKIVGMGMNEDELKRNPVLTEYVVQDLNVNPKLPFEDNTFDVITNVVSVDYLTKPIDVFKEMRRILKPSGLAIMSFSNRCFWTKAISIWTSTSDADHAWIVGAYFHYAGDFEPPEAVDISPNPGRTDPMYVVQSRKRIA

SEQ ID NO: 164468 - protein, 225 aa, Oryza sativa
  Clone ID: PAT_MRT4530_63364C.1.pep
MVKPLEGVLACWAFSWQGSILGETHALRHGPSLAKLVNLMLRLLLFGFHLCCPFDLRHLPPAYAFAYVLGFGKPGQRSLWYTSNKPLKGKALTGNYRSVHPGDTWQSLTGWQANRHAGGLYIHLPPSVTFTFTSSHFYHLLCGWYRFVSPCVHEISLPTSTSVTSALIPGFPDFSSMDPCKPAPASATGPDPGKIGEGHIRYLGASLIDKTELAKLFSAGVMAEG

SEQ ID NO: 164469 - protein, 103 aa, Oryza sativa
  Clone ID: PAT_MRT4530_63365C.1.pep
MSNKINGAREDEKHNQCCYKRAKEQRVLAVGARAVEGAVRRLGTSAARWREERGQEHGSAIRRGLDDNRAQARRRGGSSYDEPRSGEPTASKLRLGDGKDDHG

SEQ ID NO: 164470 - protein, 104 aa, Oryza sativa
  unsure (1)..(104): unsure at all Xaa locations
  Clone ID: PAT_MRT4530_63366C.1.pep
GRVGRLVKPPFYDHIKAAIQDESEAKLKVILYYVRGETLLTQDSQXDIRSSICDAKAWIALNDNVXELVSRADNKWTYSCSIVYLIRDMYNNQLMIANFYERKY

SEQ ID NO: 164471 - protein, 1291 aa, Oryza sativa
  Clone ID: PAT_MRT4530_63367C.1.pep
MALQAATTTSFLPSALSARKEGAVKDSAFLGVRLGDGLKLETSALGLRTKRVSTSSVAIRAQASAAVSSPTVTPASPSGKQTLRKGTAVITGASSGLGLATAKALAETGRWHVVMGCRDFLKASRAAKAAGMEKGSYTIVHLDLASLDSVRQFVANVRRLEMPVDVVVCNAAVYQPTAKQPSFTADGFEMSVGVNHLGHFLLARELLADLTSSDYPSKRLIIVGSITGNTNTLAGNVPPKANLGDLRGLASGLDGVSSSAMIDGGEFDGAKAYKDSKVCNMLTMQEFHRRYHGETGVTFASLYPGCIATTGLFREHVPLFRLLFPPFQKYITKGYVSEEEAGKRLAQVVSDPSLTKSGVYWSWNNNSASFENQLSEEASDPEKAKKVWELSEKLVGLADHDQVKVVLFTGGSWDGNMGLLSRSFSDGGGGERGGGGGFSSSQDAFEFDGEEEDDLVLLGSSSQSSHPPAPSQESSSMWDFDEDPPPPPRRRRGRGGGGDYAEPATAAAAAAAATSLMEAEEYGEMMESVDEANFALDGLRATAPRRVRRASFLALLGICASAPRRRVLRAQGSVHQRTLLFFFLLVCAVQENHLLDSESCVHFLLKLLNPPVNLVDSKAPSIGSKLLGISKVQMLNGSNKDSDCISEEILSKVEEILLSCQEIKSLDKDDKKTTRPELCPKWLALLTMEKACLSAVSVEETSDTVSRVGGNFKETLRELGGLDSIFDVMMDCHSTLENLIKDTSTSALDLNEGTSLQSAALLLKCLKILENATFLSDDNKTHLLNMSRKLYPKRSSLSFVGVIISIIELLSALSILQNSSVVSSSTYPKSSKVSQQSCSADVMGGTSFNDGKRKNSKKKNLLSNQTRHSCLSSKSEVSHITISSGSDAGLSQKAFNCSPSISSNGASSGSLGERHSNGGALKLNIKKDRGNANPIRGSSGWISIRAHSSDGNSREMAKRRRLSENVITDSGGGDDPFAFDDVDQEPSNWELLGPKKKSPQKHQDKSGNGVLVASHEPDQPEDLNQSGTTSLFSAKDESSLLEDCLLASVKVLMNLANDNPSGCELIASCGGLNTMASLIMKHFPSFCFVVDNNYNTRDGASSCRDVNLDHELSSSQNSKAHQVKIKQLRDHELDFLVAILGLLVNLVEKDSLNRVRLSSARVPVDLSQNPQSEETQRDVIALLCSVFLASQGASEASGTISPDDEESLMQGAREAEMMIVEAYAALLLAFLSTESMKVRGAISSCLPNNSLKILVPALEKFVIESFHLQLNMITEETHSAVTEVIEKCKLS

SEQ ID NO: 164472 - protein, 75 aa, Oryza sativa
  Clone ID: PAT_MRT4530_63368C.1.pep
FPCYHKDIDQCYCIVFFLDKRSQFCVAPIDVRLSAFVRKQRMQHVFSFFQVNIQLTYFAIEVTCSNFDRTLCGWY

SEQ ID NO: 164473 - protein, 412 aa, Oryza sativa
  unsure (1)..(412): unsure at all Xaa locations
  Clone ID: PAT_MRT4530_63369C.1.pep
DRIILVQSCPIPETSYAMDFYQLYEGLHQNFDSIRGRYYWAGNKQGRKYHMVKWSDLAFPKEFGGLGLTETRTLNAALLAKWIFKIESSDESLCVELLRRKYLIFGGVFQCSSKRVSQFWSGILNTRKWFNLGSEWQVGNGTHIFFWLDIWQGDCPLKIIFTELFMICNQQEILIADLXTLGSMGPIELEQWRQIKLIIENLVLSSSPDTLRWCLNSNKKYTTKSLYRAILFRGALDERLQFVWRCPCPMKLKHFIWLALRDKIQSCEQLKLKGSVGSENCLLCGNKETTDHIIFDCPMATFVWCICXRDALGWDACPGGFDDFFRFVGQVSKVRLRVMTALLASICWVLWNTRNNMIFRSKIVYSPLHLSFQIVSYLMQWKALGRADELASLEVLIEKLRMVNTRFGNRRT

SEQ ID NO: 164474 - protein, 296 aa, Oryza sativa
  unsure (1)..(296): unsure at all Xaa locations
  Clone ID: PAT_MRT4530_6336C.1.pep
IVIRKELVLKNTRHDQVVYELEQQQLLFPTSGSLXQQLIFPTSGNMEQQPLLFTSDGSFCIIGTSFRRSCLNLNNVISGIXLRVICGKWLSLALFTMVGAICFYTGKLIDRCMCADHCVRSYPDISYLAFAGYGXMAIGLVLXVELYLVAISFLILEGDNIEKLLPGTVVKILGVHVYGKQLFMLAAGAVILPTTWLNYLSMLAYVLAVRLISSVAXTTSLVWVGMSDKGFDIEGNCLXNLRGSLSLYFVCFAGHGVFPTMYSSMMSNKNFAKVHLLKSCLAGRNLYPTTSLPGDV

SEQ ID NO: 164475 - protein, 329 aa, Oryza sativa
  Clone ID: PAT_MRT4530_63370C.1.pep
MVRRERIEGVRQYNRSKVPRLRWTPDLHHCFVHAIHKLGGQHKATPKRVLQLMGVGGLTISHVKSHLQMYRNMRNDDLGMQGIQQMDDQEQTFAGGMQIWTDMQLQDHHHECNGPYCRCHSSSKHAKGSLLLLHHHHQQQQLQRPNEMETRRAEASTQTGFLRSQGICERDVSSGLPVPAAYYSYYTPMAHGAPPAAADGAGHDDPPRLLGLVVMATTTRRGSREEHKATPPPENGAIRHGRKARRTTAAAEEEERDGDGDELSLSLTLDSGLSCRSSGGAGAYCCSEGSSSNWLISSPSSTTSLVAGGCSRRSTPAMLSSVVSLDLSL

SEQ ID NO: 164476 - protein, 156 aa, Oryza sativa
  Clone ID: PAT_MRT4530_63371C.1.pep
MILIHLYELASTKNIEEPRIEKKKEICIRSPTAPHPAVTSTFSIKTACHCLRCRCIHPTPPSASMDLPPRKPLPQPPHPSSRIGRRKSRLEESEGWSRTAGGRGRGVEGAGGSARFHIWTPPRENEREMREAWEEIRFGPATRGIRHEAGCKKICL

SEQ ID NO: 164477 - protein, 184 aa, Oryza sativa
  Clone ID: PAT_MRT4530_63372C.1.pep
MGIDLDRHHVKGTHRTAPKSDNVYLKLLVKLYRFLARRTDASFNKVVLRRLFTSKINRPPVSLSRIVANINKEGETRTVVVVGTITDDNRLLECPKVTVAALRFTATARARILAAGGEAITLDQLALRAPTGSNTLILRGPMNAREAVKHFGFGPHSHKKPHVESKGRKFERARGRRRSRGFKV

SEQ ID NO: 164478 - protein, 107 aa, Oryza sativa
  Clone ID: PAT_MRT4530_63373C.1.pep
MPPHRWIHRRRASPLPDPLPPPHIPTTESAAAALGEVDRRRIRMGDGRRPSPPPYAPPPHLTITRSAAAAQGNDGHRQMHTIACVLRPPPLPEPSTTVGREERGEED

SEQ ID NO: 164479 - protein, 102 aa, Oryza sativa
  unsure (1)..(102): unsure at all Xaa locations
  Clone ID: PAT_MRT4530_63374C.1.pep
HRLESMMARLEPRKPELDAXIDPYKQYADAVTEDVTTYLINEDKEGEVLPVKXIMYEGVENSYPVYLVDERSRVTSVPXGRNLTCTHTGIKMDYGPDTDFGH

SEQ ID NO: 164480 - protein, 116 aa, Oryza sativa
  Clone ID: PAT_MRT4530_63375C.1.pep
MGKVARVLAGKTKRRLVFEDDERGVEALSDAVPARTQGVRVVSGVDGVFQGAAALLAFTRTGGAPVGPAGFDYHKESQQRQVADLTPFQHGHGCPEEDDETIEQKEQEIQRERKID

SEQ ID NO: 164481 - protein, 101 aa, Oryza sativa
  Clone ID: PAT_MRT4530_63376C.1.pep
RKQTRIKFIVHQIKRRTNYRLLLHEISTGAWVVEININMLQYYSLFRKLKRKHNTSLNSSATFACVQSKAARTAAINQAISLVPAQTISREENTLVRLTVG

SEQ ID NO: 164482 - protein, 200 aa, Oryza sativa
  Clone ID: PAT_MRT4530_63377C.1.pep
MICARGTAIVSMGAGRGSNGAVLGIGVAVVTALLAWRCAAAAAQAPPVASTDGGGSGCMPELVSLSPCMGYMSGNATAPAAACCSALSGVLRSSPRCLCMVLGGTAASLGVAVDTARAALLPGACSVQAPPASQCNAAGVPVSSPANPTTSGGTPATPAGTPGSKTTPASTTQYSDGSVNRSRVILVILVAAIVVFLDHF

SEQ ID NO: 164483 - protein, 111 aa, Oryza sativa
  Clone ID: PAT_MRT4530_63378C.1.pep
PGLRNRHEVPPPPHSAPELTLLLTPTTTTCLSLCTLASCSSSSSSPPSCSFHPHPTPSHPRRPLKSPILGRFVRSDRGGGPTPHFVLLAAGQGGDTRHVWTFFFFLGGHGS

SEQ ID NO: 164484 - protein, 275 aa, Oryza sativa
  Clone ID: PAT_MRT4530_63379C.1.pep
MDVRVELSDSNPDGGEDPVAMIYSFAVCYGVFLIAWLHRTLARGCSTARPVHDVMSGLLAALMLHCLTAAAHDGRYTSVVAGTARGWNVPCLALRLVKNAMLFPVVALIGAGWSLPEPFVQARELNVLTAMVPLQVYMAIATTLSGDGGVAWTWGHAFVLVQLACCVAVLMPMGRAIRALRKEADTDDKAARRLGKLALFRQLYLAVAVYLYHTWMAVFILKLLVGASSGYRWASVAVDEAAALAFYLFMFCMFSPAEEDIQLEEYTEELIQGGV

SEQ ID NO: 164485 - protein, 108 aa, Oryza sativa
  unsure (1)..(108): unsure at all Xaa locations
  Clone ID: PAT_MRT4530_6337C.1.pep
SSQASALRVICGKWLSLALFTMVGAICFYTGKLIDRCMCADHCVRSYPDISHPVRIVXEMGLCKSCMTETXLVAISFLILEGDNIEKLLPGTVVKILXGYQVYGKQLF

SEQ ID NO: 164486 - protein, 366 aa, Oryza sativa
  unsure (1)..(366): unsure at all Xaa locations
  Clone ID: PAT_MRT4530_63380C.1.pep
LSISFFFSKIGPKRFRYDELSVATDFFSDDCKLGEGGFGSVYKGFLKDLNLEVAIKKVSXSSKQGRKEYESEVRIISRLRHRNLVQLIGWCHDGSELLLVYELMPNASLDTHLYNANANSKKIAPTNPLLSYPSRYEIVLGTGSALLYLHEEWEQCVVHRDIKPSNIMLDTAFNAKLGDFGLARLVDHXGAPTRTVLAGTMGYMDPECMITGRANAESDVYSFGVVLLEIACGRXPIMAPQRQADEEEDMIHIAQWVWDLYGNGRIIDAADHRLGGEFNGEEMEAVMVVGLWCAHPDRSLRPTIRQAVSVLRGEVPPPSLPTRMPVATFLSPVDAFNYTSSYVTGNTNTSTSTNTTQSSRTTGTVA

SEQ ID NO: 164487 - protein, 395 aa, Oryza sativa
  Clone ID: PAT_MRT4530_63381C.1.pep
MESVLARLPSSLRPREPLLCRVISAYGRARLPAAARRAFAHPAFPAPRTARALNTLLHALLACRAPLPELLSECRGSGIHPDACTYNILMRAAVADSGSVDNACLLFDEMLQRGIAPTVVTFGTLVTAFCEAGRLEEAFKVKEVMSLQYNIRPNAHVYASLMKALCEKGKVDDAHRLKEEMVSNSEPLVDSGAYATLARALFRLGKKGEVVSLLEEMKEKGIKVGREVHNSMIAGFCEDEGDLDAAFAALDDMQKGGCKPDSVSYNTLVGGLCKMGRWRDASELVEDMPRRGCRPDVVTYRRLFDGICDAGGFSEARRVFNEMVFKGFAPSKDGVRKFVAWIEREGDAASLESVLCQLASVNALESSEWEKAMSGVLHDPAEQKIVKLLDNLSLA

SEQ ID NO: 164488 - protein, 522 aa, Oryza sativa
  Clone ID: PAT_MRT4530_63382C.1.pep
MELDVSITSRGDARRGSHESQPVGYINTTLFDERSLQVIGKCFIRSASSGGRDENRLITVHKDYKCSNPELSKYLAEVRKLEKRFDGIVVRHVYRKDNIEPDDLARRASRREPLEPGTFLDILTKPSVKEAIGEINTAVPDINSEAKEAECAIADIETTDDWRTPLIKFINSEELPEDDVEAEKITRKAKIYCTIGNNLYKKAPNGVLLKCVLSDDSRHLLLDIHEGICGSHAAGRALWCEACQFHNKHTKSLAQVLQTIPLTWPFSCWGLDILGPFQRGQGGYKFLFVAIDKFNKWIEAVPTGEIKAANAIKFIKGIFCRYGLPHRIITDNCSHIGLVKRANGIVLQGTKTRVYDRLMTHDNKWVEELPSVLWAIRTTPTTSNKKTPFFLVYGSEAMLPSELRHQSTRAQKYSDEEQEEQRNDDVNLLEEHRERVAVRAAAYLQALRRYHEKRIRARILSIDDYVLRRVQSQVGRNKLSPKWEGPYTITQVLRSGAFKIADGDGHELANSWNIDQLRKFYV

SEQ ID NO: 164489 - protein, 89 aa, Oryza sativa
  Clone ID: PAT_MRT4530_63383C.1.pep
MEAILSSLVTVAGSHDFMATSSSVGMLVVVRSLVGGKVLLPRKKEGLEEDVKSRSSRGAIISTAVVGVGILLSLPSPGFTLSVEGSDGG

SEQ ID NO: 164490 - protein, 63 aa, Oryza sativa
  Clone ID: PAT_MRT4530_63384C.1.pep
TVCLGATPHTLLFDAYPLVKARCTNQKSRAPFHRGKRLCHPLKKRRGNKAPCLYHWLAYFGLF

SEQ ID NO: 164491 - protein, 141 aa, Oryza sativa
  unsure (1)..(141): unsure at all Xaa locations
  Clone ID: PAT_MRT4530_63385C.1.pep
MVRSGTMLRVEXRSSAVGIPCEKLTRVRILGGQLQSTVGIGTRLREELRSRRLRIPGDEVXYEIAYGEXTSCGRDLRNGFHEVCVQASVFAKGIESMHACTVLYMYXCDRYMHXVKHVCVHDRLADFMEYFNFNLNTLPSH

SEQ ID NO: 164492 - protein, 78 aa, Oryza sativa
  Clone ID: PAT_MRT4530_63386C.1.pep
LARPLFFFFWIINAQVVIGIYYVTPNRCCSLHTAWKYKLTAETQVECKKIGLLACNKGVELRTRNSYMLGPATTRKSE

SEQ ID NO: 164493 - protein, 588 aa, Oryza sativa
  Clone ID: PAT_MRT4530_63387C.1.pep
MHVATLLLLLLLDLAVANGAVDEFAYNGFAGAGDGELVLDGAASVTPDGLLRLTGGSGEKGHAFYARPLGFRNGSGGGGGVRSFTSTFVFSIMSSFTDLAGHGIAFAVSSTRDFSGAAAAEYLGLFNRATNGDPASGRVLAVELDTMYTPEFRDIDDNHVGVDVWVEYDAGDARLDVTLHQLTKPKPARPLLSVKPANLSAAFSDQMYVGFSSSTGSDDTSHYVLGWSFSLSGIAQDLDYAKLPSLPPVMATAASTKHMPVKIWLPVSLSVTVVAAIVMFLLFRRQRRAIYVELVEDWEVEFGPHRFAYKDLHKATKGFHDDMVLGVGGFGKVYKGVMPGSGIDVAIKKICHDSKQGMREFIAEIVSLGRLRHRNIVQLLGYCRRKGELLLVYDYMINGSLDKYLYGEARLYDHGAEPSTTTIVGTMGYLDPELTRTGQATTSSDVFAFGAFVLEVVCGRRPVQPRAAAGGERLVLVDWVLRSWRSGEIAGAVDARLGGGFAAGEAEAMLKLALLCTHRLPAARPGMRRVVQWLDGGGGDVLDQLSPGHMDVATPAFLCHDDDDDDDFVAMSFPSASTATSPTTRFTG

SEQ ID NO: 164494 - protein, 583 aa, Oryza sativa
  Clone ID: PAT_MRT4530_63388C.1.pep
MGSMPEGRKCVGCIGRPVADARRRARLGKGSRLLARLLAPAEVRQVMRAERGCAANQVRPGEILVNGRGLSQGELDLLLGCAVPPERLAAGRYWYDKDSGLWGKEGERPDRIVSSKLSIGGKLQTDASNGTTQVFINGREITKTELRMLKLANVQCPRNTHFWLYDDGSYEEEGQNIIKGNIWQKAKFLYGTEFSPEEILNLKLMIQSNVYKYLSTLLEWRECFEDEALEEEKELGMSNHKGDENVTECELPTGEPKAVQSTSSLYSLNQRLMHFANWLLEIVALGNLDAFFPAATREYAPIVEEVWKDPAIQATYKRKNELHFLPDVASYFLDRVVEISSNEYEPTETDILYAEGVNQWNGLSTLEFSLDDRGPLSDSYADKAGNPAIQTKYQLIRMNSKGLTGGFKCLGMLEDIRAIIFCISLADYDQTWVQSSGEPCNKMIASRDLFEDVIRHPSFEDTPCVLLLNKYDAFEEKISRVPLTVCEWFADFSPVRPHHTSQTSLASHAYYYVAVKFKDLYSSVADGRKLFVFQTKALERRTVDDAFRYIREVLRWDDVKNSDAGYCSADESSYSVDMTTSPS

SEQ ID NO: 164495 - protein, 840 aa, Oryza sativa
  unsure (1)..(840): unsure at all Xaa locations
  Clone ID: PAT_MRT4530_63389C.1.pep
MGALFILELNVSMFLILFSMTATTPLPALTAVLQQFTDVFAKPDTLPPKRDCDHTIPLLPGAKLVTVRPYRLPHHKKNALEDIVQQLLTSYTIQPSMSPYSSPAILVKKKDGTWRLCVDYRQLNANTVKNKYPIPVIEDLLDELXGAQVFSKIDLRSGYHQIRMHEPDIHKTAFSTHVGHFEYLVIPFGLTNAPATFQALMNQILAPYLCKFVLVFFDDILIYSKSVTYHVQHLSLVLQLLRQHHLFAKLSKCAFGQSQVEYLGYIISXSGVATDPAKIQAVQXWPIPTSITQLRGFLGLAGCYRRFIKXFGIICKPMFDALKKNNFHWPTAQQQAFDTIKLHLAQAPVLAMPDFSLPFVLEADASGHGIGAVLMQNGRPLAYLSKAIGPKATALSTYDKEALAILEALKKWKHYFLGTSLIIKTDQASLKYINEQRITEGVQHKLLIKLLSYDYKIEYKKGKENKVADALSRIQQSNALTTIVIVPQWITEVIASYSHDPKCQELESHLHIAPQPQSPYTLKAGILRYKDRLLGKXATYQRLKQLFYWPGMKAAVAQFVKACPVCPKNKTEHQMPAGLLQPLPLPDLAWSHITMDFVEGLPKSEGKDVIWVIVDRFSKYAHFIALSHPFSADQILTQFLENFYKLHGLPTVIVSDRDRIFTSNMWKEVFEKAGVKLHFSTAHHPQTVGXSERVNQCLENYLRCMTFTKLKKWKALLAHAEWWYNTTFHTSLGMSPYQALYGTKPPMLAEALLPGSLLEGARNTQEAKHAILETVKSNLAKAQARMKYFADQHRQERTLEVXDMVYLKMQPYRHNSLGLHSSLKLHSKYYGPFRVLDRVG

SEQ ID NO: 164496 - protein, 79 aa, Oryza sativa
  Clone ID: PAT_MRT4530_6338C.1.pep
MPSLVFVLPSPLLSPTSLAVAEPHRILLAVVADVNTPSAAQVQLAEMRGEKKKKKKKKKKKKKKKKRTEREEGLRRGEK

SEQ ID NO: 164497 - protein, 91 aa, Oryza sativa
  Clone ID: PAT_MRT4530_63390C.1.pep
MATTAVRGTGGGGDGGGASSAAAWVGRGGGGAQQTQLGLWAMAPSSMPIYLEPTPLHLGYEEDEGVRAGIVSAKTFGPRCKGHCTEKSIYY

SEQ ID NO: 164498 - protein, 133 aa, Oryza sativa
  Clone ID: PAT_MRT4530_63391C.1.pep
MCASIDVTRDFTKILIAREGGNHALARRGGAGAAAGRVGGWDAAHAGAVATRQTEQPTGSGGYGSGTGRRSKGVDTVGMLVGLTPTTSPSLGHTEPMILLGRCPCVTYNGIRLDYKLKISKLLPPVERDLRHV

SEQ ID NO: 164499 - protein, 56 aa, Oryza sativa
  Clone ID: PAT_MRT4530_63392C.1.pep
IITSSPGTILSTGIVAPSMPSRTPGPLLELLVLKSPHQQLELLVLKSPHTQDIKAH

SEQ ID NO: 164500 - protein, 328 aa, Oryza sativa
  Clone ID: PAT_MRT4530_63393C.1.pep
MEHCNGIAAVGRWLSTKPKVIFVLGATATGKSKLAIRLAARFDGEVINSDKIQAHDGFPVITNKVTDEERAGVAHHLLGGVSPDADFTAEDFRREAAAAVARVHAAGRLPVVAGGSNIYVEALVAGGGGAFLAAYDCLFLWTDVAPDLLRWYTAARVDDMVRRGLVGEARAGFDAGADYTRGVRRAIGLPEMHGYLLAEREGGAGAEDDDDLLAGMLEAAVREIKDNTFRLTVSQVAKIRRLSALPGWDVRRVDATAVVARMAEGAPHGETWREVVWEPCEEMVSRFLETPAAAAAVVANGKVDVNVGDAAAGVPEAAAAAVVAAGVV

SEQ ID NO: 164501 - protein, 111 aa, Oryza sativa
  unsure (1)..(111): unsure at all Xaa locations
  Clone ID: PAT_MRT4530_63394C.1.pep
MLGDGDRGCGHGGLATAAAGGLMTATARGSATAGGLATADLVVGMAVEADPRPLPTRRQLAPSPARQPSRSSACLAXRRAPPTAPLLAHPCSSSVCPPARNLAPLLLAASH

SEQ ID NO: 164502 - protein, 276 aa, Oryza sativa
  unsure (1)..(276): unsure at all Xaa locations
  Clone ID: PAT_MRT4530_63395C.1.pep
DGAPRRRHQPNDPHSCSLQRRHDSPQPLPLHCSAEPSSPHPEAAEAPPSRRTSKPRPSPPSTRPTNAAAAPGSPTLSRAPGRPSTRRIAGSWASSPPAHCRQRRPDPPASAAAAAGAPSSYSTASPSSARSXPEPRPALPLSPSIPTSRVHLEIGDLGILGVGRMRGTNGAAAAGVVQLEQQHERLPQLAVVGAGSLAGVGGPDLDDLLLLLLGRVADGGEALHEAGGADAGEDLGRVPPAPLHAAAAAAAADARLPLLLLLPLRLRLRLLHHHLH

SEQ ID NO: 164503 - protein, 72 aa, Oryza sativa
  Clone ID: PAT_MRT4530_63396C.1.pep
DNSEWNDGGDPRAAGSESCLQPSEQISAVGLQPAPGRLDLKTRTREPRQTKHQTHAAACGLSTRATGVDVVW

SEQ ID NO: 164504 - protein, 59 aa, Oryza sativa
  Clone ID: PAT_MRT4530_63397C.1.pep
LEPPKPKQGRVLSFTNTPYGNDTEDHKRIITLCGDTKNILLALGLSRSVTTTAVYHTPT

SEQ ID NO: 164505 - protein, 692 aa, Oryza sativa
  Clone ID: PAT_MRT4530_63398C.1.pep
MSTKGLAGVGGGRRGWRRGGPVAKKAPKLSHPRPPPGPNFAPLKHRGRAANRHRGEELSGCRLAESPGSLMAALAAPALRRLRSPRLCLAATVNCISNNAAPAASAGVNHVQDSNWRVAELAAAGRVSDARRLFDGMPDRDVVSWTAMVAAYARRGMLQEARVLFDRPDARRNVVTWTALLSGYARARRVDEAEALFEGMAERNVVSWNTMLEAYTAVGRVEDASALFNRMPVRDAGSWNILLCGLVRSGSLERARKMFERMPVRDVMSWTTMISGLARNGSVDDAWVLFDAMPERNVVSWNAMISGYARNHRIEEALDLFTKMPIRDVASWNIMITGFIQNKDLKSARQLFDEMPKRNVITWTTMMNGYLQCMQSEMALKLFNCMLVQGIQPNQVTFLGSLDACSNLAALCEGQQVHQMICKTPSQFDTFVESTLMNLYAKCGEIRLARNVFDFSMEKDLISWNGIIAAYAHHGFGIEAMHLYKNMQENGYKPNDATYVGLLSACSHAGLVDEGLKIFESMVKDNSIVVRDEHYTCLVDLCSRAGRLEDAKRLISWFKIKPTSSTVWSALLGGCNSHGNESIGDLAAKHLLEAEPDNAGTYTLLCNIYASAGKWKEAAEIRSEMNVRGLKKQPGCSWIEVANKVHVFVSRDKSHSESDLINDLLQDIHRIMRMAGTVPRDHMLIDVELVGI

SEQ ID NO: 164506 - protein, 37 aa, Oryza sativa
  unsure (1)..(37): unsure at all Xaa locations
  Clone ID: PAT_MRT4530_63399C.1.pep
LDHWGGIKRDKPSXRSDHSRSRTLSPAHDSIFASHDH

SEQ ID NO: 164507 - protein, 170 aa, Oryza sativa
  unsure (1)..(170): unsure at all Xaa locations
  Clone ID: PAT_MRT4530_6339C.1.pep
GAEQQKALDNIKAYMSSPPVLIPPQKGVSFKLYLSADEKSISSVLIQELEGKERAIFYLSRRLLDAETRYSPVEKLCLCLYFSCTKLRHYLLSNECTVVCKADVIKYMLSAPVLKERVGKWIYALTEFDLRXSKAVKGQAIADFIMEHRDNSIGSIEIVPWTLFFVGSVC

SEQ ID NO: 164508 - protein, 56 aa, Oryza sativa
  Clone ID: PAT_MRT4530_633C.1.pep
DPLKRADVRFFFWTPKIFSFSPRKGSEQTSLLTWFLILRSKREEHKAPHRAATEFF

SEQ ID NO: 164509 - protein, 130 aa, Oryza sativa
  Clone ID: PAT_MRT4530_63400C.1.pep
ENHEPNPPLYLGTGKGHPSKTPYFWEKKAFFFGKGSGQRAISGGDPPWEPKGESSTKPHPQRGPLFQRDGQLFQRGGKGAFFAAPPFNKSQNRGQEKKPPGENGPTRTGPKPWFGKKKQIMAPAFGEREG

SEQ ID NO: 164510 - protein, 578 aa, Oryza sativa
  Clone ID: PAT_MRT4530_63401C.1.pep
MSGSYGSDDYRGGYGGRGRVGILRVVCVLASGSAPDWLVVFFVGGGGGGRGRGGGGGGGGGYGGGGVGGGYGGGGGGYGGGGGGYGGGGRGGGGGGGYGGGGGGGRGGGGGGGGRGGGGRGGGRDGDWVCPDPRILHGACVKCPTKFLFHRSINIRLQFHWFSSNIPNIFVYHSCSSCGNVNFARRTECNKCGAPSPAGGGGGGGGGGYNKSGGGGGGYNRGGGDFSSGGGGGYNRGGGDYNSGGRGGGTGGGGRGGGYNRGGGDDRGFDDHRGGRGGYGGRDQGNNQRGDESGYDAGSYGQVPPQGPPSYGGPGGDYAAPPSSYGGNNAYNSDSAVPPPSSYGGGPGSYPPSYGAPPPNPPYSGGAPGGQGSLPPSYDGGYGGRPMPGGGGPGAPPPYHGGGGGGGGGGGGGGYTGSAAPEPAAKVKQCDANCDETCDNARIYISNLPPDVTVEELQELFGGIGQVGRIKQKRGYKDQWPWNIKIYTDDSGKNKGDACLAYEDPSAAHSAGGFYNNYEMRGYKISVAMAEKSAPRAPAYGHGGGRGGYGGGRRDNFRDGGGHGPNRHQGGGSRSRPY

SEQ ID NO: 164511 - protein, 201 aa, Oryza sativa
  Clone ID: PAT_MRT4530_63402C.1.pep
MGTRDGFSNNGLYNQLGQGGPTQLMFTLLHVGSVTFPVFAVTSLLVFLTITDKIRKRTDIPMHWQPAVPRCRSTTYPDREDLSDLEGCHHLYTHLKHTDRYDGCEKGKCPNCPATVFGRASGASMPNPRINGDQRGSPEPRLGPPGLAFDVGGIESTFNSRQQSLIYHPTSTENKEPTAKSIGFTPTSAQYDRVAHGWWTG

SEQ ID NO: 164512 - protein, 80 aa, Oryza sativa
  Clone ID: PAT_MRT4530_63403C.1.pep
SRPYSGFSNQTGGHACPAVPSRSVIHNQPGGHLCPVVPPRSVIHNKPGEHLCPAVSPRSVIRNQPGRHPCPAVPPGLVLT

SEQ ID NO: 164513 - protein, 844 aa, Oryza sativa
  unsure (1)..(844): unsure at all Xaa locations
  Clone ID: PAT_MRT4530_63404C.1.pep
MILDQSKVNTNNRDLVVRMENVWIVDSGCMQHMTSXFSFLKKASRRDSIIFGDASTSSITTTGSVKVSDKFTLNDVTLVENLKYNLLSVSQIVDEDFDVLFKKTRSKVFNSSGDVVLNVSRYGRVFKADFENSVSSEVTCLVAKFSKDVMFXHRRLGHVGFDHLTRISGSDLVRGLPKLKKNLDLVCSPYRYAKMVASSHAPIISVMTDAPGHLLHMDTVGPTRVQFVGGKWYVLVVVDDFSRYSWVFFMATKDEPFEHFKSLYLRLSLEFAGSLRTIRSDNGISHLRVFGCKCFVLKSRNLDKFESHSTNGLMLGYSTHSRGYRVLVLETNKIVETCEVTFDEASPGTRPDVSGTLSXVQGEDIFVDESNDEEEDEMXPFRPGPRPVRPLAEDRSDRPGGSSSGASGDDGRGPPETSTSIGQGAEHEISSYATTPLHIQXRHPPQQMIGNIGEHTTRSKVTTRDHHVNSAFVANFEPKDVTHALTDESWINAMHEELENFERNKVWSLVEPPVGHNIIGTKWILXEDGLIVRNKARLVAQGFTQMXGLDYDETFAPVARIEAIRLLLTFTASKGFKLYLMDVKSAFLNGYIQEEVYVKQPPGFENSEFPNHVFRLSKALYGLKQSPRAWHDRLENFLLAKGFIMGKVDKTLFVLKHGDDQLFVQIYVDDIIFGCSSHPLVVEFAETMRMEFEKSMMGELTYFLGLQIKQTKQGTFVHQTKYTKDLLRRFKMEDCKPMSTPIGSTPVLDPDEDGEVVDQKEYRSMIGSLLYLTASRPDIQFVVCLCACFQASPRASHRQAVKRIMRYLQXTLEFGIWYSTYSSICLSGYLDNKHRGTQTDNLIY

SEQ ID NO: 164514 - protein, 47 aa, Oryza sativa
  Clone ID: PAT_MRT4530_63405C.1.pep
DTPRSGALSTKGVGGTRNVTGALASGLAPSARAFCPFFFATCDGFPL

SEQ ID NO: 164515 - protein, 167 aa, Oryza sativa
  Clone ID: PAT_MRT4530_63406C.1.pep
MGDEMSSGRCEAKSREEQMARQFVRSIMHRPNKNIQNQIGHPKRKRKGYQYLQSRIEVCVDELQRPPRFRQRRLREASERPSDLIRQRLGGKMGRAFPCRPSQARLDMGHADTTQGTNESRKPLAQGGGSGGGGGRGARRLRPTRQHGGAASPIHGHSSRARQRLSV

SEQ ID NO: 164516 - protein, 148 aa, Oryza sativa
  Clone ID: PAT_MRT4530_63407C.1.pep
CRKKGKWDQPAEDVVAAAAAAAAVAGLPVVNIGALSGVSIPGAAGPLGNIVAVPYTLPVHLAPSVLQTAAAAVQKLSQAKMPDELIAREIVINDADPSVRYKLTKRQTQEEIQRCTSTVIITRGRYHPPNGQTDGEKPLYLHISAGSQ

SEQ ID NO: 164517 - protein, 66 aa, Oryza sativa
  Clone ID: PAT_MRT4530_63408C.1.pep
EKLRKKRDGIPKLHHAVTHMMDASGYREKAPQSVQEGDMRKHTALLRELEGISEAEKKLDAKTDNI

SEQ ID NO: 164518 - protein, 149 aa, Oryza sativa
  Clone ID: PAT_MRT4530_63409C.1.pep
RRRTALVRTPLLTSIRSRPTTNRSFAATDSGGRCHHRGGERQRCVQATTTTNSTGTPLLTSIRSRPTMHRIFAATDGGGHRRHRRGGERRRCVRATTMTGNTGTPLLTSIRTPAHAIFCIRPWTRRCRRRRRWGERRRCVQATTTTSST

SEQ ID NO: 164519 - protein, 59 aa, Oryza sativa
  Clone ID: PAT_MRT4530_6340C.1.pep
SLKKKSQPLDCWNTSGAVRNLYYSLLPSKMYHSPNSLHYLFTYNHAGNNYQIIHSTSQF

SEQ ID NO: 164520 - protein, 305 aa, Oryza sativa
  Clone ID: PAT_MRT4530_63410C.1.pep
MEIPTPELSSQFLKEITNEFSDERKVGEGAFGIVYKGMLKDGTEIAAKKLRETSPIHDNQFKNEVGSLMKVNHRNIVKLIGYCYEIQKKVVEHNGKYILTEAVEKLLCYEYISNGSLDKHLFGESSRLDWHTRFNIIKGVCEGLHFLHKGSERPIIHLDIKPSNILLDDNMVPKIADFGLSRLLGEEQTRVCTQNVMGAIGYMAPEYLYRGEISTQSDIYSLGLLIIEITTGEKNFPNREDIIAKNFIENVRRNRTNIVHISLKYPSLDTNCLQQVKTCIEIGLSCVQTNRKDRPSIGEIVNMLS

SEQ ID NO: 164521 - protein, 85 aa, Oryza sativa
  unsure (1)..(85): unsure at all Xaa locations
  Clone ID: PAT_MRT4530_63411C.1.pep
MXXXNPMFFWGAVLGGHFTWFGDCDMDXFVTGXXGGGLSPLXSLLXSPPXXGRXNXGIXRGXHPPFXXALVXHGFLTFTPGSSGP

SEQ ID NO: 164522 - protein, 115 aa, Oryza sativa
  Clone ID: PAT_MRT4530_63412C.1.pep
MATARRRPLGGDLGHGGLARKTTALVTVDGMAAVAAAAAECGGVVGSSGGMARMMTALVVATAWRQLFPNVLSIPSLLHRSPVQDFKARKIPESAEAEPEPECGYPQQEGEHLSI

SEQ ID NO: 164523 - protein, 867 aa, Oryza sativa
  Clone ID: PAT_MRT4530_63413C.1.pep
MQWSSNGEFAFHCLVGDCTLELLAKVMLLAFKSCILFCEYDLAAWKVNNSVIQWEEEINADVNAVVRAEEIGMAVVDREEIGAVQMRVVASNGAALGDGADALLDSSAGPGASAGPAGLSAGASEANNTLEVVVTVEASANGATAIAARRITAITSARAMADGAACAHASALGDSADVLLDSSVGPGAGAGPAGLSAGASEANNTLEAALTVEASANGATAMAARRITTRTSARAMADAAVGAHLRAFDLELWPLGQWIRCVARVTLDLASAALGDGADSLLDSSAGPGAAAGPAGLSAGASEANNTLEPPVTVEASANGATAIAARRITTRTSARAMADVAVGAHLRAFDLVVDAMGLLRLVGDLMMGGKAHAGQRPRPALAPSTPSSTGERRRRTRTNPAVGRHQPRQPGPPRHSTPHHPHRPSAPGNPAAERRHPTAEHRLRPPQPGATAQAERLPLIKSSSDVGVAHLSRSSATTFSASTSAAMIPVPDENLVPVGGAPSAAAASLLHADVPMEARVWAPLPDDLLLEVLARVPPFLLFRLRPVSRRWDSILHDPAFLAAHAGVPSHGPCLLTFWRGAASSPPQCSVLSLPLRARYKLPFGFLPAWDLWLVGSSGGLVCFSGFDGAGFRTVVCNPLTQTWRVLPDMHYNQQRQLVLAVDKKRRSFKVIAASDVYGDKTLPTEVYDSKENKWSVHQMMPAANLCSSKMAFCDSRLYLETLSPLGLMMYRVDAGNWEHIPAKFPRSLLDGYLVAGARTRLFLVGRIGLYSTLQSMRIWELDHGRTVWVEISRMPPKYFRALLRLSAERFECFGQDNLICFTSWNQGKGLLYDVDKKAWSWIAGCASQLCNSQICFYEPRFDTLIY

SEQ ID NO: 164524 - protein, 211 aa, Oryza sativa
  Clone ID: PAT_MRT4530_63414C.1.pep
LFHAGQDVTCSRTSSSRRDGMNNQRQHQDEGDVASSASPPPDCHTSSTSWIRRPCRGAEHVRRSRHRSLEVEKVDGAEGREGAGGDERGEGDGRATEATIEVNGRPRMASKEAARAGEADGDGGGRRRRRGRRRRMVKEEADKAATARDTDGDEGGGEGGEAGGGDGAGGEGDADGAGGDGGGEGEGPATEAAKEMDADGGGDGGEWHRLG

SEQ ID NO: 164525 - protein, 145 aa, Oryza sativa
  unsure (1)..(145): unsure at all Xaa locations
  Clone ID: PAT_MRT4530_63415C.1.pep
QDEGDVASSASPPPDCHTSSTSWXIRRPCRGAEHVRRSRHRSLEVEEADGAKGREGAGGDXRGEGDGRAMEATMEVNERPRMASKEAARAGXGEADSDGGGRRRRRGRRRRTATEEADKAATVGDTDGDGGGGEDGEASGQIYPS

SEQ ID NO: 164526 - protein, 244 aa, Oryza sativa
  Clone ID: PAT_MRT4530_63416C.1.pep
MHYNQQRQLVLAVDKKRRSFKVIAASDVYGDKTLPTEVYDSKENKWSVHQMMPAANLCSSKMAFCDSRLYLETLSPLGLMMYRVDAGNWEHIPAKFPRSLLDGYLVAGARTRLFLVGRIGLYSTLQSMRIWELDHGRTVWVEISRMPPKYFRALLRLSAERDVLRRLKLKCFSVQYLDSVHFSIGARLPAISSAGIDSVFFLETFMFTSFFFWARKLVNLIKFDNIVIRDIEICMTTSSVLIGQ

SEQ ID NO: 164527 - protein, 642 aa, Oryza sativa
  Clone ID: PAT_MRT4530_63417C.1.pep
MWRDIFVQSAIGISFPSSTVASPGLTAFSAPFIAVRIPRRRRLVRLLFHHPSPPPASPSPAPSVAVRLPRPRRLLRRHSGPPVHLYRRLRRPSISLAAFIASSALAALCPIHLLYLQRPVAAAAYVLGASARAADPRCAASMQWSSNGEFAFHCLVGDCTLELLAKVMLLAFKSCILFCEYDLAAWKVNNSVIQWEEEINADVNAVVRAEEIGMAVVDREEIGAVQMRVVASNGGIKNHSLGLHSYSFRHQRHLETGQMHCWTLPRDLGLPPGLPGSRQASALGDSADVLLDSSVGPGAGAGPAGLSAGASEANNTLEAALTVEASANGATAMAARRITTRTSARAMADAAVGAHLRAFDLELWPLGQWIRCVARVTLDLASAALGDGADSLLDSSAGPGAAAGPAGLSAGASEANNTLEPPVTVEASANGATAIAARRITTRTSARAMADVAVGAHLRAFDLVVDAMGLLRLVGDLMMGGKAHAGQRPRPALAPSTPSSTGERRRRTRPTPPSGATNPAAGRRRGTRRPTTPTAPCAGNPAAERRHPTAEHRLRPPQPGATAQAERLPLISILTDPVGSLSMQRAAATSALRTSPAAPPPPSPPPPPTMIPVPDENLVPVGGVGRVRRRFNGKRRSSSNLY

SEQ ID NO: 164528 - protein, 68 aa, Oryza sativa
  Clone ID: PAT_MRT4530_63418C.1.pep
QDQPGPGDIPESGTSIGGPSRPAFSPRRLFPTPSVAPLSAEPLLQALAVANTTVLDGLRVPSSNSTTP

SEQ ID NO: 164529 - protein, 84 aa, Oryza sativa
  unsure (1)..(84): unsure at all Xaa locations
  Clone ID: PAT_MRT4530_63419C.1.pep
QNXXKXXXXKXRHYLPKXSXKKFGVHNXHRAXSCLMMHXNRMYCAEIAHNVSTKKXAREIVERAAQLDIVVTNKLAKLRSQEDE

SEQ ID NO: 164530 - protein, 337 aa, Oryza sativa
  Clone ID: PAT_MRT4530_6341C.1.pep
IYLWRTEGTNSDFFLYDFSQLKEATNNFSNDNKLGQGGFGTVYKGLLPGGLEVAVKRLSACSVQGLLEFKNEIQLIAKLQHKNLVKLLGCCIEGEHEKMLVYEYLQNRSLDVFIFDFVKGAQLTWSKRLRIIDGIAQGILYLHNHSRVCVVHRDLKASNILLDSDMTPKISDFGMARIFGSNMIESNTTRIVGTHGYISPEYAFDGVCSIKSDVFSFGVLVLEIISGKRTAGFYPYDGKLCNLISYAWQLWRSGQGHELVCCRIGNNHKVIQRCIQVALLCVQERADDRPSIDQVVTMLNSEEMTLPKPNQPAYFYVRSSGSDDSSCNNSISITLAR

SEQ ID NO: 164531 - protein, 263 aa, Oryza sativa
  Clone ID: PAT_MRT4530_63420C.1.pep
MADGKVACKHLVLVHGACIGGWTYFKVATRLRSAGYRVTAPDLGASGVDPRPLREVPTFRDYTAPLLGLLGSLPPGEKVVLVGHSLGGINVALAAELFPDKIAAAVFLCAFMPDHTSRPSHVLEKFIEGKWLDWMDTEFKPQDAEGKLPTSMLFGPQIAQERLMQLCSPEDVTLAGSLLRVSSMFVEDLQKQQPFTEGRYGSVRKVYVVVNQDLAIPEGFQRWMIGNSPVDEVKEIDAADHLVMLSRPDELARCLADIAESYA

SEQ ID NO: 164532 - protein, 54 aa, Oryza sativa
  Clone ID: PAT_MRT4530_63421C.1.pep
MRRGLHSGWLSSAELLINTDSRSSAYKPVDATSGSCELEVLILLLEVREFEVDC

SEQ ID NO: 164533 - protein, 96 aa, Oryza sativa
  unsure (1)..(96): unsure at all Xaa locations
  Clone ID: PAT_MRT4530_63422C.1.pep
MKLSMKRPPHNLRCVXDFSFPGAPELLSLLEIWTPRVHEDLSSWSRYCQCEVIEKVCRDVSHVLGRGSCVKQSRSAGKVYPLQCEYTRKMSLQSIF

SEQ ID NO: 164534 - protein, 428 aa, Oryza sativa
  Clone ID: PAT_MRT4530_63423C.1.pep
MMNSTILDVFKSRNINGEFSGTVIHFYSFSYEGKDDTWYKGEIFPVMSLKTPLEKGKGIRVSIWTFPAEKEKELKEMILDLLPLESTALLKPSFAAYNSHIDRAILCCTPCTSNMTSWIAKQVQIPSDSYLQEDSKNMIRSILNLSKVMWDLGYACDGQRWSDVEVDEFIKLMRNPSASLEHLLNHPLLLPPEIRMSSYLNLWIENLTPDQHNLYNSITSYKEKVPNNKTFMYGDTTREAHRFSRNTASHYISHWRRLIPSSNRTKAPFDMVDKELKKCFPGLPCVRSFLTFASPIFTVGSEVSPPTIFLWLSISPAIFCTQSRMKMCNIHCIPGRSISNMSLTSGPIHCPNIGIMFRFRKSDLPPHGLGGLRALRIYPTKTIRIRKKVRSDGNYSNHFQPYFQQPHHFLPQSLLEPKQNTIQRAEKN

SEQ ID NO: 164535 - protein, 66 aa, Oryza sativa
  Clone ID: PAT_MRT4530_63424C.1.pep
KTGSATTSSHGSVLLHQGSRTDNQVLCIPLLIRPTAHWFPSIPGLRMPIIRPGEGGWLIWPSVTLD

SEQ ID NO: 164536 - protein, 58 aa, Oryza sativa
  Clone ID: PAT_MRT4530_63425C.1.pep
LGFLYFLGVLILFIPPFLRFCFQDLSSKGDNLSYKTPRVGGFNSRTPHNRATQKEGRP

SEQ ID NO: 164537 - protein, 332 aa, Oryza sativa
  Clone ID: PAT_MRT4530_63426C.1.pep
MAAGSRDGGARRRSCSVLVAAAAIFFGYAATAAGLQVGYYNNSCPGAEDLIQTIVHGAVRNDAGNGPGLIRLFFHDCFVRGCDASVLLDADPASNGTVEKMAPPNFPSLRGFGVIDRAKRVVERRCPGVVSCADIVAFAARDASRIMGGIKFAMPAGRLDGRVSSASEALANLPPGSFNLTQLVARFATKNLTADDMVTLSGAHSIGRSHCSSFSSRLYPQIDPAMNATLGVRSRAKCAAAPGRLDRVVQLDFKTPLQLDNQYYQNVLTHEVVFTSDQSLIDRPDTAALVAQYAGSRKLWSQKFAAAMVKMGNLDVLTGPPGEIRQYCNKVN

SEQ ID NO: 164538 - protein, 74 aa, Oryza sativa
  Clone ID: PAT_MRT4530_63427C.1.pep
MSLDGCNITDALGEKKGTLKRRRRGQRTNTSSGTELTLSPNRFLYSTAAWPRRRADEVLEEEAAAEALNLTLLQ

SEQ ID NO: 164539 - protein, 129 aa, Oryza sativa
  Clone ID: PAT_MRT4530_63428C.1.pep
MTAGTRSGCGDAPSPGGSGRFGNATLGRAGSAALGSSSVRGGGGFGARRQAARVDPTMTVGNREQAAESGEQHRQGGWEWGHPTWIRQQRQVPATRSWRQRLVPSRIWHRRRRRRPGTGGDGPFSAAWI

SEQ ID NO: 164540 - protein, 1096 aa, Oryza sativa
  Clone ID: PAT_MRT4530_63429C.1.pep
MGSKQIVAVLQVGGEFKTDDDGQMSYSGGEAHAMHVKSDWTFKTFKHEISSTLNNLKLDSYVFKYFLPRNNKTLISISNDKDLKRMVEFHAESETTYIYVMKKADNRVKTSAVVPAASADHAVAATTPDGSKRQKICASWENAITGAGQVFEGPKEFRDALHKYAIAHRFHYRFVKNDSSRVTVECTAEGCPWRIHASKSPAKKDFMIKKVFGSHTCESESVKSHRLASQKWVASVIKEKLRDSPNYRPRDIANDLQREYGLSLNYSQAWRGKSIAQKELYSSHEEACNQLPWFCQRIVETNPGSAATVEALEDSKFRFFVAFHASIQGFVHGCRPLLFLDVISVKPNKHWKLLAATSVDGEGDMFPVALSVVDDESQENWHWFLEQLKASLPVSGELTFISNGKCGLLDEVSLIFPDSYHGYHVNYFIEEFKAQLDDSWSEELKDTMVEHVKKAMYSCKVDEFNQCIELIKVESDKLAEWLLETKPEKWSDAFFKGSRLGQYTCNVPETILQWVPSRYELSVVQLVDTIRCNLMEMMYTRREYSNSWTEPLTPSTNQKIQEEMGKALTHSVVCSTGNDGNNNVFEVCDGAVNVVNIDTWDCTCRKWHVSGIPCSHAIAVFERTDHNPLDFCAKYFTTECYRLTYAMSINPIPDIVVAAPSTDPSQGEALHQSPILTRRQVGRPKEKPADPRIAIKRAVRCSRCKGYGHNKATCKVPILIDRYTSTRFTYHENTYTPSRGANGFSRRVHQPKHTSASPPETAARTDTATTTGARATRASTLPHPTPRAVIDSETSDFFAAPIRLPDTWVPHLPQPTRQRHNRKGGRPHQRETSDLLRPASESPTSGSHSTTASSSAPHLAPRLDSPRIPLSSLNPLLALLVLCFACCSPRPTAPAAVGGAVVSQVGMLPYEAREVAMGIHRDAVAQAQALRVAAASAIESVTARAPPFGPPAARHPGEAGRGNPPPPCAACGLPENPGGTIVCDSCERGFHLACVRVWPPLMPPPPPPPAPPGARRPRATANEDWICPECEMRGARTNRWKLGPVPLDINVPPPSTPDAEDPVAVATRDVTRQLSQLSFPQLLLLTADLIRWSKKC

SEQ ID NO: 164541 - protein, 86 aa, Oryza sativa
  unsure (1)..(86): unsure at all Xaa locations
  Clone ID: PAT_MRT4530_6342C.1.pep
AGECSCPGQLSTKKFFFHICLSKQGGGGGXLDDXVGKKTRRGWQNSLGVAIVKITNVWGQEQWVTXGGFLGGMIFXMSCNRLFWMC

SEQ ID NO: 164542 - protein, 95 aa, Oryza sativa
  Clone ID: PAT_MRT4530_63430C.1.pep
PRAAVVAAAPAVCRRRSSRRRSSGRSPSWSPSRRRPRPPLRRRCQPPEHRRRRRPVSSPCRPLPVGALRSRCRAVVRRRACTPEPPPVVTSPPTS

SEQ ID NO: 164543 - protein, 165 aa, Oryza sativa
  Clone ID: PAT_MRT4530_63431C.1.pep
MASRNNNYYHQGPNVLWEGSAPRGGATTKWRRVPEHPLPYPTFAPVRATAATVVEDDVFASGKVVITKDDIHAMVQELTQMEDDQCAAATESNHSNLNNAAADFVPHSNRDALDFFLSNSGFVPYNPAELDCRGCTPDLHTDSRWRCRCRPIYRRKPPLPSSLLD

SEQ ID NO: 164544 - protein, 107 aa, Oryza sativa
  Clone ID: PAT_MRT4530_63432C.1.pep
SSRRRVNDYRLLAPACPAPDAGCSSRRVHVGEGTSPARTVTVGGGGGGTSTAHTVAERTARHRSGRYIDGARERRCLHARWLTVTEWWWLYGQRPTARAGVAAACSV

SEQ ID NO: 164545 - protein, 150 aa, Oryza sativa
  Clone ID: PAT_MRT4530_63433C.1.pep
PGLQESARGGGGRGSGWGWGACGTAEPEVPACSTPRKSKRIVVVSPSSGSVLKKSRKTTPQKASRTKERGTTAAAGTSLASRPVPLRYPDYPSLQPGQHTLSNKYMCAVGNWMTECSRISKLEKQAHRKDIPTLRGEPKDPRTADAVVSS

SEQ ID NO: 164546 - protein, 318 aa, Oryza sativa
  unsure (1)..(318): unsure at all Xaa locations
  Clone ID: PAT_MRT4530_63434C.1.pep
MCRSGFDAYQGVCCSCIIRGGFSCHDSCSCRRLGCDQMLEDEHSCSSDDNLTIADTPSPIGEARVALRNGIVEIIANDQGNHITPWWWWITFTDDGERLIGEAAKNRAVVNMLAYFNNAQRVAGHQGCRVIAGLTIDRIINEPTAGAIAYDIDKKGTEKSVLIFDLGGNTFDISIIAIDNGVFKVLGGEDFDQRVMDHFIKLIKRNVGDARALGKLCRDCERAKRVLSNRGVVRGAXNDLFRKTMLLANKATADLFRKTMLLAKKAMADLFRKTMLLVKKAMSDAWLSKGDIDEIVSSAATGSSYSRTTSAARSPTVA

SEQ ID NO: 164547 - protein, 82 aa, Oryza sativa
  Clone ID: PAT_MRT4530_63435C.1.pep
MEVTSQAQVCALIALPCLRHDSKKDFRYQRVPIVGATAEDDLDVLGDIEAHPPFASWRNSEEARTDRPSQQLRSLNGEWRLM

SEQ ID NO: 164548 - protein, 48 aa, Oryza sativa
  Clone ID: PAT_MRT4530_63436C.1.pep
QVPWERVDVSFQKSSQRLVAHNTIQVKSYWLNSDGADVINHMMDNFIV

SEQ ID NO: 164549 - protein, 154 aa, Oryza sativa
  unsure (1)..(154): unsure at all Xaa locations
  Clone ID: PAT_MRT4530_63437C.1.pep
DSYSVMNNWHLRLLILIFGDYWRSGFVDDWIXQVMNRDCWILGPVRPSMGCRLKSMHVVGEDSVWHTMEILCAYGMPSQIWKESKFGTIGXVKLVSCVERFSRWIRISFMSLIHGFMLPTSCINREEGVASRYRGGQTDGICSIRPVTPTGFGG

SEQ ID NO: 164550 - protein, 398 aa, Oryza sativa
  Clone ID: PAT_MRT4530_63438C.1.pep
MGERLANEVLSVVEQRRGVKKISFVAHSLGGLVARYAIGMGRATATPAHGAHSRWPRAVARLRLAFRSPAPAASGGARWIGCFRPAPPAAVKEAKGKRPEVEKEPARGGGEDVWSAQAEAEVAQGGGFPEHLVVMVNGLVGSADDWKFAAEQFVRRMPEKVIVHRSQCNSATQTFDGVDLMGERIYNYPSDESVKSKLIYIDPWEFVFIVQTFVEQRRGVKKISFVAHSLGGLVARYAIGRLYEPNNKTKSSSEKSRDEGERLEGFIAGLEPMNFITFASPHLGSSGNKQHRLLVRDEKYPHIVHVDKGATNSNEAEARSDLYDPEEEMIRGLTQVPWERVDVSFQKSSQRLVAHNTIQIIAEWHLNCDYSKEVGVKSYWLNSDGADVINHMMDNFIV

SEQ ID NO: 164551 - protein, 191 aa, Oryza sativa
  unsure (1)..(191): unsure at all Xaa locations
  Clone ID: PAT_MRT4530_63439C.1.pep
MILSSWCGRPPPSPGSRRGPSPAPNSFPASTLTAVVTVASTATVLPPRCLPATSPPLPSPHXAPPPPHGRVTPLAPYXPPPPPXAAPRPPHPAASPPGVGARPPAPDPDRRGPEPATPPPPPPDPRASPPAAARXSPPPVPRRRVQEPAPPPHCHRPRCPPLQPSSMPPPRRRHAPPSSSTLQPRKSPPRS

SEQ ID NO: 164552 - protein, 53 aa, Oryza sativa
  Clone ID: PAT_MRT4530_6343C.1.pep
RIWGQEWQTSEVLTGELLTFRVMTGDHRKASSWHVLPPDWQFGVTYQATKNFN

SEQ ID NO: 164553 - protein, 71 aa, Oryza sativa
  Clone ID: PAT_MRT4530_63440C.1.pep
MELISSGLPITMQGGDGEAAPMASPTGLPACLTVRGEPSVPRGDEGRAMRTGLERWRQQVQSLACIDSNNR

SEQ ID NO: 164554 - protein, 148 aa, Oryza sativa
  unsure (1)..(148): unsure at all Xaa locations
  Clone ID: PAT_MRT4530_63441C.1.pep
PIYIQGRIGLLQRCTGEGERWRQSGLVKCLEWGGAAQSCVGAGAGDSAARLKPSLRALFSCKIFSTCMHXALSLTATPNNNDIVGMSGCGGGVVAGCGGGAAVMKAAVGSAGKRAAVIASMTISEPVAAASTAAIGEQRWKAVASNVD

SEQ ID NO: 164555 - protein, 107 aa, Oryza sativa
  unsure (1)..(107): unsure at all Xaa locations
  Clone ID: PAT_MRT4530_63442C.1.pep
KSMIHVSLVANYMMVMGPNGRPYELKLEKINNIGAXVKMCSNHLTLGKAAPGFPPRWPPTRSRGGRVVAGGGGRGRVVGGLADEGKSRRATMAMPSPGVALAQLVPH

SEQ ID NO: 164556 - protein, 178 aa, Oryza sativa
  Clone ID: PAT_MRT4530_63443C.1.pep
DLKPISSSPLHCGASPKTSSCFSPVRRSTMAFIWPGPPGAQPVGDLRVAQLALLVAGNGLIVSPSYLSSCPCDDGGRCFFQDGVAEQRCFDLANLVTAVLGLALLVGDMAFSTAVPGRSTQSQALATVARWLVGLAKVATVGTFQHWINAFYLCLKTWSITSYIIHPSLHDNPVLVFA

SEQ ID NO: 164557 - protein, 146 aa, Oryza sativa
  unsure (1)..(146): unsure at all Xaa locations
  Clone ID: PAT_MRT4530_63444C.1.pep
IPRKTYPKNGPFWGARVAAAVPPPTWRGDAEELTGTNHVKNKIKRMKYVACEIFQSSTEKLLSSKTQSCKRNLEVLIFPNPAKRGRIGCNFFCRCPCIYYLPDSESRNRNGGGGASMAGALLLPRRFTCATVAGGRRXRGWRRPVG

SEQ ID NO: 164558 - protein, 132 aa, Oryza sativa
  Clone ID: PAT_MRT4530_63445C.1.pep
SFLGRQRGLDGATSHSGALPLPTWRGDAEELTRTNHIKNKLKRTKYVACGIFQSSTEKLLSSKTQSCKRNLEVLILPNPAKRERIGCNFFCRCPWIYYLPDSESGGASHVGALLLPHRFACATMEGGRRQIG

SEQ ID NO: 164559 - protein, 171 aa, Oryza sativa
  unsure (1)..(171): unsure at all Xaa locations
  Clone ID: PAT_MRT4530_63446C.1.pep
RTATETSLPRPRPSSARKTYPKNGHFWGARVAGVXRTGASHSGAVPLPTWRGDAEELTGTNHVKNKLKRTKYVACEIFQSSTEKLLSSKTQSCKRNLEVLISPNPAKLGRIGCNFFCRCPCIYYLPDSESKNRNGGGGASMAGALLLPHRFACATVAEGRRLSLDDGASHS

SEQ ID NO: 164560 - protein, 23 aa, Oryza sativa
  unsure (1)..(23): unsure at all Xaa locations
  Clone ID: PAT_MRT4530_63447C.1.pep
GPPEDERPPCFXPKAWVAARPRL

SEQ ID NO: 164561 - protein, 87 aa, Oryza sativa
  unsure (1)..(87): unsure at all Xaa locations
  Clone ID: PAT_MRT4530_63448C.1.pep
PLVLYPDTERIAEMXNHIMDGEFXFKFXDNTVLKYNQVFPDDXXVVAAXMMIDGGGDRDGXDGGDGGDXFLLGPCFKNRWNFHFPWL

SEQ ID NO: 164562 - protein, 209 aa, Oryza sativa
  unsure (1)..(209): unsure at all Xaa locations
  Clone ID: PAT_MRT4530_63449C.1.pep
NYKRAWESCDGGERCQGGGGCDASEGGVWQRRGRLHGSPFLPSPTLGKTYLRNGSFWGARVAGAVIQQDGASLSGAVPLLTWRGDAEEITRTNHIKNKLKRTKYVACGIFQSSTEKLLSSKIQSCKRNLEVLISPNPAKQGRIGCNIFCRCPWIYYLPDSESRGWGGGGGASRAGALLPRAAPAXLPRRFACATVAGGRRQRGWRCPVL

SEQ ID NO: 164563 - protein, 155 aa, Oryza sativa
  unsure (1)..(155): unsure at all Xaa locations
  Clone ID: PAT_MRT4530_6344C.1.pep
ASTDGNDDSVYPIAVLIDELRNEDVQLRLNSIKKLSTIALALGVERTRKELIPFLTETIYDEDEVLLALAEQLGMFTPLVGGPEHVHCLLAPLESLATVEETVVRDKXVESLRIIVAQHSPSDLENHFVPLVKRLSSGDWFTSRTSACGLXSVCY

SEQ ID NO: 164564 - protein, 154 aa, Oryza sativa
  unsure (1)..(154): unsure at all Xaa locations
  Clone ID: PAT_MRT4530_63450C.1.pep
TPKKTYPKNSPFXGARVAGAVVQQDGASLFGAVPLPTWRGDAEELTGTNHIKNKLKRAKYVACGIFQSSTEKLLSSKTQSCKRNLEVLISPNPAXMGRIGCIIFCRCPCIYYLPDSEPRKRNGGGGASLLLPRRFACATVAGGRRXRGWRRPVG

SEQ ID NO: 164565 - protein, 97 aa, Oryza sativa
  Clone ID: PAT_MRT4530_63451C.1.pep
AHHLSRTAYIVRPNLQEYKLTTNSSVGLPATNYTSMAKIDRSKATLIRAVSPPGYNIGMVRYPSHTIPSFAPMKFTPTCILKLYDGEIDMLFVPHAL

SEQ ID NO: 164566 - protein, 96 aa, Oryza sativa
  Clone ID: PAT_MRT4530_63452C.1.pep
KLSSSSSSSCSPAAMVAGSSVSILMLEFICSCSWSSGLTKGVEQYLALTMLRTQRESSMAAMMTPLLTRRGSCRLRIDCFISPPAGPAQTPATALP

SEQ ID NO: 164567 - protein, 115 aa, Oryza sativa
  unsure (1)..(115): unsure at all Xaa locations
  Clone ID: PAT_MRT4530_63453C.1.pep
ELTGINHVKNKLKRTKYVACGIFQSSTEKLLXSKTQSYKRNLEVLISPNPAKRGXIGCNIFCRCPCIYYLPDSEFRNRNGGGGASMAGALLLPRRFACTTVAGGRRQPLWRRPVG

SEQ ID NO: 164568 - protein, 207 aa, Oryza sativa
  unsure (1)..(207): unsure at all Xaa locations
  Clone ID: PAT_MRT4530_63454C.1.pep
VHARPKPPPSPSLLLPGVNRAKSCRTVRLKINDGFPYHNSNQPSPCRPFXPSPPPRVELGLAPTRRQPFSPAVKSILRHILNPNRSFASSFTSSHXAEHRRPCSALFFAAKKFFRPXSVVSTDLAASPPTHQNNPSTATRRRRRTLATSPPRPQPLSPSIAVFGERLEVEEEKRERDXHVGVEDSSDTLDNTSQSQDIKQVKLLFTF

SEQ ID NO: 164569 - protein, 505 aa, Oryza sativa
  Clone ID: PAT_MRT4530_63455C.1.pep
MKQSMRSRQEPRRVSNGVIIAAMLLSLCVLSIVKARYCSTPFGTLRLRRGGAALFFLLLLLIFKPDDQLQEQMNSSIRMETDEPATMAAGEQEEDEEEESSGGGGAEPEVSATPAVVVTAAAGGGGGKRKPTCRMTSKRSERCEARGDIRVEGNASTIYIGGIDKEWKTKPYARYHDPVAMAVVREFTLKPVTESSPACTRNHSVPAFVFSNGGFSGNLYHDYTDVLVPLFLSTHQFKGQVQFLLSGLKPWWVNKFNLFFRQLTKYDILDIDNDKDVHCFPRIVVGATFHKDMGVDPKRSPGHVSVVDFKRALRRAFGLERVAASRGGATGNGKPRLLIISRKNSRRFLNEREMAQAAAAVGFEVRIAEPDQHTDMSTFAQLVNSADVMIGVHGAGLTNMVFLPRGAVLIQVVPFGGLEWLTTVTFKNPAKDMEVTYMDYNVQLEESSLIDQYPRNHQVLTDPYAVHKQGWDALKTAYLDKQNIKMDMDRFKKTLQEALDRLPPA

SEQ ID NO: 164570 - protein, 199 aa, Oryza sativa
  Clone ID: PAT_MRT4530_63456C.1.pep
MGREPDRAMGWALSYCRFNLKIRSVSLDASSFLFFPFCNLETPRKTYPKNGPFWDARVAGAVVQQDGASLSGAVPLPMWRGDAEELTGINHVKNKLKRTKYVACGIFQSSTEKLLSSKTQSCKRNLEVLISPNPAKLGRIGCNIFCRCPCIYYLPDSECRNRNGGGGASMAGALLLPRRFACATVAGGRRHPLWRRPVG

SEQ ID NO: 164571 - protein, 718 aa, Oryza sativa
  unsure (1)..(718): unsure at all Xaa locations
  Clone ID: PAT_MRT4530_63457C.1.pep
MSKKSRGGGGGAAAGEDPEDLSRSPLQAVLLADSFTLKFRPITLERPKVLLPLVNVPMIEYTLSWLESAGVEECFVFCCAHAQQVKEHLGKAGWTGKPAAREMTVTAVESHDAISAGDALRVMYGRGVIHGDFVLISGDTISNMNLKDALQEHKDRRKKDPLAVMTMVIKHSKPSILTNQTRLGNDEIVMAIDPETKELLYYEDRADVSNLYVTIDKDILASNPTLQLHNNMEITPNILHYFKSTYFSQIFFYLCSQDCYIDICSPEVLSLFTDNFDYQHLRRHFVKGLLVDDIMGYKIYTHEIRSSYAARIDNFRSYDTVSKDIIQRWTYPMVPDVLSFGDRQEIKLHRQGIYKASDVTLSHSAQIGANSVVGNGTSVGENCKVSNSVIGQGCNIGKNVLIHGSYIWDNVTIEDGCKVSNSLVCDGVHLGAGAIVEPGCILSFKVEVGKNVVVPAYSKVALLPQPSNEDSDEELEYADTNSGVTDSPPFSSMRSADHPTVSDDDDLEASETGTCGVVGYVWENVDAGIQEEWRQSIAPIPKDKLEELQHAASFDDDDDGSEDDFKNRPTVLDQDDDSDVSAVEDDDYSKFEKEVEETFQRALDGIHQDNLILEINALSKSXGKWKDLLRNYTRSADEEMEILLKFEEMCQENTKEFSPLFSKILPYLYDKEVVSEDAILRWAEEKENADESDKVFVKQSEAFIQWLKEAEEEDEEEE

SEQ ID NO: 164572 - protein, 140 aa, Oryza sativa
  unsure (1)..(140): unsure at all Xaa locations
  Clone ID: PAT_MRT4530_63458C.1.pep
TPEKTYPRNNPFWGARVAGAVPLSTWRCDAEELTRTNHIKNKLKRTKYVACGIFQSSTEKLLSSKTQSCKRNLEVLISPNPAKRGKIGCNFFCKCPWIYYFPDFESGGASHVGALXLPRRFACATVAGGXRQRGWRRPVG

SEQ ID NO: 164573 - protein, 725 aa, Oryza sativa
  Clone ID: PAT_MRT4530_63459C.1.pep
MSKKSRGGGGGAAAGEDPEDLSRSPLQAVLLADSFTLKFRPITLERPKVLLPLVNVPMIEYTLSWLESAGVEECFVFCCAHAQQVKEHLGKAGWTGKPAAREMTVTAVESHDAISAGDALRVMYGRGVIHGDFVLISGDTISNMNLKDALQEHKDRRKKDPLAVMTMVIKHSKPSILTNQTRLGNDEIVMAIDPETKELLYYEDRADVSNLYVTIDKDILASNPTLQLHNNMEITPNILHYFKSTYFSQIFFYLCSQDCYIDICSPEVLSLFTDNFDYQHLRRHFVKGLLVDDIMGYKIYTHEIRSSYAARIDNFRSYDTVSKDIIQRWTYPMVPDVLSFGDRQEIKLHRQGIYKASDVTLSHSAQIGANSVVGNGTSVGENCKVSNSVIGQGCNIGKNVLIHGSYIWDNVTIEDGCKVSNSLVCDGVHLGAGAIVEPGCILSFKVEVGKNVVVPAYSKVALLPQPSNEDSDEELEYADTNSGVTDSPPFSSMRSADHPTVSDDDDLEASETGTCGVVGYVWENVDAGIQEEWRQSIAPIPKDKLEELQHAASFDDDDDGSEDDFKNRPTVLDQDDDSDVSAVEDDDYSKFEKEVEETFQRALDGIHQDNLILEINALRLSYSLQHADCAGALFHSVMRSALVAAQSTNGNLLKTTAEALGKWKDLLRNYTKSVDEEMEILLKFEEMCQENTKEFSPLFSKILPYLYDKEVVSEDAILRWAEEKE

SEQ ID NO: 164574 - protein, 142 aa, Oryza sativa
  Clone ID: PAT_MRT4530_6345C.1.pep
FNLSNFTLGVWLGYFNADLAMLSWAYPSLGGMEYVLHHLLSIISLVYAIYSEEGQLYTYMVLISETTTPGINLRWFLDTVGMKRSKAYLVNGVTMFVAWLVKQMRTFSCILIFAVPTILLVMNTAWFVKILRGLKKTLAIHH

SEQ ID NO: 164575 - protein, 207 aa, Oryza sativa
  unsure (1)..(207): unsure at all Xaa locations
  Clone ID: PAT_MRT4530_63460C.1.pep
TPRKTYPKNGPFWGARVPGAVVQQYGASLFGAVPLPTWRGDAEELTGTNHVKNKLKRTKYVACGIFQSSTEKLLSSKTQSCKRNLEVLISPNPAKRWRIGCNFFCRCPCIYYLPDSVSRNRNGGGGASHAGALLPGAAPAWRPXLPRRFACATVAGGRRQAGAAPGRRAPAWLAQAALFPGFLERRKRFFQAPTKVVLARDISAENK

SEQ ID NO: 164576 - protein, 160 aa, Oryza sativa
  unsure (1)..(160): unsure at all Xaa locations
  Clone ID: PAT_MRT4530_63461C.1.pep
MIFKTTTPRKTYPKNGPFWDVRVAGALQRKEXATFLFLFYFFDIFFTLXELTGTNQVKNKLKRTKYVACGIFQSSTEKLLSSKTQSCKRNLEVLILPNPXIGCNFFCRCPCIYYLPDSESKNRNGGGGASHAGALLLPRRFACATVAGGRRQRGWRRPVD

SEQ ID NO: 164577 - protein, 73 aa, Oryza sativa
  Clone ID: PAT_MRT4530_63462C.1.pep
MEKKIKVEWPPRAYDEDHLPLAGGIKVIGRAPVAANRWRTPMAPKSVAASWYRAPPLLLLPAPASIDSGGRKG

SEQ ID NO: 164578 - protein, 587 aa, Oryza sativa
  Clone ID: PAT_MRT4530_63463C.1.pep
MAAFLRTLHRRRTRNAAAAAFLALAVVVVVFFLSVFVATRNEADIFFSGVAAASSSSPDSSSGGCRELQALDGDGARCRYLRAHAPCAPVGYVDYLRLLYCGFGRAPWLGYAALALWLLVLFYLLGDTASAYFCASLEGLSAVLRLPPAIAGVTLLSLGNGAPDVLSSVVAFAAGARGGDGGGGGGEDAGDVGLSGVLGGALFVSTVVAGVVAIVAGRRGGGEPVIIERRGFVRDVCFLLVALCYLLAVLLTGAVTVWSAASFLSLYAGYVLLVWTSHCCANASDELEVDDTKQPTSDLAAPLLVVDDDDASPPPLPVSSSSKPTSAPRTFARRLVDLLHSPLYLPRRLTIPDIAAHRWSKPTAVATALLSPLLLAATTAPTTTATTLLAATLAGALLAAAAAATTDAASPPKSRSARLPWLAGGFLMSVLWSYVLARELVALLVSIGVAAGVEAGVLGATVLAWGNSLGDLVADVALATRRGDGGAGAQTAVAGCYAAPAFNTVVGLGLSLTVAAGARHPEAYAVEGGAAVYVAVGFLAAALVWAVAVLPARGMRLDAVLGVGLLVIYFVFLCVSLAILTPLPSPH

SEQ ID NO: 164579 - protein, 68 aa, Oryza sativa
  Clone ID: PAT_MRT4530_63464C.1.pep
MDAPHVTRQWRTPPTSQRFARDPTAESSVKLELGQAVWLVARSDVDSSGIEHAASKRSQRGNSREVLI

SEQ ID NO: 164580 - protein, 369 aa, Oryza sativa
  Clone ID: PAT_MRT4530_63465C.1.pep
MASKHQLGQQEAMQEEDYIDMDLTSAAAATAPGEFEFDFHMSGPLGGGGARWEQEPLASPADELFYKGKLLPLHLPPRIQMVEELLDGRVVVGGAGRRQLAISTAPATPYDSCTASPANSCYASGELNVEEYFQEYAARLADAAAAACEKKPWSRKLRFMRQLNLGLKLKASKAYIKTIFAAKPASSGDDDDKDAILGATRETKELSHGGHHHHRAWRRNPFGQMRSNRCIASSQSGGGRGSVGGGKHKERDHGGHRRSFSSVIVRYSTSNKTSPAPQSSSCSSSSSVRTSSESDGGAAAPALRRSSSASSEVENPIQGLIAYCKRSQQLASVRKSASDAGFRFLSSAASKIAAAESDGPEELVEICRG

SEQ ID NO: 164581 - protein, 417 aa, Oryza sativa
  unsure (1)..(417): unsure at all Xaa locations
  Clone ID: PAT_MRT4530_63466C.1.pep
MLGPASFPVQFXKKIWDVIQHDQMNLFSDFHNSSLPIFRLNFWMIILVLKVHEANRIQXYRPICLLNSSXKIFTKVATNRISSVADHLVNPTQTTFIHGWNILDGVVIRHETVRELHRKKLSXTVIFKIDFKKAYXWSFLLQIIWMKGFSPNWISWIESFISRGSVAVKANDNIGSFFRTKKRLQQGDPLSPIVFIFVVDVLATLVNRAKTHGQINGLIPHLIDGGSSTLQNANDTMLFTNDLEKSXNMKSVLLTFEQLSRLKINFHKSDLHYFGEAIEYGDQYNWIFGCXGWQLFPFCYLGTTIHCRNLRNVDWKEEIERFEKKLSSXKXKLLSLDGRLTLIYLILSNLPMRMMSFLAIPSRILKKLAHLRSRFYWQGNRHKNKYXLAKWDITCRPKNQGGLRSHDLEIKNIVLLS

SEQ ID NO: 164582 - protein, 98 aa, Oryza sativa
  Clone ID: PAT_MRT4530_63467C.1.pep
MMVRGASDEDLIGDSGAIVQRRGHHLGALRFNAASTLFLPLVSNTVSAAAKWDAARVPLLFAWTVFLQMLRNTIDTARLSSSTSSNGNGSSKFRPSVE

SEQ ID NO: 164583 - protein, 110 aa, Oryza sativa
  unsure (1)..(110): unsure at all Xaa locations
  Clone ID: PAT_MRT4530_63468C.1.pep
MQLNPKARTRRNKTKAKGWRCAEIVLNVTLSMCGNHLEAPXSNPTSHIKLYCRDRLHRLTXPDSDSADLFVADLDSSRFMLCFRXDLRLQLCFDLIXIFFPNADVTKFGC

SEQ ID NO: 164584 - protein, 402 aa, Oryza sativa
  Clone ID: PAT_MRT4530_63469C.1.pep
MELNKQLVRIQEDKEKACTQPKSCGHFSYDMSIDRRVHPTKGFRPDGRSSSYRHRSGHPALRLFVWAASMLFLLLVSYVVSAAAKWDAARVPLLFAWIVFLQMLQNTIDTTRSSLSTIGNGSGNSKFRPTDRVGVKADGERVLGELGGDEPVDELGEVEHPGQAGGVDGVPQHLEEDSPGEEERDTRGIPLGGGGDGVGDEREEERGGRLDEEAKHRVAGAAAVGAEHDEEGNSHVGQNRDQNRRGTYCDPFWYSNHRAGAAGEECSPLIYTPHYRPSPRRDAPQQRSSSPTAYPLSTDRLTSYHDIDNVRESYVEAECAEVVPSSLDNGPTISNQILVRCSTHHHRRPLGRRRLPAQPPPTSSQSLLVPLYKRACKKHHYMKRCHHQRPAPSGSSSVMQAP

SEQ ID NO: 164585 - protein, 673 aa, Oryza sativa
  Clone ID: PAT_MRT4530_6346C.1.pep
MTLQMEPPPPPPRRSVSTSCDLHPGETFTGFCAACLRERLAGLEASTAAAAAAPGRRSTSAIRSLFSRPFVAAGGADVDGGGGGAVPSGSSAAVPDLRRCKSFSCGRGGDVLAGGCGDEPQRRSCDVRGRSTLWALFHQDDRERVPSSAAAAALASEVQPQPPPPPPPCVPEVFLEEEIAMAEESDEITPVVEPILVVDTSGEMETEANGGREAKAMKDHIDLECSQAKKPQPKDLKEIAGSFWLAASVFSKKWQKWRRKQKLKKQDAAGSKAAAAAMPPPEKPSKPSFLRRSRLRGEACSEFAGGRRSCDTDPRFSLDAGRMSVDDVGFSWDEPRASWDGYLFGAGTGIGLGRAPPPLSRLPPILSAMEDSPAGIVERSDGQIPVEDDSQPEPDPDADTPGGSVQTRDYYDTSSSSRRRRSLERTSSVRRPSFEVTDAKPVLPAAAAITSVKDSPLIGSSEFYHFQHAEDLLEHHRFSTSSLIEDFPMSLDAAFPGPDKKPRRWRKAWSLWGLIHRRAAGRRGGASDVADRAFSEPWPELRVRGCNARMQRCNSNASARSSFSSNSGGLGSSRRSYVDGNGNVVKRRREECALERNRSARYSPGHADNGMLRFYLTPMRSGGGSDGGRARVAALVEVDAGGAVAGVPVVQVLLVQVPLRQSLPPPPDSQATE

SEQ ID NO: 164586 - protein, 50 aa, Oryza sativa
  Clone ID: PAT_MRT4530_63470C.1.pep
ILVLNLYGSFSVNDVCRLLCTSRTYTFYVVKFERSILFTTKKKKRAPEIE

SEQ ID NO: 164587 - protein, 102 aa, Oryza sativa
  Clone ID: PAT_MRT4530_63471C.1.pep
MAAEGNASSSSTATGRGCGLALGRLVRKLRRQSRMMLSTATSSRPPAAARCQYDPLSYARNFDRSGLGDDGGDVSAQLYHRYTFASRFVLSSSSTAARRQPQ

SEQ ID NO: 164588 - protein, 791 aa, Oryza sativa
  Clone ID: PAT_MRT4530_63472C.1.pep
MVSVIEELSGLTSRELGEMLKESENFVLQEKTEDGGTKQVDMEKLVSSLPLHLLAVCLELERGSDLAYVLRGMRFLHSLSELSARHTRLEQVLLDDVKLSEQVMDLIFFVLSILSHWKKENHLGVSPFIHSSLVAASLHLLTSYFSSQWHELVHILLAHPKVDIFMDVAFDSLHDDELSRNGGILSLSRSILKLGVPECLKGSIDIAASMSRLKAKILSILLQLCEAETVSYLDEVATSPKSMQLGQTLALEVLDLLKTAFGRKQKLTLDSHDKSYPMGSVLISALRLVDVFSDDSNFRSSFITNTIPFLTQILAIPHDEFVSNWCSVNLPVIEEDANLDYDPFGAAELALAAAGSLSEYARSLIPNNLLNEEDVQLLSEFAYKLQTWCKSHVGQSTSQAVKIDPSSESKEDFKPLQHPLIPSTVVPDSSINNLPKNMEEPTPTNMEEPAPTPSTKQEGNARDETPRSTVALNGGFLQNSVGQDLVHLGVARTSSGFLGGGTSTSTGSLRCKMDLDPASSSMDHFKTPDRKESGLQDDEKGDTHMYDERQPKRRKRTIMNDRQINEIEKALIDEPEMHKNAALLQAWSEKLSGQGSEITSSQLKNWLNNRKAKLARIAKERGVLSEGENADKPSTPATPHHCDSSESAGEESYLPPARVMSALGISKGSRFVSPDGNETTSQAEFNQNIMLSRPFTRSFSFEPGRLVSLIDNDGKEVGRGKIFQVEGRLQGKALTDTRVCIVDVIELKIEKWRELPHPSEASGRTFQEAESRNGGVMRVAWDVIRLSPVVQ

SEQ ID NO: 164589 - protein, 168 aa, Oryza sativa
  unsure (1)..(168): unsure at all Xaa locations
  Clone ID: PAT_MRT4530_63473C.1.pep
NGLGGERKFTEAIVTRVDCKKDILLVLVDKSKLLNLKGKQCRFQHPPLVASQNLPCSLEXVVMISWPPCMNRATSVGRISHPSRHYDDVSNTNEYGYNMNLIEVDMMVAEGSSGAPLLNCRANFVGLLQGGGKECFSCFVSLSDICKKLTEWGIFPREKVIQQKKSQK

SEQ ID NO: 164590 - protein, 83 aa, Oryza sativa
  Clone ID: PAT_MRT4530_63474C.1.pep
MKVLLWPCSWIHDPRLIAPLKRYFDASARRERSTSSSLLLQLLLIFKLNWDQLLFFFWPDTEYSQTSIEPCLHCVSSYLNVFV

SEQ ID NO: 164591 - protein, 878 aa, Oryza sativa
  Clone ID: PAT_MRT4530_63475C.1.pep
MPSRKRDSLKCQDEARRTRHFAIFLLLLIFEMIFPSMRVDLTKLPLRSGRKGIEIQRLEEEPERSLDVVVGDAGAVDADAGVETIFYVASDGVVEPAPPHGPAVDAPPAVDWDSLEVLAQNEEEGRLEIVDDDKFYELLGLRAEDEQADRNRQAAGGEAAPNAAQNVEGGDPDVNVAGVGGPDDMDAALPVDDSIPGENVMAYDPDNPCMDLGTAYPSMEEFRLAMRQFAINNEFELDVVKTDPTRYIGGCKVDGCVWHIVGSRQADLKTIKVTVLTDFHTCTSSSRRRTTTPTTKWVASKAVKILKTNPGMGPKSLMIRLQEDHKCTIKYDTVCKGRQRALLELYGSWEESFHMLYRWRAQVLRTCPGSVVEIGTKEPCIDGFLEGCRPYISIDSTALNGSWNGHMAAATDAETEDNWVWFMEQLKTAIGDVDPLAICTDACKGLEKAVHNVFEKAEQRECFWHLMKNFVKRFGSDGHSHMYPTARTYRKTVWQEHMKHVISCPGVLEWLETYHPLMWMRSAFNPEIKCDYVTNNLAESFNNWIKDYKDLPVCELADKYREKVMVLWNKRRRIAERMTGKILPAVNKQLVAMTRGLGHLSVVKADSFTAEVVDNSSIHGKYIVKACLQYCSCEEWQHTGKPCQHALALITSQQSRDVHIEDFVDRYYTVQMFRNAYKRVIEPLGDRSHWPEVDLPWVLGAPLPRKTSGRNRKLRFKGCLEGGGKKKAKVIAEPTATDKGKRQLLRGKRRCKGCRELGHTQNSYKCALNGTKKRKRKPRRNTTKYGHTSEIPSPSRPTVDTILQDNPGRLTRSSRLAQLMNGPGPSSQPTVQAGPSSQPTMQTTSSSQPTVQAGSSKQPTMVPEPPRRSPRKKLTPKN

SEQ ID NO: 164592 - protein, 329 aa, Oryza sativa
  Clone ID: PAT_MRT4530_63476C.1.pep
MSKFVLDWYLQKKTQMAPKTTCKMMQHQYCTTVLHPGVEPCLAVDQVPRVFRLLREMAERAILVKPIPFFDHIQALFGEWSVDADPVTDPIEAANINGDDMEILDPLNMMTNCADDKDPDGAHLDKFILEDEDDCHEPSGSFAESTMAALKPGLKKCKVVSRTKTTPNPKPQAPVPHDGRKADMVKKFEVHRSFFMNMGREYLEAWAHKFLSGVGPTPASSSLTPPPLRLLAGVEPRDPSEMATGEAAAAAASPPELASFLAIGLDQRTAENALANRKVTANLTAVIAEAGVSGCDKSVGNLLYTVATKYPANALVHRPVVIQYIVSSK

SEQ ID NO: 164593 - protein, 694 aa, Oryza sativa
  Clone ID: PAT_MRT4530_63477C.1.pep
MDIKPRSKLGFAGMPSRKRDSLKCQDEARRTRHFAIFLLLLIFEMIFPSMRVDMTKLPLRSGRKGIEIQRLEEEPERSLDVVVGDAGAVDADAGVETIFYVASDGVVETAPPQGPAVDAPPAVDWDSLEVLAQNEEEGRLEIVDDDKFYELLGLRAEDEQADRNRQAAGGEAAPNAAQNVEGGAPDVNVAGVGGPDDMDAALPVDDSIPGENVMAYDPDNPCMDLGTAYPSMEEFRLAMRQFAINKEFELDVVKTDPTRYIGGCKVDGCVWHIVGSRQADLKTIKVTVLTDFHTCTSSSRRRTTTPTTKWVASKAVKILKTNPGMGPKSLMIRLQEDHKCTIKYDTVCKGRQRALLELYGSWEESFHMLYRWRAQVLRTCPGSVVEIGTKEVDGRVHFHRFFCALKPWIDGFLEGCRPYISIDSTALNGSWNGHMAAATGIDGHNWMYPLAFGFIDAETEDNWVWFMQQLKTAIGDVDPLAICTDACKGLEKAVHDVFKKAEQRECFWHLMKNFVKRFGSDGHSHMYPAARTYRKTVWQEHMKHEWQHTGKPCQHILALITSQQSRDVHIEDFVDRYYTVQMFRNAYKRVIEPLGDRSHWPEVDLPWVLGAPLPRKTSGRNRKLRFKSCLEGGGKKKAKVTAEPTAADKGKRQLLRGNRRKRKPRRNTTKYGHTSEIPGPPRRSPRKKQPMHLQ

SEQ ID NO: 164594 - protein, 162 aa, Oryza sativa
  Clone ID: PAT_MRT4530_63478C.1.pep
MVFLEPITPRKTYPKNGPFWGARVAGAVVQQDGASLFGAVPLPTWRGDAEELTGTNHVKNKLKRMKYVACGIFQSSTEKLLSSKTQSCKRNLEVLISPKPGRIGCNIFCRCPCIYYLTDSESRNRNGGGGASHAGALLLPRRFACATVAGGRRQRGWRRPRE

SEQ ID NO: 164595 - protein, 70 aa, Oryza sativa
  Clone ID: PAT_MRT4530_63479C.1.pep
SKRDGELRVDCNDGLPGVFDAREPAAGLALDLAEPREVAAQEGDGRGDGEMRLDHRPPAAKLGFTLARYF

SEQ ID NO: 164596 - protein, 709 aa, Oryza sativa
  Clone ID: PAT_MRT4530_6347C.1.pep
MTLQMEPPPPPPRRSVSTSCDLHPGETFTGFCAACLRERLAGLEASTAAAAAAPGRRSTSAIRSLFSRPFVAAGGGGGGGGGGGAVPSGSSAAVPDLRRCKSFSCGRGGDVLAGGCGDEPQRRSCDVRGRSTLWALFHQDDRERVRDGTAFGAFPASSSAAAAALASEVQPQPPPPPPPCVPEVFLEEEIAMAEESDEITPVVEPILVVDTSGEMETEANGGREAKAMKDHIDLECSQAKKPQPKDLKEIAGSFWLAASVFSKKWQKWRRKQKLKKQDAAGSKAAAAAMPPPEKPSKPSFLRRSRLRGEACSEFAGGRRSCDTDPRFSLDAGRMSVDDVGFSWDEPRASWDGYLFGAGTGIGLGRAPPPLSRLPPILSAMEDSPAGIVERSDGQIPVEDDSQPEPDPDADTPGGSVQTRDYYDTSSSSRRRRSLERTSSVRRPSFEVTDAKPVLPAAAAITSVKDSPLIGSSEFYHFQHAEDLLEHHRFSTSSLIEDFPMSLDAAFPGPDKKPRRWRKAWSLWGLIHRRAAGRRGGASDVADRAFSEPWPELRVRGCNARMQRCNSNASARSSFSSNSGGLGSSRRSYVDGNGNVVKRRREECALERNRSARYSPGHADNGMLRFYLTPMRSASGRRAPGGLPGAKRGGRENLRGGEKILFPPPPFKKWGPGGGTRRGWGGFLGGGGAPPVWGGGPKGEKGYKPKKNFF

SEQ ID NO: 164597 - protein, 150 aa, Oryza sativa
  unsure (1)..(150): unsure at all Xaa locations
  Clone ID: PAT_MRT4530_63480C.1.pep
TPRKTYPKNGPFWGARVAGAVVQQDGASLFGVVPLPTWRGDAEXLTGTNHVKNKLKQTKYVAYGIFQSSTEKLLSSKTQSCKRNLEXRGRIGCNFFCRCPCIYYLPDSESRNRNGGGGASMAGALLLPRRFACATVAGGRRQRGWRRPIG

SEQ ID NO: 164598 - protein, 134 aa, Oryza sativa
  Clone ID: PAT_MRT4530_63481C.1.pep
RDPYSDLARSTHQNPVILERIDTQIRQKDRENKTKTLDRAGTRNSHLTRAETGEPKCSSEPNTPAPNSAPGADIEVPSTPKRSTRKQPNSDRAIDGFKSNQGTSRAEQIRTPNPRHDLIGREGIPHLGHLVALV

SEQ ID NO: 164599 - protein, 132 aa, Oryza sativa
  unsure (1)..(132): unsure at all Xaa locations
  Clone ID: PAT_MRT4530_63482C.1.pep
LVQLDGASLSGVDPLPTWQGDVEELTRTNHIKNKLKRTKYVACGIFQSSTEKLLSSKTQSCKQNLEVLESPYPTKRGXIGCNFFCRCLWIYYLPDSESGGASHCGALLLPRRFACATVAGGWRQRSWRRPVG

SEQ ID NO: 164600 - protein, 161 aa, Oryza sativa
  unsure (1)..(161): unsure at all Xaa locations
  Clone ID: PAT_MRT4530_63483C.1.pep
TPEKTYPKNSPFWGARVAGAVVQQDGASLFGAVPLPTWRGDAEELTGTNHVKNKLKRTKYVACGIFQSSTEKLLSSKTQSCKRNLEVLISPNLAXRGRIGCIIFCRCPCIYYLPDSESRNRNRGGGASHAGALLPGAAPASXLPRRFACATVAGGRRHPVG

SEQ ID NO: 164601 - protein, 59 aa, Oryza sativa
  Clone ID: PAT_MRT4530_63484C.1.pep
SGGFRVSVKDTLICNPGDSERVLSCRLMGDPEGGMVWYIKHKRLFYILKVGDQEAPCFL

SEQ ID NO: 164602 - protein, 141 aa, Oryza sativa
  unsure (1)..(141): unsure at all Xaa locations
  Clone ID: PAT_MRT4530_63485C.1.pep
IPEKTYPRNGPFWXGASXSGAXPLPXWRGDAEELTRTDHIKNKLKRTKYVACGIFQSSTKKLLSSKTQSCKQNLEVLISPNLAKPGRIGCNFFCRCPWIYYLPDSESGGANHFGALLLPRRFACATVAGGRRQRGWRRRPL

SEQ ID NO: 164603 - protein, 57 aa, Oryza sativa
  Clone ID: PAT_MRT4530_63486C.1.pep
MALETGIRVYENASHGCSGGCGGGLDLHGRPLMERHAADWAATCRSCSRPLQPIPPH

SEQ ID NO: 164604 - protein, 195 aa, Oryza sativa
  unsure (1)..(195): unsure at all Xaa locations
  Clone ID: PAT_MRT4530_63487C.1.pep
LFLLSPFLKSGTPRKTYPKNCPFWGARVAGAXIQQDGASLFSAVPLYTWRGDAEKLIGTNHVKNKLKRTKYVAYGIFQSSTEKLLSSKTQSCKRNLEVLISPNPAKLGRIGCNFFCRCPCIYYLPNSESRNRNRGGGASHAGALLPGAAPXMAGALLLPRRFACAPVAWRTALFFLYLLPSLFLPIHLFYPPCFS

SEQ ID NO: 164605 - protein, 106 aa, Oryza sativa
  Clone ID: PAT_MRT4530_63488C.1.pep
QAFSDMKFVKPSEAGETNATEWALNYIKEKAPELLSVVANSEVFNNKKGGAKKMCQKKEVPFFGKVPMDPQLCKAEKKKKSFFPDKKSRVSAPAFKRKIKKLVKTK

SEQ ID NO: 164606 - protein, 158 aa, Oryza sativa
  Clone ID: PAT_MRT4530_63489C.1.pep
TPRKTYPKNGPFWGARVAGAVVQQDSASLSGAVPLPTWRGDAEELTGINHVKNKLKRTKYVVCGIFQSSTEKLLSSKTQSCKRNLEVLISPNPAKLERIGCNIFYRCPCIYYLPDSESRNRNGGGGASMAGALLLPRRFACATVAGGRRQPLWRRPVG

SEQ ID NO: 164607 - protein, 89 aa, Oryza sativa
  unsure (1)..(89): unsure at all Xaa locations
  Clone ID: PAT_MRT4530_6348C.1.pep
NTITYEVLCSDHRNRQHDGXLIIHVDVDVLASKLTGLGRHKWFYLPHDLVILSFSCRDAVKKVHASLLCWQKCCWQHFISLPRTRGSTR

SEQ ID NO: 164608 - protein, 236 aa, Oryza sativa
  Clone ID: PAT_MRT4530_63490C.1.pep
LVLTEVELPLMSGFLLLSTIMEHDACKNIPVIMMSSNDSVSMVFKCMLKGAADFLVKPIRKNELRNLWQHVWRKQLSSGVLDVQHTQQEDNLTERHEQKTGVTKAEHVTENVVHKNMECSEQESDAQSSCTRSELEADSRQTNNLLEYKQPMGRHFSKPDHKNTEKNGGTKIHASNDGNLIPRREEDASLRRMTCSNDINCEKASRDMELVHIIDNQQKNNTHMEMDVARANSRGK

SEQ ID NO: 164609 - protein, 103 aa, Oryza sativa
  unsure (1)..(103): unsure at all Xaa locations
  Clone ID: PAT_MRT4530_63491C.1.pep
VPQYLIAFIGHRLPSYLFCTLXPHSCAPGFPVGHPSQIAPGQARLTLEFFGDWLPEKKLQLVDMSILLILLSPRPGCYSFSRSRLEVSSSNRLPTSVAWLSLS

SEQ ID NO: 164610 - protein, 569 aa, Oryza sativa
  Clone ID: PAT_MRT4530_63492C.1.pep
MGGGVEERKVVDLEDGDGEEGEDAAPVAAGSSRETRMLPRMPVRVLLAEGDDSTRHIICALLRKCGYRGERLCRTSSGVLDVQHTQQEDNLTERHEQKTGVTKAEHVTENVVHKNMECSEQESDAQDQNTVHTNSLIKPITEYLFVSRTVVIMLSSDLFAVVRGLNFGSPLAEFMYKNGPKDTDTKQVENVEEQTARSHLSANRKHLRIEIPTDEPRHVSPTTGESGSSTVLDSARKTLSGSVCDSSSNHMIAPTESSNVVPENPDGLRHLSQREAALNKFRLKRKDRCFEKKVRYQSRKLLAEQRPRVKAERRRSGKLVRAYGDDRRAALASPAGGAPEGDAKPCHDVRGATPSRRFPSSAKDGGGVLQDSAQGTRHDCEEVKVRRCRFLESSGVLMGFKSDKKARFCEAHHRARRFRHLATAALAVAALAAAAAAALVLYLVHRPEGLVAHVSYRGNPVMPPAPLPPVAQDRGADVAMSPLLGGAAVPVSPDAARALAADCAARRVQLRLVVMGRVKYRSGPFRSGWRDLYVRCNVVVGLSTEAAVAGGGGGGDVPLLEYPRCAVDA

SEQ ID NO: 164611 - protein, 125 aa, Oryza sativa
  Clone ID: PAT_MRT4530_63493C.1.pep
MGAKVGAVPNIRDSLEWNNQADLKATRPVALYHLRFSDGAGRLARLNISTWLTKIHLEHAQCVGCGFGRAFSIKLTPSLAGTGFTSASTAVPRAPRRNRSYALNGLGDEMSAAGQGGKAGNSSLL

SEQ ID NO: 164612 - protein, 154 aa, Oryza sativa
  unsure (1)..(154): unsure at all Xaa locations
  Clone ID: PAT_MRT4530_63494C.1.pep
TPRKTYPKNGPFWGASLFGAVPLPTWRGDAEELTGTNHVKNKLKRTKYVAYGIFQSSTEKLLSSKTQSCKRNLEVLISSNPAKRGRIGCNFFCRCPCIYYLPDSESRNRNGGGGASHAGALLPGAAPASXLPRRFACATVAGGRRVAILFDCND

SEQ ID NO: 164613 - protein, 218 aa, Oryza sativa
  Clone ID: PAT_MRT4530_63495C.1.pep
MDVSRKARFCEAHHRARRFRHLATAALAVAALAAAAAAALVLYLVYRPVMPQASVPRAAVYRLALANASSSAHALAASVQFTLVLHNPSDRASLLYDGLVAYASYRGEPVMPPAPLPPVAQDRGADVAMSPLLGGAAVPVSPDAARALAADCAARRVQLRLVVMGRVKYRSGPFRSGWRDLYVRCNVVVGLSTEAAVAGGGGGGDVPLLEYPRCAVDA

SEQ ID NO: 164614 - protein, 123 aa, Oryza sativa
  unsure (1)..(123): unsure at all Xaa locations
  Clone ID: PAT_MRT4530_63496C.1.pep
ATLRERKEELTGTNHVKNKLKRTKYVVCGIFQSSTEKLISSKTQSCKRNLEVLVSLNPVKRGRIGCNFFCRCPCIYYLPDSESKNRNGGGGASMAGALLLPRRLTCATVAGGRRPKXWRRPVG

SEQ ID NO: 164615 - protein, 255 aa, Oryza sativa
  Clone ID: PAT_MRT4530_63497C.1.pep
MTPTDLVKMDVEVDDEDKAIVLLCSLPESNEHVVTTLTYGKDTIKTKYITSVLLARDQLRKNKEGETSQAEGLLVKEDHVGRKVKKNKKKKMVQCFRCDEWGHISRECPTLKEKAKANAVTSSNDSDSDGCDLLTMSRDDISYPAVRVGEVKIKLEDGGEHILQGVRHVAGLKRNLISLGTLHKDGLIFHGNRNRKTMEIMMGKTTVMTGEKVESQLYKLRGCIVAGGVYEEAVAGIAIAFGGGGSGADSSGGLR

SEQ ID NO: 164616 - protein, 566 aa, Oryza sativa
  Clone ID: PAT_MRT4530_63498C.1.pep
MGGGVEERKVVDLEDGDGEEGEDAAAVAAGSSRETRMLPRMPVRVLLAEGDDSTRHIICALLRKCGYRVAAASDGVKAWDILKEKSFNIDLVLTEVELPLMSGFLLLSTIMEHDACKNIPVIMMSSNDSVSMVFKCMLKGAADFLVKPIRKNELRNLWQHVWRKQLSSGADSRQTNNLLEYKQPMGRHFSKPDHKNTEKNGGTKIHASNDGNLIPRREEDASLRRMTCSNDINCEKASRDMELVHIIDNQQKNNTHMEMDVARANSRGNDDKCFSIPAHQLELSLRRSDYSRLESQEKNERRTLNHSTSSPFSLYNCRTASSTINAGDAQACSTSATHIDLENKNGDSKTPSQDKRETNQPPIRVVPFPVPVGGLTFDGQPFWNGAPVASLFYPQSAPPIWNSKTSTWQDATTQAISLQQNGPKDTDTKQVENVEEQTARSHLSANRKHLRIEIPTDEPRHVSPTTGESGSSTVLDSARKTLSGSVCDSSSNHMIAPTESSNVVPENPDGLRHLSQREAALNKFRLKRKDRCFEKKVRYQSRKLLAEQRPRVKGQFVRQDHGVQGS

SEQ ID NO: 164617 - protein, 92 aa, Oryza sativa
  Clone ID: PAT_MRT4530_63499C.1.pep
SVFRVDPASAHASVKRKKKKKKKKKKIKKKKKKKRKKRYEGYKDLKNLCWGSVLSFFLVLFCLLSLVGGSFGFWVGNWFGHQFSSLCSGINL

SEQ ID NO: 164618 - protein, 39 aa, Oryza sativa
  Clone ID: PAT_MRT4530_6349C.1.pep
GEAGRRRVRLVDQAGVVGHAEPPRLDERRRDHGETGRRC

SEQ ID NO: 164619 - protein, 116 aa, Oryza sativa
  unsure (1)..(116): unsure at all Xaa locations
  Clone ID: PAT_MRT4530_634C.1.pep
GLLTPGGGGFSLFSPFPEIERVVFPRVAPGGFPAVRGKGPXTPPDFLAKMLESIPKAKEGCPETPANGKCPAGWDKVEELRGGGTPGRDKLKEPPPPLEAFCKAPPEPDEGPPFAN

SEQ ID NO: 164620 - protein, 631 aa, Oryza sativa
  Clone ID: PAT_MRT4530_63500C.1.pep
MNIDDALAEELQLQEAILFSAFQEMIIQDTDDDDSIGNLILIGQDQGQESKKPFSVADHGESSSPSPLTMTTTTGGGGAGEFYCSICMETVPGALKFSVSPCLHAFCVCCIGQYVAAKIGENTADVRCPDPGCGGGVEPESCRGVVPSEVLDRWGLLLCEAAIVARRLHCPFRDCSEPLLADADGEGGGVAEAECPSCHRLFCARCMVPWHDGVGCEEFQELGEDERGREDVMVRRLAGRERWQRCPQCRMYVEKSEGCMFMKCRAAGEGPPDMSANVDLDAKRLVPLKAWGRCRGCWSSSSSYPRSKMLMSEIGSQDEFVKTNTDYIEKGEYSGGDRPVRSRVGKMAPTGMKFDLVKFDGSGNFGLWQTKVKDLLAQQGVSKALKGEKPAKMEDDDWKEMQLQAAATIRLCLSDQEGADLTAHVNVFNQLVTDFMKMDVEVDDEDKAIVLLCSLPESYEHVVTTLTYGKKTIKTKDITSALLARDQMRKNKEGETSQAEGLLVKEDHVGHKLGDDTSYPAVGVREVNIKLEDGGEHVLQGVRHVPGLKRNLISLETLHEEGLIFRGNRNRKTMEIMKDKTTVMTGEKVESHLYKLRGCTVAGGVQEGAVARIAIVFGGGGSGAYSSGGLR

SEQ ID NO: 164621 - protein, 303 aa, Oryza sativa
  Clone ID: PAT_MRT4530_63501C.1.pep
MAPTGMKFDLVKFDGSRNFGLWQTRVKDLLAQQGVSKALKGVKPAKMEDDDWEEMQLQAAATIRLCLSDQKLYGLKMQEGADLTAHVNIFNQLVTDLVKMDVEVDDENKAIVLLCSLPESYEHVVTTLTYGKETIKTKDITSALLARDQIRKNKEGETSQAEGLLVKEDHAGHKSKDAEAWILDSASSFHVTPRKEWFSSYKSGEFGFVYLGDDTSYPAMGVGEVKIKLEDEGEHVLQGVRHVPGLKRNLISLGTLHEEGLIFRGNRNRKTIEIMKGKMTVMTGEKVESHLYKLRGCTVAGGV

SEQ ID NO: 164622 - protein, 476 aa, Oryza sativa
  Clone ID: PAT_MRT4530_63502C.1.pep
MWRRKHEVGIAHRQEIVSRGDEIDGDNEDVAEAATSLAIRPAMAERDRKTGPGVAEGDRRDRRGSAMDGAPDECEACDKVRAYGWTKPGRRDRAEQRHIEGGRLGEYSGGDRPVRSRVGKMAPTGVSKALKGVKPAKIEDDDWEEMQLQAAATIRLCLSDRVMYHVMEETSPKIIWKKLEAQFMSKTLTNKLYLKQKLYGLKMQEGADLTAHVNVFNQLVTDLVKMDVEVDDEDKAIVLLCSLPKSYEHVVTTLTYGKETIKTKDITSALLARDQMRKNKEGETSQAEGLLVKEDHAGHKGVRHVPGLKRNLISLGTLHEEGLIFRGNRNRKTIEIMNGKMAVMTGEKVESHLYKLRGCTVAGGVQEEAVAGIAIAFGGGGWRIFAKVEFVRIEEGKEGSAHSPAGAAGAENREIWSTHTRYGWIRGSQVEGMVETRHRQEMVVMVGCILPMALGGGSVADPPFVEGIAQALAMRI

SEQ ID NO: 164623 - protein, 342 aa, Oryza sativa
  unsure (1)..(342): unsure at all Xaa locations
  Clone ID: PAT_MRT4530_63503C.1.pep
RQIRTVLRRASILVATGQSCHGLVRWRRQEGTDLTAHVNVFNQXVTDLVKMDVEVDDEDKAIVLLCSLPESYEHVVTTLTYGKETIKTKDITSALLARDQMRKNKEGETSQAEGLLVKEDHAGHKVKKNKKKKMVQCFRCDELGHISRECPTLKGKAKANAATSSNDSDSDGCDLLTMSSAQSKDAEVWILDLASLFHVTPRKEWFSSYKSGECGFVYLGDDTSYPAVGVGEVKIKLEDGGLKRNLISLGTLHEEGLIFHGNRNRKTIEIMKGKMTVMTGEKVESHLYKLQGCTVAGGVQEEAVAGIGIVFVAAGLAQTRRAACGEAAKKTTQVWKTGGSAW

SEQ ID NO: 164624 - protein, 506 aa, Oryza sativa
  Clone ID: PAT_MRT4530_63504C.1.pep
MWIRGGREATDGRAKPASLARRGGRGGPMTMRSWTVNTRVATAVRTVYGQRVWRRRKLHEFLGRRRTGAGGPSQADTIGSQDEIVKTNTDGTEKGEYSGGDRPVRSRVGKLAPTCMKFDLVKFDGFGNFGLWQTRVKDLLAQQEVSKALKGVKPAKMEDDDCEEMQLQAAATIRRCLSDQIMYHVMEETSPKIIWEKLEAQFMSKTLTNKRYLKQKLYGLKMQEGADLTAHVNVFNQLVTDLVKMDVEVDDEDKAIVLLCSLPESYEHVMRKNKEGETSQAEGLLVKEDHAGHKVKKNKKKKMVKCFRCDEWGHIRRECPTLKGKAKANVATSSNDSDSDGCDLLTMSSAQSKDAEAWILDSASSFHVTPRKEWFSSYKSGEFGFVYLGDDTSYPAVGVGEVKIKLEDGGEHVLQGVRHVPGLKRNLISLGTLHEEGLIFRGNRNRKTIEIMKGKMTMMTGEKVESHLYKLRGCTVAGVVQEEAVAGIAIAFGGGGSGADSSGGLR

SEQ ID NO: 164625 - protein, 538 aa, Oryza sativa
  Clone ID: PAT_MRT4530_63505C.1.pep
MATRPGPLTEWPWQWMGGYKYLVLAPVAMHTAHRLATKGWGDFDPAYTFMLPTLLLRMIHNQIWISLSRYQTARRKHLIVDRSLDFEQVDRVLYLAWARAEKARFSKCVIADDAVIHPFAEHLAYFLLFSISILPPIFMGCGSVLAGVLYITYIDFMNNMGHCNFELMPKWMFQTFPPLKYLIYTPSFHSLHHTQFRTNYSLFMPFYDYIYNTMDSSSDELYERSLKGTEETPDIVHLTHMTSLKSTYHLRIGITSISSKPCNDSVWYMWMLWPVAWLSMVLAWIYGSSAFVVERLKLKKFSMQVWALPRYNFQVMDSSAAEQLNGSGELFAKKYPRLRVRLIDGSGLATAVVLNSIPFGTKQVFLCGSNSKVTRATAIALCQRGVQVILNQEKEYGMLKSRVPESRAIYLKFSNDETPQIWIGDSIDDAQGRAPKGTIFIPTSQFPLKKARKDCTYLSNPAMKIPETMQNVHTCENWLPRRVMSAWRIAGILHALEGWEMHECGDDMMTIEKTWSAAIKHGFKPLTKPCSLNSGTDL

SEQ ID NO: 164626 - protein, 356 aa, Oryza sativa
  Clone ID: PAT_MRT4530_63506C.1.pep
SLASHNKEGGVVAVQTNVGTRKHVKGLFNKETSFISESMDGMDEFPSPSRIASMEMAASSRASFLHKIKGSCEENQGAEAAQLCSQVVCSNLSLVDPLCSIVPCSISFNEGPPSQAPRPIQSKGDKELISTKEFPSKQDLEGEAGPSCTPVSNILLRRRKYSSLRPFSTIAPRPYVSKSTEPHNDVDEAVCQQGSFAAVTLNKKIRRVQASKVCVENNFEAGNLHEFSKVLKNPSYAQGVSEHQNSMKSLKRKKAQFSEAKISTRKTKNIRRTQTKSRFSWSDSRLIDTIEPREYIDNKEALFHGLDFLLTGFQSHKEKEIEPLIRKFGGYVLSRVPSCPLDKRSKLAELARCKPP

SEQ ID NO: 164627 - protein, 361 aa, Oryza sativa
  Clone ID: PAT_MRT4530_63507C.1.pep
MAPTGMKFDLVKFDGSGNFGLWQTRVKDLLAQQGASKALKGVKPAKMEDDDWEEMQLQVAATIRLCLSDQKLYGLKMQEGVDLTAHVNVFNQLVTDLVKMDVEVDDEDKAIVLLCSLPESYEHVMRKNKEGETSQAEGLLVKEDHAGHKVKKNKKKKVVQCFRCDEWGHISKKCPILKGKAKANAATSSNDSDSDGCDLLKMSSAQSKDAEAWILDSASSFHVTPRKEWFFSYKSSEFGFVYLGDDTSYPAVGVGEVKIKLEDGGEHVLQGVRHVPGLKRNLISLGTLHEEGLIFRGNRNKKTMEIMKGKTTVMTGEKVESQLYKLRGCTIAGGVQEEAVAGIAIAFGGGGSGADSSGGLR

SEQ ID NO: 164628 - protein, 172 aa, Oryza sativa
  Clone ID: PAT_MRT4530_63508C.1.pep
MASSTAIALALLGIVLLLPGNAFVVVAYPRGGGGGDYRMQFLGQQNAARAAMGLPALVWDERVAGYARWYAESRRGDCALVHSSGPYGENLFWGSGTGWSPAQAVGAWLAEQPRYNYWSNSCYGGMCGHYTQIMWRATRRVGCAMVACYNGRGTFITCNYDPPGNYVGMRPY

SEQ ID NO: 164629 - protein, 91 aa, Oryza sativa
  Clone ID: PAT_MRT4530_63509C.1.pep
MDRFAALVSGRRAASAAAAAAAEVEVEEERDEAGLRIRLGESDSVRERRPQTTPFSPAPHGVGAEERRGWGVIRGVIGCGCGALWYGFGAG

SEQ ID NO: 164630 - protein, 96 aa, Oryza sativa
  Clone ID: PAT_MRT4530_6350C.1.pep
KNPFYIIFLFPAGQHLIQNGVPHLPQLKASYFCKIFPFPPPFFLAPVASLGSLVVPPISPFFFGGDAKIFQLLVIGSQYPRGLVPLIKKKFGLLLA

SEQ ID NO: 164631 - protein, 469 aa, Oryza sativa
  Clone ID: PAT_MRT4530_63510C.1.pep
MAENDRKTGPGVAEGDWRDLRGSAMDGAPDARAEERAEPKQQSGSDFWAARQDIGQTWYKGLNRLAVQRLVTKCARMGRPSQADEIMRSRGTSRVEDWSHRIIANTTRVKDLLAQQGGSKALKGVKPAKMEDDDWEEMQLQAAATIRLCLSDQKLYGLKMQEGADLTAHVNVFNQLVTDLVKMDVEVDDEDKAIVLLCSLPKSYEHVVTTLTYGKETIKTKDITSALLARDQMRKNKEGETSQAEGLLVKEDHAGHKVKKNKKKKMVQCFRCDEWGHISRECPTLKGKAKANTVTSSNDSDSDGCDFLTMSSAQSKDAEAWILDSASLFHMTPRKEWFSSYKSGEFGFVYLGDDTSYPAMGVGEVKIKLEDGGEHVLQGVRHVPGLKRNLISLGTLHEEGLIFRGNRNRKTIEIMNGKMAVMTGEKVESHLYKLRGCTVAGGVQEEAVAGIAIAFGGGGSGADSSGGLQ

SEQ ID NO: 164632 - protein, 227 aa, Oryza sativa
  Clone ID: PAT_MRT4530_63511C.1.pep
MEATGTRLTRSASLSPRLRRSPTALCVSPRSMHHHHQQQQQSLRRATSDADIARSAPATASSPLPLLLRDILEEDVVVVVDGAGRGKGNDDDDKTSGRGGGGGGHMDMGEYYRRVLRVEPENPLVLRNYGRYLQEVEGDLGGAEECYARALLASPDDGDLLSLYGQLLWETSQDKDRAAAYLERAVQAAPDDCYVLGSYASFLWDAEEDEDDEAEDEMKPPLVPASC

SEQ ID NO: 164633 - protein, 345 aa, Oryza sativa
  Clone ID: PAT_MRT4530_63512C.1.pep
MTESMSCLEGRGSPRKKKAAVKKCSVRFTSSQSPLKPIDLSWVPDWMDCSSACRVCIRVGPYVEFTKNGDPNIMEMRRLPLFVDVSDDAQNRTEPCVEQGNTEPQDVCTDIVLFTQQSQVGQSSMPSTKPKKCSTYKPVDAWGENDEVEYVGVDDEKDKYKDLVSDDEEHDLDYEPGSDEDVDDLAADDEQGCESVVHITDLDNPKIAVDVTFEDGETFKRCIRQYAVLKEVELAIPYSESTRYRAYCKAKRCKWRIHASRLQDKLCLKLTCSSFGHFTNRLFGLAGVLDVFASNCVPHNGHLPTCNSPVTGLRIDDEPVYKDWSISPATSICRRSPPHFSARIC

SEQ ID NO: 164634 - protein, 87 aa, Oryza sativa
  Clone ID: PAT_MRT4530_63513C.1.pep
QHDHLLPSSMVFFLLCDDFSSCWPGPVSRRGGRPAMARRPHCREPLMPWTTADAEEVPRAQLAVVRRGPPKSRRAGRSNGGKPGPTG

SEQ ID NO: 164635 - protein, 69 aa, Oryza sativa
  Clone ID: PAT_MRT4530_63514C.1.pep
PAGVCSSPAPAGCPSGPTHWRFPHRPPACQRVLGEPHSWLPPLARFVTTWSLWWSAMVSFPARTKNIIL

SEQ ID NO: 164636 - protein, 433 aa, Oryza sativa
  Clone ID: PAT_MRT4530_63515C.1.pep
MSAREGEPLAWLVLPADFEEYLNLQSATFAQLYRCLPISLLKKENADDGNRVFMPVSALDRLGYLHIEYPMQFQIQNATTLQTSYCGVLEFTADEGFIHIPTMMMEHLGLRENDLVLLRSTSIPKATFIKLQPHTSDFHKLSEPRYLLEYNFRNYFCLTTGETIAVAAGDRFYYLDVVETRPADAVCVIETDCEVEFDQALDQAEPAAAAAMQVDGVGAGEPEPARFTGFRMRMDGKPVEEEKKTMPPPATAAAPPKRGLRFGSSAPAAGGGVKEAKSGEKDDGNRFTGKNPLHPLDIDHTPPSPSDGGAARAAAAVAAPLPPSDGGGGALPLATAPLPEQWRRWRCLSPRVVAVSASSPASGDGGSPTTGSAAASSLTTGSAAASFPTTGSAAASSPTTGGSGGALPHHQQAATVAAPNPIPSNGDGLDGQE

SEQ ID NO: 164637 - protein, 77 aa, Oryza sativa
  Clone ID: PAT_MRT4530_63516C.1.pep
NLDGDVYIEQAEGAHLWLLKCMSTELVKPHANATQCTKTLGNCDGLMKTFVSGNKLQTTVPCMSHEPAKSDGGCGPA

SEQ ID NO: 164638 - protein, 392 aa, Oryza sativa
  Clone ID: PAT_MRT4530_63517C.1.pep
MAPRQRLSFRRLVLLLVASTALACSVLAGGAVASVVETLGVRRHFGSPKRNTTGQHGAGRRRGGGSARSGLASCNMFQGSWVYDDSLPMYDTAGCPFVEAEFDCQKYGRPDKLYLKYRWRPSSCELPRFNGLDFLSKWRGKKILFVGDSISLNQWESLACMLHAAAPSSRTTYSRGTPFSTVTFQDYGVSVAYYRSTYLVDIVDESIGRVLKLDSISGDAWLGADMLIFNTWHWWTHTGRDQPWDFVQDGGQVMKDMDRLSAFSKGMSTWARWVDSNVDTSKTRVYFQGISPTHYNGADWGEGSRSCAQQTQPVAGSAYPAGPVPAQSAVRSAIAGMSKPVFLLDITLLSQLRRDGHPSGYSGGHPGNDCSHWCLAGVPDAWNQILYASLLA

SEQ ID NO: 164639 - protein, 876 aa, Oryza sativa
  unsure (1)..(876): unsure at all Xaa locations
  Clone ID: PAT_MRT4530_63518C.1.pep
MSSSASPSAAPSAEYAEHLSNLVAIPSLSHENYYFLGPVGNPDPTEFIIGETNRIPFRLANPDLGHWKNXPEKSWITWFKRISASKRVHWDEIGIGQALDLTIANSAKDEPLMASASYFWSNTINAFLFNQVPMTPTLIDITMITGLDVTSSANPMSPNTKNQYDFRTKSIGGWSSYVAAYMGXGSVTPREHVAFLLMWLEKFLFCESSCGPTTNWQFVAEALESKRQFPLGKILLGYLYQMLNNASAKIAVGSVVGAGGPWWLLQSWLNLMVMKFVNRPSVTEAEFPRLEPIVEDDGEERTHCRCTSYGEYASTPADAGAKLSAELLKDWFCSFYDGFQKDTQIWFPYEDSTLLENPSDFRFEDINHERYQKSREVFSAAISPCIIPVGIHQGRNIHVSYEFYHPMSSARQLAMGQLPIGLFFADKIQCRGEISSTLMDRLLNLQGPSLGSIENIELARFRSRSFDRWWGEWKLHLFHQPASMYMTDLFPDVIPQTTESSPPHQSNSGRDIEYAPGLIPNGGGPSPPVIGYNAPKTSTLLQGLIREPADASKKRRTRSSVVDTSSPAPKKKAKLKKPNPADDLPALDPSVEQALEEEEIGEDVDQAANEKKRIAVKKKSTAPSLKPAPLQPPPPSSPVQQSSSDKTPSAVGSHHIQEEVQPAAPAIPALADLFSFDIKDYFDETEEETTSKALAPLDDTVKKTLEDISLQLESXLDNLVADCGSIRARFAEIQASILDDLVNTITPAVYLEQHQFKLEKAKQRIADRRERKNIEATIQANQQLVHEEKAKLDQLYVGPIQSNIDRLEARKIDLTAQLEECNAELDLEKQKLSDLPNAIEEQKSRLRSAIKNVADMTKSLKVIPGTDAQDAQAIKE

SEQ ID NO: 164640 - protein, 80 aa, Oryza sativa
  unsure (1)..(80): unsure at all Xaa locations
  Clone ID: PAT_MRT4530_63519C.1.pep
PRGRGRRAAARAAAAVPLVLPLPRASAAEPPPSXAADRRPRFHCAPMPXAIAAPPVLPQQLPTKKERIYNVHPAARTHVL

SEQ ID NO: 164641 - protein, 262 aa, Oryza sativa
  Clone ID: PAT_MRT4530_6351C.1.pep
MGKSVKKSVKKPKTKKASSGLGPSIFSEKRLRKLLKKGAIADAKLVIRPVDESGPSPHPGYTLVFEDFFEAGFRFPCSSFVVEVLGLYGIEFPQLTPNAVVRLGVFEWIIRSCGGTPHGSDFAYFHTIRRYTKQNTQFGCVSFTPRSNRGCPWPLVSTMRTKWGSKWQSKWIYHKIPADLKAMEKCPFVFSCKDPEVISEPAVNLSKNFSSIRSRIEELVSKFSVRDLVEEFICLGIRPLSSGWTLTLGEVPQDSTSELPPF

SEQ ID NO: 164642 - protein, 118 aa, Oryza sativa
  unsure (1)..(118): unsure at all Xaa locations
  Clone ID: PAT_MRT4530_63520C.1.pep
MKPRPFKEEFTLEERAKESAAMIASYPDRIPVIVEKFSRSNLPEMEKRKYLVPCNMPVGQFIFILRSRLHLSPGTALFVFVNNTLPQTAQLMGSVYESYKDEGDGFLYXCYSSEKTFG

SEQ ID NO: 164643 - protein, 59 aa, Oryza sativa
  Clone ID: PAT_MRT4530_63521C.1.pep
LKQTKPVSNETKTHSLQAMLQLTFCMHRDRLIGLCRKPNCWLLHDLSQDDIDARNQIHP

SEQ ID NO: 164644 - protein, 1094 aa, Oryza sativa
  Clone ID: PAT_MRT4530_63522C.1.pep
MDEDIFCGGRWTESQRHSILGWVDRILPFRSCPHVSERSPRSMAIRRRGFCMGRTANLDTLMEPLDEPPLLVIEETEFPLPQPSMALSLPMALAHVADKTMRQGLIPMPGDSECQRGGVIATSLSKKLQREEEAPAEGINEAFTVPWCRMGCGPTKERMSSFNLVASCASSSFLVCSGKDVAAMKKAREGFVARAARAELLLPHPTPTQPNHPPVPARPPAVTIHQAPRRLALSSPRHVLASGAATNKRDPDGSYRPKRKQDAGMRLSKIRIVGVLASHDELTGDTINRFGPRLHVTGARRRRALLLLALLPDPAGTACAAKPPPPAMGAMGAAAFDFEYKRDAYGFAVRPQHLQRFREYAKIYKEEEEERADRWKDFLDRLAESADDITTSISPSKEDSAAGDVNGGEHLDGAENLENSNRGGIKCNNEEEEGEEDAEKSDTPENSKEIDGNNQSQEANGEADDINDVSANSENLKQESIANSVESDKAPEELKEVSGCSEELLNDENGDSEGLKDSHGALEGLGEANNDNSEKLEELFLDKGLLDELKPIRVESGKRVRASIRIIEKMMSSRVGKIRNTANDMCGNGEAQLASIEEEERAADKSCRGDPAEESSNPDKVEQAQDREQGDSASAALEGGNGESYFPWREELESLVRGGVPMALRGEMWQAFVGVGARKITGYYNKLLDEGTEELDEKNPEDQELKDQTNAQKKPPEKWKGQIEKDLPRTFPGHPALDEDGRNALRRLLTAYARHNPSVGYCQAMNFFAGLFLLFMPEEHAFWALVGVIDEYFDGYYTEEMIESQVDQLVLEEVVRERFPKLGPALVTTKDAGDAITLLQSLAGSTFDSSQLVLTACMGFQAVREIGLQELRKKHRPDIISAMEERSKDRHSWKDKKGLATKLYSFKHDPLCPQVNSKEGEDDLQVNGEMQFLDSGSANLETYLTSSALDNELEEGIDLQDQVEKLEAEVSELRKSFADKQEQEQAMLQVLIRMEQEQKVAEDARIAAERDAADKKYAAQLLQEKYDAAMAALRQMEKRAVMAETMLEATKQYQAGQFKANQSFNPRESLVPLKHLKAKLLSNQDMIVAKDWIT

SEQ ID NO: 164645 - protein, 76 aa, Oryza sativa
  Clone ID: PAT_MRT4530_63523C.1.pep
MAAKAISSPVPVDWYPTLAVVMVAVGLMFTASFFIYEATSSRRNRSLAKEIATATIASVFLGFGSLFVLLASGVYV

SEQ ID NO: 164646 - protein, 273 aa, Oryza sativa
  Clone ID: PAT_MRT4530_63524C.1.pep
FGPDSRVDHASGACKITGYYNKLLDEGTEELDEKNPEDQELKDQTNAQKKPPEKWKGQIEKDLPRTFPGHPALDEDGRNALRRLLTAYARHNPSVGYCQAMNFFAGLFLLFMPEEHAFWALVGVIDEYFDGYYTEEMIESQVDQLVLEEVVRERCPKLAKHMDFLGVQVAWVTGPWFLSIFINMLPWESVLRVWDVILFEGNRTMLFRTTLALLDLYGPALVTTKDAGDAITLLQSLAGSTFDSSQLVLTACMGGDPLESTCRHELRKKHRPD

SEQ ID NO: 164647 - protein, 109 aa, Oryza sativa
  Clone ID: PAT_MRT4530_63525C.1.pep
MAEECQFLYLAPNEGWSGANLDTLMEPLDEPPLLVIEETEFPLPQPSMALSLPMALAHVADKTMRQGLIPMPGDSECQRGGVIATSLSKKLQREEEAPAEGINEAFTVP

SEQ ID NO: 164648 - protein, 152 aa, Oryza sativa
  unsure (1)..(152): unsure at all Xaa locations
  Clone ID: PAT_MRT4530_63526C.1.pep
TPEKTYPKNGPFWGARVAGAVVQLDGASLSGAVPLPTWRGDAEELTRTNHIKNKLKRTKYVACEIFQSSTEKLLSSKTQSCKRNLEVLISPNPAKXGRIGCNFFCRCPWIYYLPDSESGGATIXGALLLPRRFACTTVARGRRKRGWPRPVG

SEQ ID NO: 164649 - protein, 121 aa, Oryza sativa
  Clone ID: PAT_MRT4530_63527C.1.pep
VAVDLRQDCLDVRGKREMLNIGCTKCELSWRNFLSRTITFTQLTGNRIVDGSKDCFDLVLTIGANGIPRTDHKTGEVGQAVIGVHLFIIEVQLAPHSETRGTCFLEIPRTVRSPPSPINLL

SEQ ID NO: 164650 - protein, 292 aa, Oryza sativa
  unsure (1)..(292): unsure at all Xaa locations
  Clone ID: PAT_MRT4530_63528C.1.pep
MQLIIYIKELHTKLSLQVQHLELKNIMLLSKWLYKLLTXDGMWXQMLHNKYSRXITLAKAYWKAGDSHFCKNHVWKPKKIMFGSFHIRDGSQIRFWEGKWLGNPSFGYQYPGLYNIFRHKQSIIPHIFQTNPQKFSWRQDLIGAQSAAXHNLLPRRADLVSIQEQDKIHWNLXSNRVSSIKSHYLVLVHTGILNINRRIWKIKVLLKAKIFLWYLRQDVILTKDNLAKRKRKVSKKCCFCHKDETIQHLFFQCHLSRSTANPNRAQTHRLKLQTPYSLTWRKSQSHDGADAA

SEQ ID NO: 164651 - protein, 63 aa, Oryza sativa
  Clone ID: PAT_MRT4530_63529C.1.pep
MARHRGGHHCRSHRGSVACHRTPPPLPPFLSDLAEGRSVSMSKAQVPLSSCYCCGCTDANKRM

SEQ ID NO: 164652 - protein, 130 aa, Oryza sativa
  Clone ID: PAT_MRT4530_6352C.1.pep
MAAAAVYGAGGAMKGGKLGMEEARELQLNRIRITLSSKNVKNLEKVCADLVKGAKDKQLRVKGPVRIPTKVLHITTRKSPCGEGTNTWDRFEFRIHKRVIDLISSPDVVKQITSITIEPGVEVEVTIADV

SEQ ID NO: 164653 - protein, 175 aa, Oryza sativa
  Clone ID: PAT_MRT4530_63530C.1.pep
LVVGPAIVHACTYSLSATLRKTYPKNGPFWGARVAGAVVQQDGVSLFGAVPLLTWRGDAEELIGTNHVKNKLKRTKYVACGIFQSSTEKLLSSKTQSCKRNLGDLISPNPAKRGRIGCNFFCRCPCIYYLPDFESRNRNGGGGASHAGALLLPRRFACATVAGGRRQRGWRRPVG

SEQ ID NO: 164654 - protein, 116 aa, Oryza sativa
  Clone ID: PAT_MRT4530_63531C.1.pep
MCTYVKAHTRRDDRTEASVPPPPPALAQTYALTGHLLEVERAHTEIGLIGDQQRSRTIFDWGTGDNDGFKLSAPYPAGSASSGRIVEDEEGSSGNPWTALLPRPVELVAPAQNQED

SEQ ID NO: 164655 - protein, 505 aa, Oryza sativa
  unsure (1)..(505): unsure at all Xaa locations
  Clone ID: PAT_MRT4530_63532C.1.pep
WKLIAVGCTRAVESVAKTCWAAYTVWVYHGETYPAXRESDICQSIEDEDRVAEIDRMDEMIDDVHDAYVSVEEEDPEPTAQAFFQMLSAATQPLHEHTQVSQLDAITRLLAVKSQYAISIAGFDALLNVICALLPQRHKLPANLYEAKKVLSALNMPYEKIDACPKNCMLFRKENAQKTHCDKCGESMYVEVEDRNGHKKQLTVVRKAKQMTWHKNGHRYHPDKIVHPVDDQTKDNIKARLDQAALCNRPELNLIQKHASSQWVKPRADFCLNRAQKKEVLEWFQTLKFLDGYGSNLRRGVNLKTMRINGLKSHDYHVMMERIFPVKFRGYLPTHVWEVLAEPIGRLQVPNDQDYNYVPNSNVVHYFQEDGLSGSFVIDLGQELNNDPEQVAISRDTEDICNDKDLKLLNGSSIQDEDDDDEDDESYCTSSSAEDDEPSGVGSLPPHAAAAASLPVGSGGGEVAAATKGMFLLCTISHRSVSMSKAQVPLSSCYCCGCTDANKRM

SEQ ID NO: 164656 - protein, 158 aa, Oryza sativa
  unsure (1)..(158): unsure at all Xaa locations
  Clone ID: PAT_MRT4530_63533C.1.pep
TPRKTYPKNGPFWGARVAGAVVQQDGASLFGAVPLPTWRGDAEELTGTNHVKNKLKRTKYVACGIFQSSTEKLLSSKTQSCKRNLEVLISPNPAKLGRIGCNFFCRCPCIYYLPDSESRNRNGGGGASXMAGALLLPRRFACATVAGGRRQRWRRPIR

SEQ ID NO: 164657 - protein, 912 aa, Oryza sativa
  Clone ID: PAT_MRT4530_63534C.1.pep
MMMKHLCKFGFRPAYTVWVYHGETYPARESDICQSTEDEDRVAEIDRMDEMIDDVHDDYVSVEEEDPEPTAQAFFQMLSAATQPLHEHTQVSQLDAITRLLAVKSQYAISIAGFDALLNVICALLPQGHKLPANLYEAKKVLSALNMPYEKIDACPKNCMLFRKENTQKTHCDNCGESRYVEVEDSNGHKKQLTVAKKVLRYLPFIPRIQRLYMSESQAKQMTWHKNGHRYHTDKIVHPADGEAWKKFDRDFTGFSMEARNVRIAIATDGFCPFGMGSSSYTCWPMFVIPLNLPPGVCMRQHIMFLTLIIPGPNYPSKHISVFMESLVDELIHAWQQVSNEPPLRLSGQEIRARLDNLVPAANGDKFNVAEAIFNTCFDIPDQTKDNVKARLDQAALCNRPELNLVQKHASSQWVKPRADFCLNRAQKKEVLEWFQILKFPDGYGSNLRRGVNLKTMRINGLKSHDYHIMMERIFPVMFRGYLPTHVWEVLAEVSFFYRKLCAKQFDPIEMANMQSQVIVLVCKLEKIFPLGFFNPMQHLMIHLPYEASMGGPVQFRWNYPIERGQKYLKSKVRNRARVEASIAEAYILDEISNFTSIYFANQVQTIHNPVPRYNVATQSIDCSLNLFFIRGDSTSRGVPRHLTREEWNAAMLYVLTNLTEVDDYIGKFIDEEWTRRGIPTRQQQENILRNGAGRDRPNFVSWFYQQGENSDTTEYYGYIKEIVEISFDGRKPLTLVLFNCHWFDPSKVRYTPRYGLVEVAHASILPKFEPFVLSHQATQVYYMPYPCKFVQDLTNWWVVYKVQPIGRLQVPNDQDYNSVPNSNVVHYFQEDGLFGSFVIDLGQELNNDPEQVAISRDTEDICNDKDLKLLNGSSIQDEDDDDEDDESYCTSSSAEDDEVPTSRDILFDEYF

SEQ ID NO: 164658 - protein, 1097 aa, Oryza sativa
  Clone ID: PAT_MRT4530_63535C.1.pep
METDRSWMYKGRRKCGEVTAEWISKTTEFLDKAFNRETGRAGVLCPCNYCNNTRPQTRDMMMKHLCKFGFRPAYTVWVYHGDTYPARESDICQSTEDEDRVAEIDRMDEMIDDVHDAYVSVEEEDPEPTAQAFFQMLSAATQPLHEHTQVSQLDAITRLLAVKSQYAISIAGFDALLNVICALLPQGHKLPANLYEAKKVLSALNMPYEKIDACLKNCMLFRKENAQKMHCDKCGESRYVEVEDSNGHKKQLTVARKVLRYLPFIPRIQRLYMSESQAKQMTWHKNGHRYHPDKIVHPADGEAWKKFDRDFTGFSMEARNVRIAIATDGFCPFGMGFSSYTCWPMFVIPLNLPPGVCMRQHNMFLTLIIPGPNYPGKHISVFMEPLVDELIHAWQQGVLTYDRATKTNFIMRVSFLYSIHDLPAYGIFSGWCVHGKMPCPTCMEALQGKRLKFGGKYSFFDCHRQFLPIDHSFRSDSNSFLSNTTVSNEPPLRLSGQEIRARLDNLVPAANGDKFVGYGKDHHWTHISSLWRLPYFHKLVLPHNIDVMHNEKNVAEAIFNTCFDIPDQTKDNIKARLDQAALCNRPELNLIQKHASSQWVKPRADFCLNRAQKKEVLEWFQTLKFPDGYGSNLRRGVNLKTMRINGLKSHDYHIMMERIFPVMFRGYLPTHVWEVLAEVSFFYRKLCAKQFDPIEMANMQSQVIVLVCKLEKIFPPGFFNPMQHLMIHLPYEASMGGPVQFRWNYPVERGQKYLKSKGDSTSRGVPRHLTREEWNAAMLYVLTNLTEVDDYIGKFIDEEWTRRGVPTRQQQENILRNGAGRDRPNFVSWFYQQSMLDETMSDDLRQVAKGCHTRVLLYNMYDVNGYRFRIHKYEHERPNATTINSGLVTIGQGENSDTTEYYGYIKEIVEISFDGRKPLTLVLFNCHWFDPSKVRYTPRYGLVEVAHASILPKFEPFVLSHQATQVYYMPYPCKSVQDLTNWWVVYKVQPIGRLQVPNDQDYNFVPNSNVVHYFQEDGLSGSFVIDLGQELNNDPEQVAISRDTEDICNDKDLKLLNGSSIQDEDDDDEDDESYCTSSSAEDDEVPTSRDILFDEYF

SEQ ID NO: 164659 - protein, 46 aa, Oryza sativa
  Clone ID: PAT_MRT4530_63536C.1.pep
YKGPGDDHGQWREACPFNKREARGAKSCHQSLSSSGLGRFRRMPCV

SEQ ID NO: 164660 - protein, 1339 aa, Oryza sativa
  Clone ID: PAT_MRT4530_63537C.1.pep
MASKENRSEAMVSGADGINQGENLDPIGEGLDDHHGNLDQGLSSAMVLFKKKLTDGEEEDDDVLDVDLGEEVEEMKSKWLIIARFYSGQRERLGSLGDNRFLVEFACEADYNRVVYGGPWKHKGDALLVVPYDGLARPSEICIESLPLWLRIYDLPEIMMTTGFARSLGGKIGEVLEVGGAIHDFLRVKVAFPLSSPLKPLLRIWIKDKGVMSFPVKYENVPFFCFSCGRIGHAERECPEVGSSSAQVRFGKELRASPLKRKLQSFAPSSISTPKAAKVLNFSGAQREKVLTASSSSKASVLSNPKLNSGGATMFLVGEKADQEEKAASVEAEASLYPLPKGITAALEEGVSQMKMQLDDGELNLAARGPCSRERVSMSSDYGLSGEETPQHSAGIVSGVVNQDVKSPGGQSKKKQWVPTRETDRAVKAKSLSIGRDIGKPRKITVRLSADAVEARNCMQIREQLPWWALTASPTRNNECSSLELVRLVRMYSPRLVFLSATRQDQERVQGLRWRLGLKNCLALKGEGSGGGVALIWDETLSVHLLSMSCRSDHCPILLRVEREKYRPVKCFRYEIMWEREDSLGEAIKLAWEQEGTALNLGEWSVRVFGSVSQEIKEIKAKVEELSSLDPINHDGEIRKLYARLDELLYREEMMWLQRSRVSWLKEGDRNTKFFHRQAAWRAKKNKINCLKDEDSRYVENKGDMEKLTRDFFQKLYARDEGVDPGELVDLFDVRVDATEGLSTILNHEVVAGRLEELKVCRRAPGVSHLLFADDSLLFVKACPQQVESATFESNYLGLPTLEGRMTADKFKTIKERLIKRLNSWAEKFMSSGAKDILIKFVAQAIPTYVMGVFKLSVSSCEAYTKLVRDFWWGDEEDKRKVHWTAWDNLVLPKCMGGLGFRDVRIFNQALLGRQAWRLIQFPESLCARILKAKYFPNCDLIDAVFPADTSQTWKGIEHGPQLLKEGLIWRIADGKRVKFWKDRWIPRESSFRVSGMKSRCRLRWASQFIIPEGNCWDEQLIRRVCHPFDADEMLKIKLPQFPTDDFLAWHFEKYGMYTVRSGYRAALMKQINTDCVSFSSANSDWLLILLDRLSPEERAKLLLVLWSSWFLRNDSLFGSGSSTVHGSVLFLQSLWESISTTKVNPVTDIKGKGPQMGTKSATTVARSSPSDLVRWEAPPQGWAKINVDGAFVQQIGEAGTGIVIRDHVGDVLLTSWNGIRSCQSPEEAEAQACRDGLRLAADWIQMPVILESDCANVVASLTSGAKNRSPLWQVFQEIKSILPLLPAFKFNRINRGANEVAHCLSQLARRLKQSSVWRICAPECVKESLAKDCIPPNL

SEQ ID NO: 164661 - protein, 167 aa, Oryza sativa
  Clone ID: PAT_MRT4530_63538C.1.pep
MALGKANPTASTAQLGAAASGGQGSGRQRRWVRGTRAMECTGELGKRTEKREGGAGIVYIGTEWSDVAGNGPISPGMWGRWTERERERPASNLGQLGHERGRRSGAAVAGECGARAGCGRRAREARERREAAVVGAGSAGRRRETGPTGFIGPVFEDVHRDRIYAHA

SEQ ID NO: 164662 - protein, 161 aa, Oryza sativa
  unsure (1)..(161): unsure at all Xaa locations
  Clone ID: PAT_MRT4530_63539C.1.pep
LSFNAILLGPELYKHIKIAADDVETKQIVFQDTQDKMPSNIISVVQCGGSIHLLWSQEAKFSIKPNITRQPNTDYKTTQLHFGDLGXMRYRNPIIILNLIKVIEKKPRSTLSSVQFIKAIDHINKGLSKDNQLMFIHLDITNLEYIKYLDFEDFGYYISID

SEQ ID NO: 164663 - protein, 122 aa, Oryza sativa
  Clone ID: PAT_MRT4530_6353C.1.pep
MHGTAGYGQDGAQVARQRPREVPRSSNDPPPVTAAQDGAKVCGPALHAMVEVRLQDAMAIGENFGQIDEGVSIYDTPMVEAQSVAGCGHAASGVARTAAVEPRRADDRDGGAKSGGRQRVDG

SEQ ID NO: 164664 - protein, 641 aa, Oryza sativa
  Clone ID: PAT_MRT4530_63540C.1.pep
MRYCRRRQPPRRAPARSPLTATMIKRRHTRMLSLLSRVPNEEYSYHHSPPPGGGLSRHHQHGDELIGDGGGVDELSGDGGRQKNQIIFEWIYTRKSPDPNPSEPMNFFSSVLSAAGVGGDEHEEERGEGEEAAAEQGEEGEAESGGGWSFGGLIKTLAEEIDVRPRDEQEAEEGGEEVAEGKGEVEEEADAGGGWIFGGLIKTLAEEIEEQRKVNSQLEAEEEAAAAAAAAAAAAAEEEGGETAGSGDGGEWSFGGLIQTFATRSESVLEGYRRDIQDLGSGLRLETATLRAAAARAAAAFPGALEAGASAASNRLESVGQAVDDLGAAAAVLLSHANEALRSVDADGEDGAGDGSSHPSDSASASGASWRASLPSKKYTRFEAQVLALRADPATFTEEPEDADGFAKWRDAFRIDERKEEIEGVLKESPGLESFVERLVPSVVDYDMFWCRYFFAVDKLRQAEDVRTKLVTRAMSKEDEEELSWDVDDDDEDDDNGDHKEGANTVVNKKEEQIEEPVSHKTEDDKQGADTPDVSEDKKTTLAAEKDGNGESKDEVAAPKSSNDMGREEKIDSSKESEFSAASPPSAQEEDLSWEEIEDVGDEDEKKKPIPRSSPPSKAEDIRKRFSSVEDDEELSWDIDE

SEQ ID NO: 164665 - protein, 186 aa, Oryza sativa
  unsure (1)..(186): unsure at all Xaa locations
  Clone ID: PAT_MRT4530_63541C.1.pep
FFFFFFPPQPQHTVSTPGPIIHQPSFTTLHHRSGQHGAHTPTHXXHSIHPPNFSHSTSRGVGSCMHTHRSQVFISSSHQHHTANHRSSSRASGCAQWHITPVGTQHXTQCISSLWVFGPLVVHVHPGVCIAPRYALSHPHSLCRTXTGXAHTSFCAXHTRYQSEFTRQATIPRPCGGSATAMRSAP

SEQ ID NO: 164666 - protein, 242 aa, Oryza sativa
  Clone ID: PAT_MRT4530_63542C.1.pep
MALEGAAGGGGVGGGGGPPGQEAGKKVGWSKEEDKLLRELVRKQGGKDWGVIATAFPGRTDKSCRLRWRQHLDPSVDVALPFSAGEDRKIVELHRVHGNRWATIAAFLPGRSDNAIKNRWNTHLRKRHAQDVQQRPSGGLALGLGGGGGAGQAAGGKLTPVCLQLFPPTQAPPIGENLPGPARSAVPELLKLFPLAPGDLKDNASAAAAMDVGNEAVRALPELRLSPAAVVFDAMPLQAIRM

SEQ ID NO: 164667 - protein, 297 aa, Oryza sativa
  Clone ID: PAT_MRT4530_63543C.1.pep
MQPMSTKICLGIGAKREIFQDLAPLLWHSYGTIAALLQEIVSIYPSLSPPTLSPGASNRVCNALALLQCVASHSDTRIPFLNVSFAHRNVHLYVALCFQLAIVDDSEVIGFLLQTEIIPLCLRTMEMGSELSKTVATFIVQKILLDDVGLRYICATAERFFAVASVLSQMLCRAAAAEVGFGVARRVSDLPAAAAAAAAAHCLITGVAVTCQWTALGRRRRQATALAGGITGGEGGWVGYLGWVADPAPSPRMRQLLLHGRDPRGEASSGCSIPARITVLACSSNVERTLFLETYLL

SEQ ID NO: 164668 - protein, 480 aa, Oryza sativa
  Clone ID: PAT_MRT4530_63544C.1.pep
MAVALEAGRRKRAAVVVLGDIGRSPRMQYHSLSLANQAGMEVDIVANGGSDPHLLLRENPSIHIHEMKSVQLTGILKISGALTLLLKAAIQFIILIWYLCFKIPRPDVFIVQNPPSVPTLAAVKLASWLRGAKFIVDWHNFGYTLLGLSHGRSHIIVKIYFWFEKHFGRMADGAFCVTKAMKHELDQKWGINHSKYLIAVRKFHFDIVSTVCSYNTEKEVEDRNTTVFTSWVDGEIFLKPNRPALVVSSTSWTPDEDFSILLEAALMYDRRVAATLGEDDSMDEGKLWIDIKNGKQFVYPRLLFIITGKGPDRMKYEEQIKRLKLRRVAFRTMWLASEDYPLLLGSADLGVSLHTSSSGLDLPMKVVDMFGCGLPVCAASFSCIDELVKINNNGLLFSTSSELADELMMLFKGFPEECDDLKSLKVGALNTGSSSKWSTEWERYALPLVNQSPEYALPISFVRKFAVAGHRLKCMITYDR

SEQ ID NO: 164669 - protein, 123 aa, Oryza sativa
  Clone ID: PAT_MRT4530_63545C.1.pep
GENGSFFLSIQGQNLHTYLEAQQNLQKSLGGGFFKGLGLTWGPDHKLFQTSIGLDIYGRFLSGQISKVKHNIHQISLFWTEYPSFEIDPKWPLTYTWFSKHGGEFFKKTKPKGEHFFDHATRG

SEQ ID NO: 164670 - protein, 66 aa, Oryza sativa
  Clone ID: PAT_MRT4530_63546C.1.pep
MPRPTCRLRAQTRWQAVKEEKERAEFAWSRQRPEFPPRCWGSSDGGLEKKASENDVVFDRACSQEM

SEQ ID NO: 164671 - protein, 162 aa, Oryza sativa
  Clone ID: PAT_MRT4530_63547C.1.pep
MDQEVIMATPPLTPPPRARSCRDRWRHHLARDVYHRPFTAREDDELLRLHYRLGDRWKEIGRAVYGRTSRVMKHRWRELRRGGFPAAATRKEQAPAMDADDMVESEMEESDQSLPPLTKKAELQLVYRSFIGEISLNLRLGKFDITAKPLAYPTPYRFDGAV

SEQ ID NO: 164672 - protein, 135 aa, Oryza sativa
  Clone ID: PAT_MRT4530_63548C.1.pep
MVLGRMQVSSDVRKVMGTTPQDDQWAILGGTGEFVAAEGIVEHKIVQVDCTGRIYEIKIHAFYIPMNSSAMSEDAIGDVLYMLEDVVGDEATTLVVVVVVDDVIDAVVGDAVVAVVKDTKTIGDVVSEKTIVVMM

SEQ ID NO: 164673 - protein, 1347 aa, Oryza sativa
  Clone ID: PAT_MRT4530_63549C.1.pep
MSIAEGEVVNLNQKVVDLSTNLDRILGSLKGVEAWIPSVDAGMQGLRRSVEGIKARVIKLEAQSSTATPPPNGHRVDNKYQGEATAAESAQERTLVKSKIQIPQSAVNFEVGESSEWGIGNSQFGTQGPRLPKTEFPKFDGDNPKLWKKKSEKYFDMYQVPYATWASFATLHFVGNAALWLQTYEELHAVESWSGVCVAVNGKFGRDRYQQFLEKLDNLKQEGTIEEYYSRFEELMHKVLVYNRGYDETFFVTKFLGGLKTEIKAAIKLHRPGTVDAALSLAKTQEELLMEVNLKAYHKTTIKESFKNNFKVPSLAKGILGPPPDEIKKTEERPKWEEQYDSLNAARRARGECFKCGEKFGPGHKCPKAVQLHVLDELLEVFQFSDEPGQVEESSSDEELLLSENALFGTEGKRTIWLQGLIQQVLILIDSGSSSSFMASHLVDRLHLVPNSIPSALVMIIDGGKLFCDEMAEQVEWWCQGNTFSSNFKILGLGGYDLILGMDWLEAHSPMWIHWGRKTGMHKKGVISQLIQLCSIQEIAANQEAIPREIEAVLQHYQGLFQEPTELPPHRTFDHEIPLLDGAKPVNIKPYRYAPKQKDEIEKQVTQMLQHGVIQPSHSPFASPVLLVKKKDGTWRFCVDYRGLNDITVKNKYPMPVVDELLDELSGLKWFTKLDLRSGYHQIRLVEKDEFKTAFKTHQGHYKFRVMPFGLTNAPATFQGLMNTIFAHAIRKFVLVFVDDILIYSKTLAEHVCHLKSVLTVLQQHQLYIKRSKCSFSQPSLEYLGHIIGAIGVATDPQKVQAIRDWPVPKNLKQLRGFLGLAGYYRKFIRNYGVITKPLIELLKRGTFFFWSTLEHTAFQEVKQCLQQAPVLAMPDFNQQFVIETDASDKGIGAVLMQAGHPIAFLSKALGPKAQGFSTYEKECLAILMAVDKWHQYLQYAEFAILTDHRSLTHLCDQKLSTPMQQKAFLKLLGLQWMEVVVDGYHHDPATKQLLVELSLHPDGVNNFTLVNGIIKFKGRIWLGKHVEAQQAVLLSLHNSGVGGHFGIAATYQRIKSMFAWPGLKRDVKAYVQSCAICQQAKAIISDRDRIFTSALWQELFRLSDVKLNMSSSYHPQTDGQTERLNQCLEAYLHCAVYSSPALFARKPTSFGVIDMGQSTIPDVQQLLVNRAKLNELLHHHLVRAQQRMKAQADKHRSKRQFAPGDMVYLRLQPYVQLTMAKRSCHKLSFRYFGPYKVLERIGAVAYRLALPAGSLIHLVVHISLLKKAVQPDTPVSSDLPLTCSTDEVEVYPKAILRRQLIKRGGSSIPSVLVRWSGLPDTLATWENLADLWRRFPSALAWGQASP

SEQ ID NO: 164674 - protein, 261 aa, Oryza sativa
  Clone ID: PAT_MRT4530_6354C.1.pep
MAGCECMVLLVAPIAVKDRFTGNPGRLTVLTTSGSGCFTAFNYCFEMPALCKRTPSFLWLYPASYLLFRVEVLLSWSCLREVGFVAAVKPSRTHASSGGGKATASAAKARAAAASKVRATAAAAYLMRAGAVIHSHGMETCIATMLNTGAKEFRGTLTEYLSEKLIYANCVSVSNPLTVGKGPSVGLSSYLSANIYLSEKTFAGSTWPDRPYLSGKLMLTNNLTAYRSFPDRYVVSKLGAWCSGCTYSKLEKKLEGRMSRV

SEQ ID NO: 164675 - protein, 78 aa, Oryza sativa
  Clone ID: PAT_MRT4530_63550C.1.pep
APPQAAPRPQRGHPGAKPRPGPEEDEDRRHLHQQDEEVPASSSSSLNSSSSSTSSTAALNKPAFSPQFAGLDYPAIIP

SEQ ID NO: 164676 - protein, 95 aa, Oryza sativa
  unsure (1)..(95): unsure at all Xaa locations
  Clone ID: PAT_MRT4530_63551C.1.pep
GKAASPFLQTAAFQLRTTQVWHQLALGAQQSPHRAITIVQAKGQQLQLQQFGDLPFDRKRAQAQALLAFNGPSRKGTPPRDXGAPRPIPPLGGVL

SEQ ID NO: 164677 - protein, 285 aa, Oryza sativa
  Clone ID: PAT_MRT4530_63552C.1.pep
MDASPSSSSSSPVAPEVVQWAGGADGFGSAAIGFACRVLCAVATCVFAAVGSVVGAVTGSAIGLATESGMLRGAGIGAISGAVFSIEVAESSRDLWHSSDSAVWCLVYMVDIISSLLSGRLVREKVGPAVQSAVQSQISAISSPFAETSDLFETGGTKGLPADTLRRLPAIKITGDNAVDSAGEPICCSVCLQDFRVGIFSRILEAKKWHVCSNHFDEMNELAETVDKEKRTVVASESQKWKTGPEFSCDEAADNARHGAVVHERVYNDLTIVLKNQPLDESTET

SEQ ID NO: 164678 - protein, 87 aa, Oryza sativa
  Clone ID: PAT_MRT4530_63553C.1.pep
LPCDGPLFLSILEPVTDRRICTSGALPPPLAPQSTAVTAGAEVFPIRRRCSQAQTPTEPRSSTSAAVQRCPLIEPRSSPAATALQKR

SEQ ID NO: 164679 - protein, 455 aa, Oryza sativa
  unsure (1)..(455): unsure at all Xaa locations
  Clone ID: PAT_MRT4530_63554C.1.pep
MAPAAARWLRREVFVGLALGQFVSLLITSTGFSSSELARRGVNAPTSQSLLNYVLLALVYGGILIYRRQHLTIKWYYFLILGIVDVEANYIVVKAYQYTSLTSVMLIDCWAIPCVILLTWVFLKTKYGLRKFIGVVICVAGIILVVFSDVHASDRAKGPNPLKGDLFVIAGAMLYAVSNVTEEYFVKKSSRIEVMAMLGVFGAVISARKYASISHFLNTXYRSILERQELRSTEWNAXLPFIGFAVAMFLFYSTVPIILKICGATMLNLSLLTSDMWAVLIRIFAYHEKVDWMYFVAFAGTAAGLVIYSYKGSKVAEETAQVAGATDEEAATRVAGAGDDEPASTNKEVSSLAATTSSVIAGSLVHMGKRDFYGGSDVQSISGSQFQHCASQSIEWAWLVKRVEVIQNITNIKLASARNLEDKAAQAFFGTPGVEARSKSNQHSFVNRRMVTLIY

SEQ ID NO: 164680 - protein, 316 aa, Oryza sativa
  unsure (1)..(316): unsure at all Xaa locations
  Clone ID: PAT_MRT4530_63555C.1.pep
VAGHFRVRLLRYRASGCGCVAPSAAVPLPAVHTTTSCCSAERRPPQHGYITGGLLAIASTWSCSCVVLSDRSFAASVVFIAIRASTTSPSALVIVSHSGYLQMPTDIAVQAIGSATSPSSSSSMTHRQRRRIFLDYTSLFSGNCVLLQQFSLYAVLAPRPCPGVXQTLCDVSSFTVXLHRLFGVIYLXTASIASPSSSSARPRAPHSTAPHARSVARLLRHQLPDFGYIDHGYSTHGYLDHGSLTPYALATSTTAQRAIIRIEHSCRCKDLCGLANNSSSDHDTEDIETGNEEVNYGTTTIDLDAETSYVSKPKTG

SEQ ID NO: 164681 - protein, 116 aa, Oryza sativa
  Clone ID: PAT_MRT4530_63556C.1.pep
MDFDRHGFLTKLGFAALTCYSVLAIYRSRGEPGAVAFVAGAYAAIVLLFHSLRRFELAGHADRGRIKAVVWVLTTLLTGMFAARVAPLMPPLVAVLVWSMSAATVAGGFWAFFISH

SEQ ID NO: 164682 - protein, 163 aa, Oryza sativa
  unsure (1)..(163): unsure at all Xaa locations
  Clone ID: PAT_MRT4530_63557C.1.pep
QLYLDLSRFPESKSLRCIDLTLHNFFNATPPNRNGPESKVVAADACIQKQNNNKEEAATATXQSGRCFIFEAXRRRVVMLPCLHQPKEIPISIFVPCLEEAGDFDGGNLYIMDKRSKTGKLGNNQFEAFIYCHYRGSSTLKSWTRQILLPPPCIYDRAYLGRD

SEQ ID NO: 164683 - protein, 364 aa, Oryza sativa
  Clone ID: PAT_MRT4530_63558C.1.pep
MALSRRFLNLIMDSRFPESKSLRCIDLTLHNFFNATPPNRNGPESKVVAADACIQKQNNNKEEAATATVSSMDRIQLPSPIFNFQASRSGIDDYWKIDCLPLFDRRVPKEIPISIFVPCLEEAGDFDGGNLYIMDKRSKTGKLGNNQFEAFIYCHYRGSSTLKSWTRQILLPPPCIYDRAYLGRYLEISSYALLGDGSNICISVKGVGTYCMDMRSFTWSHLGKWMLPFTGKVEYVPELKLWVGISADTQDLAAADLSSMNSQPQLLATCKEFDQPEEWKRCKDSQLVNLGSGKFCIARFFHNKTPQGDSDELIGKNITVLTGVEVVPSVYHANGNDNSRKGELQMIPHKSRLYAGSDTIWAVL

SEQ ID NO: 164684 - protein, 103 aa, Oryza sativa
  Clone ID: PAT_MRT4530_63559C.1.pep
RFKKNLQTPNAPSRRRRGGGARRPAAAGGGVRVGHCVELAAPRPGRARASAEADRPGTLALHLRAPCQPLLQARPPRGGGGGSRLRPTPHRGFVHRFHIRRGA

SEQ ID NO: 164685 - protein, 106 aa, Oryza sativa
  Clone ID: PAT_MRT4530_6355C.1.pep
MQIRVRCGCGEAGCPEWAIVEAAFTFTVGYHELAGTKVALKKPLLVLRKKKTTAVAAETELEVIGVIRHKILFKDRPKALISKPQVKEKKTLPLPAPAAAPPPQSS

SEQ ID NO: 164686 - protein, 370 aa, Oryza sativa
  unsure (1)..(370): unsure at all Xaa locations
  Clone ID: PAT_MRT4530_63560C.1.pep
MALSRRFLNLIVDSRFPESKSLRCIDLTLHNFFNATPPNRNGPESKVVAAEDRIQLPSPIFNFQASRSGIDDYWKIDCLPLFDRRVVCADQSGHCFIFEAXRRRVVMLPCLHQPKEIPISIFVPCLEEAGDFDGGNLYIMDKRSKTGELGNNQFEAFIYCHYRGSSTLKSWTRQILPPPLCIYDRAYLGRYLEISSYALLGDGSNICISVKXCMDMRSFTWSHLGKWMLPFTGKVEYVPELKLXVGISADTQDLAAADLSSMNSQPQLLATCKEFDQPEEWKRCKDSQLVNLGSGKFCIARFFHNKTPQGDSDELIGKNITVLTGVEVVPSVYHANGNDNSRKGELQMGTYMIPHKSRLYAGSDTIWAVL

SEQ ID NO: 164687 - protein, 350 aa, Oryza sativa
  Clone ID: PAT_MRT4530_63561C.1.pep
MAGGKMKEHDGASPAKIFIGGLPKDTTMGTFKEYFGKYGEIVDAVIMKDRFTQKPRGFGFITFADPAVVDRVIEDNHVINGKEVEIKRTIPKGAAPLKDFKTKKIFVGGLPSALKEDEFKEFFSKFGKVVEHEIIRDHSTNRSRGFGFVVFDAEKTVDELLAKKGNMIDLNGSQVEIKKAEPKKPSNPPHRSFDSEPRGRPHADGYDGLGNSYNYGGSFGPYRSPGSFGTRPGGYSSSYGPGDYGSGYGAYGGALGGYRGESSLYSSRFGSTYGGSFGGGYAGGSYAGGLGGAYGRDAGGFGGSSYGPSYDSSSGPGAGVGFGTGGLYGARGGYGSSGAGASGRYHPYAR

SEQ ID NO: 164688 - protein, 97 aa, Oryza sativa
  unsure (1)..(97): unsure at all Xaa locations
  Clone ID: PAT_MRT4530_63562C.1.pep
PRLLRLHRTTRRRPSPSLHLGRIHLRNEEKTATLEKLVPHLGTLEATRAQIHETRELDXSTEHDLRASDLLQLPRSQLRASSGSSXKLQTAKITELE

SEQ ID NO: 164689 - protein, 195 aa, Oryza sativa
  unsure (1)..(195): unsure at all Xaa locations
  Clone ID: PAT_MRT4530_63563C.1.pep
ESKSLRCIDLTLHNFFNATPPNRNGPESKVVAADACIQKQNNNKEEAATATVSSMDRIQLPSPIFNFQASRSGIDDYWKIDCLPLFDRRVVCADQSGRCFIFEAXRRRVXMLPCLHQPKEIPISIFVPCLEEAGDFDGGNLYIMDKRSKTGKLGNNQFEAFIYCHYRGSSTLKSWTXQIXLPPPCIYDRAYLGRD

SEQ ID NO: 164690 - protein, 325 aa, Oryza sativa
  Clone ID: PAT_MRT4530_63564C.1.pep
MALSRRFLNLIMDSRFPESKSLRCIDLTLHNFFNATPPNRNGPESKVVAADACIQKQNNNKEEAATATPKEIPISIFVPCLEEAGDFDGGNLYIMDKRSKTGKLGNNQFEAFIYCHYRGSSTLKSWTRQILLPPPCIYDRAYLGRYLEISSYALLGDGSNICISVKGVGTYCMDMRSFTWSHLGKWMLPFTGKVEYVPELKLWVGISADTQDLAAADLSSMNSQPQLLATCKEFDQPEEWKRCKDSQLVNLGSGKFCIARFFHNKTPQGDSDELIGKNITVLTGVEVVPSVYHANGNDNSRKGELQMIPHKSRLYAGSDTIWAVL

SEQ ID NO: 164691 - protein, 138 aa, Oryza sativa
  Clone ID: PAT_MRT4530_63565C.1.pep
MSGAAPTQPTPQPTPAPLPPSPPPPPPPIPVPSATPPPPPPVTSPPPPPVFPPPPPVPSPKPTPTPTPVTPTPTPPVVPSSPPPLVPSPPAPKASPPPPSNNVSPPQPPSNSPPSSPPPPQSPDAGNAPSSPAPPQAL

SEQ ID NO: 164692 - protein, 63 aa, Oryza sativa
  Clone ID: PAT_MRT4530_63566C.1.pep
SSSLPTPKLQLLHKHISSTPPLSSLFLMWSSTTHAAPALHVSGLERQPMTQHKAVDQSIQTEA

SEQ ID NO: 164693 - protein, 72 aa, Oryza sativa
  Clone ID: PAT_MRT4530_63567C.1.pep
MSVCHDPIDGFGRIQRQSRPTRGKNQQRTSSVQGDENGHMLRVVSPITRLVRSCSRHGAVSRCRMISEPGLP

SEQ ID NO: 164694 - protein, 156 aa, Oryza sativa
  Clone ID: PAT_MRT4530_63569C.1.pep
MATLPSSTAAADALPAKQMQHDTARRRRGARNEGKAARTTAFYPAAGAGYTTMRSRSEKAARGEWDGLGGGRPVRIGLESYGFPSPIPKPRARGFGRAGGTSKRRRHEQATGRHGDATQGSSRRRREGESKGKQKLQFEKTRAKSQTLKRRGSMTP

SEQ ID NO: 164695 - protein, 535 aa, Oryza sativa
  Clone ID: PAT_MRT4530_6356C.1.pep
MAARRWAWGPPARAFSTITAKATVPLAHLAELPTSLPTSRYTVTPPVQPWPRRLTARSLARLLLRLPTPHLAVLAFRHALFHAAPPLPPSLPVFAAVLSRLPAADPALLPPVLSALRAANLPAFSDRPFLPLLRSLPPLPSLRLFLSLPSFNSHPSVRSFNALLHSLVSARRLRLAAALFRAAPTKLYITPNLVSCNILLKGLVGIGDLDAALKVLDEMPGLGITPDVVTYTTVLSAYCGKGDIEGAQKLFDDIIASGRRPDVTMYTVLIDGYCQCGNLQDAARIMDEMEAARVQPNEVTYSVVIEACCKEEKPIEARDFMREMLGAGYVPDTALGAKVVDVLCQDGKSEEAYQLWRWMEKKNVPPDNMVTSTLIYWLCKNGMVREARNLFDELERGFKPSLLTYNSLISGLCENEELQEAGRVWDDMVERGYEPNAMTYEALIKGLCKTGKPNEGATVFEEMVSRGCKPSSLLFQVLVDSLSEPRHEDTIRKILETAALYGRYFLDGDSWEIFVRKVVNATDTSNKHLDLVLDM

SEQ ID NO: 164696 - protein, 810 aa, Oryza sativa
  Clone ID: PAT_MRT4530_63571C.1.pep
MSSAVVASSTTFLVALASSASRGGPRRGRVVGVAAPPALLYDGRAGRLALRAPPPPRPRPRRRDAGVVRRADDGENEAAVERAGEDDDEEEEFSSGAWQPPRSRRGGVGKVLKRRGTVPPVGRYGSGGDAARVRGAAAPAPAPTQDAASSKNGALLSGRDDDTPASRNGSVVTGADKPAAATPPVTITKLPAPDSPVILPSVDKPQPEFVIPDATAPAPPPPGSNPRSSAPLPKPDNSEFAEDKSAKVVESAPKPKATRSSPIPAVEEETWDFKKYFDLNEPDAAEDGDDDDDWADSDASDSEIDQDDDSGPLAGENVMNVIVVAAECSPWCKTGGLGDVAGALPKALARRGHRVMVVVPRYGDYAEAQDVGIRKYYKAAGQDLEVKYFHAFIDGVDFVFIDAPLFRHRQDDIYGGNRQEIMKRMILFCKAAVEVPWHVPCGGVPYGDGNLVFLANDWHTALLPVYLKAYYRDNGMMQYTRSVLVIHNIAYQGRGPVDEFPYMELPEHYLDHFKLYDPVGGEHANIFGAGLKMADRVVTVSPGYLWELKTTEGGWGLHDIIRENDWKMNGIVNGIDYREWNPEVDVHLQSDGYANYTVASLDSSKPRCKAALQRELGLEVRDDVPLIGFIGRLDGQKGVDIIGDAMPWIAGQDVQLVLLGSGRRDLEVMLQRFEAQHNSKVRGWVGFSVKMAHRITAGADVLVMPSRFEPCGLNQLYAMAYGTVPVVHAVGGLRDTMSAFDPFEDTGLGWTFDRAEPHKLIEALGHCLETYRKYKESWRGLQVRGMSQDLSWDHAAELYEEVLVKAKYQW

SEQ ID NO: 164697 - protein, 1019 aa, Oryza sativa
  Clone ID: PAT_MRT4530_63572C.1.pep
MKRKQKPAAADAAAEVDADEPSQAPLPLEAFSGDVCAALTARYGRSTAPQHRHLLASAAAIRSILVDDGLPVTPASYLPAAISALQAAGSADPAAASALASLLVILLPNIPSSPSSLPPASASESASALAVFLSSPDASQLPTGTVRSVVKSLGHLAFHVDAAADWGSVASPLEALLAASVDQRAKVRRCAQESVEKLFAHLKQCGCGKKVSNAAIGMFDKHIASVKNHVNLNSDASEGKEMEAANMLSAMVVVVPYLSKKAMKTVFSEVYQLLTPCFSPLTRHVLKLMETLLDHLKAENVESDLVNLIPLLLAYLNYDEKKPDDTIVAALKLMKNCLAKLVGRPNLWMEVLPSAFEAVSGESSYAFMKNIILTLSQIAAKTDKESERKNVEECIGAAVIALGPDKILSLIPIGFDEDRLTCSNTWLLPILDKYIYGASPQQFLERIVPLAESVQQASNMAKSARKCEDLKSCSNQLWNLLPAFCRYPVDICQNFGSLSKLLLEMLKCDKYLYKSAVKALQQLVDGTRRLSSSEQNREIYVELSTLFSSKIINLSCPSFERCSKKDARKNMKVLASHSVYLLSTVTDYFLDSSPEKRSHLKDALRCLAQLSGSTNICNLFLSLVKRFGLEDTQSEQENIECQTNEVDKKDEEGTDVDEEKNKKRSLVMELISTFAEAADEDLLDLLFGFVKSSLLNNKQPCEGKALFALSIILKEHNEYSLARLDEIMMLLHGIKADLDNEVLEGQLLCYQYLLVHMIKANEENTSKKAFLILNELIVALKSKKESRRLAYDVLLAISNSLRSSESNSEDSDLQRLFTMVMGYLSSPAPHIVSGAIAALSLLIYNDANFCLEVPNLIPSVLVLLKHKAIEVIKASLGFVKVLVTSLHSEKLLELQADIMSGILPWSSVTKHHFKGKVVLIMEILIRKCGFDAIDLVTPEKYKAFVRSVEEGRKGNHNPADGAESEAQQPTQHAAKRKNGLILMLELDKREHTLGRHRGVCQLERRNSSLKGPGMLALLV

SEQ ID NO: 164698 - protein, 45 aa, Oryza sativa
  Clone ID: PAT_MRT4530_63573C.1.pep
MPCKWNCYPNLVLSLRFSVRIIFTCMLSTNLKHIELNKTLYKDCL

SEQ ID NO: 164699 - protein, 107 aa, Oryza sativa
  Clone ID: PAT_MRT4530_63574C.1.pep
MAVSVRTRVGKLRGGRRQLVLWLSAVVVSAAEEGYLTVLYKGNFPPEDPFKTVRVAAREEAKRMAAPAAAIATSTTALPSGNNAAAPRPTTAGKSVAVLKRVFSEAF

SEQ ID NO: 164700 - protein, 544 aa, Oryza sativa
  unsure (1)..(544): unsure at all Xaa locations
  Clone ID: PAT_MRT4530_63575C.1.pep
MQHPVLTILYYVSPFDKPRNISLSLIQVEIQMEKFEGYSEKLKFPRQYFVYPLLFQEYIYVFAHDYGLNGSXELVEIIGSNNKKFSSLLVKRLMIRMYQQNFWINLVNHPKQDRLLDYNNXFFYSEFYSQILFEGFAIVVEIPFSLREQSCPEEKEIPKFQNLRSIHSIFPFLEDKFLHLHYLAHIEIPYPIHLDILLQLLQYRIQDVPSLYLLRFFLNYYSNWNSFITSMKSDFILKKENKRLFRFLYNSYVSEYEFFLLFLRKQSSCLRLTSSGTFLEXIIFSRKMEHFGLMYPAFFRKTIWFVMDPLMHYVRYQGKAILASKGTLLLKKKWKCYLVRLWQYSFSFWTQPQRIHLNQLANSCFDFLGYFSSVPINSLLVRNQMLENSFLIDTQMKKFDTKVPVTPLIGSLAKAQFCTGSGHPISKPIWTDLSDWDILDRFGRICRNLFHYHSGSSKKKTLYRLKYILRLSCARTLARKHKSTVRAFMQWLGSVFLEEFFTEEEQVFSLMFAKTTYFSFRGSHSERIWYLNILRINDLVNPLN

SEQ ID NO: 164701 - protein, 772 aa, Oryza sativa
  Clone ID: PAT_MRT4530_63576C.1.pep
MRGVQDRKQKKKQDLQVLGPFPGCLGRMINMFDLSNGVVATKMLTEKAHRDGKDRGNAFKMAIGPFSSQIEDKKRDSQPRKQSPTKRLSSPTKRSGEAPVKLLMEQDMWKEGMSGEEPLNVVARLMGLNDAAGHQSDLKSGKRSDKEYRSGGFDENSRNLRPKKDSKGHPNQKAGTHSEPCSGFSDQTLRMNSSRNKHQGKEPSCEKRMTLVREKFAEAKRLATDEKLLHTKEFQEALQFLSSNKDLFLKFLDEPNPLLSHNNYEFQPDTPPSETKQITILKPSDSIKRNGNTLVGRQLYSDGDESEGNRCRRHQSLSVSPTNSTLSEPTRIVVLKPGLVKSQEPKILRSPSSSSTAADSEDDSMSAVDETVPSSRRLAKEITWQMRMRLKDKQDEENLLSYEFHDIYIGDDSFSKSEVENAKEVSGVAALTLHHALVRHPIGVNHQWSEKPKKGFLRDCQLYHPPSVVRKKGKHAENVDDISMPRLMASSWHMNDMENMPAKDISSIPVIGAPGIFGESQDQPSPVSGDLKEERRAKDDVYSFHGHVSHDSVGLALSFSSSKKKRIGEGGDRVPEADPGRGGEGRAAAAPVGDAGEEEAIGDGVTAGGGGREGRAAAVRSRLRRTLLSVSADLLCRDAPPARRDGLLSFPTPREHPVSRMATLRNLKIKTSTCKRIVKELRSYEKEVEKEAAKTADMKEKGADPYDLKQQENVLAESRMMVPDCHKRLETALADLKATLAELKESNEQGAEIGEAESTITEVEAVVKPTED

SEQ ID NO: 164702 - protein, 112 aa, Oryza sativa
  Clone ID: PAT_MRT4530_63577C.1.pep
MATLRNLKIKTSTCKRIVKELRSYEKEVEKEAAKTADMKEKGADPYDLKQQENVLAESRMMVPDCHKRLETALADLKATLAELKESNEQGAEIGEAESTITEVEAVVKPTED

SEQ ID NO: 164703 - protein, 852 aa, Oryza sativa
  Clone ID: PAT_MRT4530_63578C.1.pep
HEEAVPTKRLSSPTKRSGEAPVKLLMEQDMWKEGMSGEEPLNVVARLMGLNDAAGHQSDLKSGKRSDKEYRGGGFDENSRNLRPKKDSKGHPNQKAGTHSEPCRGFSDQTLRMNSSRNKHQGKEPSCEKRMTLVREKFAEAKRLATDEKLLHTKEFQEALQFLSSNKDLFLKFLDEPNPLLSHNNYEFQPDTPPSETKQITILKPSDSIKRNGNTLVGRQLYSDGDESEGNRCRRHQSLSVSPTNSTFSEPTRIVVLKPGLVKSQEPKILRSPSSSSTAADSEDDSMSAVDETVPSSRRLAKEITWQMRMRLKDKQDEENLLSYEFHDIYIGDDSFSKSEVENAKEVSGEISEDLEFGTPTSGRSWDFLSRSGSPYSASCSSQTSHRREPSVVREAKKRIFERLSIVSSTVGGEEEREARRSMGTLGEMLTIPEVKKDQEVFGGVTLENPSPEMDSEEPFLCLPRSRSVPISLSFGGTELNGVATGCQEAEKEKNRKSLSFREKVSSLFSKNRKVARGKLDPSGIPSTDDRLKHGNSATVTDFSENADHSALDNPLNCTIQNVDEISMPRLMASSWHMNDMENMPAKDISSIPVIGAPGIFGESQDQPSPVSVLDGPFLSDNSRSLLCSSESFITASPQALSRSPLIGSFSRSLSWEDPPLEVMSPNSLRLSRLFSKADEDQDSLTFIQKLVCSAGIDREGCMLSGPLELYLLEKVSDYQEEGTKLRERRSKEKFLFDAVNEALTELTWTAELMAYPLGRSSSLERKDCENAFSNSAADEIWRVIRNWSILDKYPPGETIERNLLVEMILKREVLEAASSDTTRLETFELTSMVCTMVLEPLIADAVVDLSA

SEQ ID NO: 164704 - protein, 141 aa, Oryza sativa
  Clone ID: PAT_MRT4530_63579C.1.pep
SHGACKPCVVTSMPPGGNAIFTFKLYKTQGKYAILGGRWRERGERQLVTGTTRRWGTERRAGRRCDGNSVPPSRGSRGDGDGKASGLVTGNRVWDRRASIMNQRSSWVATRCSRWSGGVTRGHRGHRLVPPPFHGHRRRHP

SEQ ID NO: 164705 - protein, 224 aa, Oryza sativa
  unsure (1)..(224): unsure at all Xaa locations
  Clone ID: PAT_MRT4530_6357C.1.pep
QFSHSRAKADSNDARSNTAGPTPVSPTSSRMSSXRRCRSTSRTGRGWRPSPPPASWHAARPPARRRRTRRSASATGRERGAGGPRGTRRAGRGRRTPPPREGPSGARTRRPRRGPAPARAAARRRRRAPPPRSPRQRRRRRXERARELVRAEAEXRGGRRRAGRGRRRPPRRKGPSGARRTPGRGARRRRRRRRHRWWRWSTHHPPRWRRRVRSPGPPREPPQP

SEQ ID NO: 164706 - protein, 69 aa, Oryza sativa
  Clone ID: PAT_MRT4530_63580C.1.pep
CLLTQLVEDFSYSCAQEGDGRIGMGGRRIEAMNSITLKNISLAQEVPNFSVFILLLHSESTTYKRKHCK

SEQ ID NO: 164707 - protein, 128 aa, Oryza sativa
  Clone ID: PAT_MRT4530_63581C.1.pep
MEAVHALPVAWHSHAHRSGSGGSPPHRSVVAALPLHRSGGGGRGRRAFTISAIVGLPLPHRSGNSGIHPHRSGGCAQEQSHPKHSHLRAMLGAHLQPAPEHALYGLCSGHICTVPLCHAWGTSAFCSR

SEQ ID NO: 164708 - protein, 124 aa, Oryza sativa
  Clone ID: PAT_MRT4530_63582C.1.pep
TCTWLRDRSIDIDRVIIKLLLLLVINMHMHLQISPYASLRLREPHHASSIVAHIIMLSARDSSINTSTHLDLQMLQPFGLVAGGGRCCATGRASPCRTPPAPARTACSASAATAPLPAAPLITS

SEQ ID NO: 164709 - protein, 427 aa, Oryza sativa
  Clone ID: PAT_MRT4530_63583C.1.pep
MAGSLAASAFFPVPGSSPAASARSSKNTTGELPENLSVRGIVAKPNPSPGAMQVKAQAQALPKVNGTKVNLKTTSPDKEDIIPYTAPKTFYNQLPDWSMLLAAVTTIFLAAEKQWTLLDWKPKKPDMLADTFGFGRIIQDGLVFRQNFLIRSYEIGADRTASIETLMNHLQETALNHVKTAGLLGDGFGATPEMSKRNLIWVVSKIQLLVERYPSWGDMVQVDTWVAAAGKNGMRRDWHVRDYNSGQTILRATSVWVMMNKNTRRLSKMPDEVRAEIGPYFNGRSAISEEQGEKLPKPGTTFDGAATKQFTRKGLTPKWSDLDVNQHVNNVKYIGWILESAPISILEKHELASMTLDYRKECGRDSVLQSLTAVSGECDDGNTESSIQCDHLLQLESGADIVKAHTEWRPKRAQGEGNMGFFPAESA

SEQ ID NO: 164710 - protein, 132 aa, Oryza sativa
  unsure (1)..(132): unsure at all Xaa locations
  Clone ID: PAT_MRT4530_63584C.1.pep
FSFLNSYNLSWTSDRLATQGWPNGHMCPLCHRTQETGVHLLASCRYTRRLWVSLAIWTACDLLNPNHWXHASTVIEWWENTANTIGAPKKAMHTLTLLVAWEIWNERNRRNFQHEELPMASLLTKVKEKAKT

SEQ ID NO: 164711 - protein, 82 aa, Oryza sativa
  Clone ID: PAT_MRT4530_63585C.1.pep
KTRSSIPYLINCGQSIVIVEDKIKYSIPDTGTKTLIILLFSIRPGAHKLIFCSVVLGQQRSNRYCQREPPVHLTNKKKPSCR

SEQ ID NO: 164712 - protein, 1066 aa, Oryza sativa
  Clone ID: PAT_MRT4530_63586C.1.pep
MQGFPGGAPDPQQLQSTMLAIEQACSLIQMHMSPADAEKVISSLHSSPMPYQACRFILETSHMPNARFQAAGAIGDAAIREWGILSDDNKKSLIVYCLNYVMEHASSPEGYVQAKVSAVAARLLKRGWVEFSDQEKAAIFFEIEQCVRGIHGPNRQFATINFLEALVSEFSPGTASAMCLPKEFHEQCQWSLEVKFLKDFYCWAQAAVFNSADRILNVNASVAEEKACSAAFRLMFQILSWSFKHNVEHANSEAKINSGLRSDAINLKKFERSLVKPGSVWSDVLISSGHVQWVLNFYTAARQKFSYDTLWVDSPIATSCRQLIVQLCSLTGSVFPNDNADGQIQYLVRILSAVVHWIEPPDVIAASIRSGASESEFVDGCHALLSMASLTTCSLFDNLLKSTRNYGTINLLSALTSEAVKSFLDNQNEEETWGSESLDILLETWNVILGDVDSEKSPMSVDGAIAASSLFKIIVESHLKERDEQLALYAQIARSAADTTIPFLAQLFSERFARLSQRNGENDPTQTLEELYWLLLITSHVLTDSGEGETLLIPEALQVGFPYVVEVAQHPVVALSWSIINFSRQCLDPGIRARYFSPRLMEAVIWFLARWVATYLVPLDVSRGQVNRAEIDSVDKHMLQHSRKMLNSFAWENNQGERVLDFVVLISMVALTTYQGEIELQTLTCQKLLATVVRRKHTCTYVVQLDSWRDLTRAFASGRSLFSLTGRLQRSLAETLACAASCIKDPEASVQYLRDLMGPVAGCLVENANRSDLKSVAQQADVVYMSAVIYMILKFVVDFVDGQAVFLDAKETSVLVMLSLSSSLRSESQAEKYKDLRALLRLLTNICSKDLVGFLSDSSIEGSQDIAEVIYVGVDIVTPLISLDLLKYPKLSRDYFALISHLLEVYPEKVANLNKDCDIVDRCLTAINALASYHFKERLGGRGGLSSQLMESEGSNGKLQESISSHFLRLLLQLLLFEDFRMELAGSAADALLPLILCEQPLYQRLLQELVEKQQNPTVKSRLGMAFHNLTSSNNLSNSLDRPNRQRFRKNLRTFLGDVSGFMQIK

SEQ ID NO: 164713 - protein, 105 aa, Oryza sativa
  Clone ID: PAT_MRT4530_63587C.1.pep
TPTLLQGCEPVLAYATYQLFSYIHFGFILSSHIFSLELIRKYGKGKECLQERSSLIFFIFIPPRAPVTSFSCPCYDCCLCTSVGGVYIVRGSLIGFCYVFYDYSR

SEQ ID NO: 164714 - protein, 66 aa, Oryza sativa
  unsure (1)..(66): unsure at all Xaa locations
  Clone ID: PAT_MRT4530_63588C.1.pep
VRGWGWGFVGWFPPPPPLFFFLFLFFFFFLFFFFFFFFFLKLQXLKKKKKKKKKKKKKKKKKKTTP

SEQ ID NO: 164715 - protein, 1232 aa, Oryza sativa
  Clone ID: PAT_MRT4530_63589C.1.pep
MDCIAGSDPFLDSTRGEQRIRPARELNGPPIWATLDVSDSQANASKLTVCSAKGLMSLMSAVNIVDVSYVAVPATAALPPEPIKLTAMEALWLPFPVLQHVLFYEAAGLTPFDSVVDSLRSSLGATLATFAPLAGKLVHLEDTGDVAIACSASDAVRFVEAECDADVRRVAGDEAHDLRTFEQLVPELDMSKLPTSVLAVQATRLQGGLAVGVTLHHGVADGKSFWTFVEAWASACRCRGEAPAATPCFDRSVIKWPGGEEIARSVLPRITRDGEVHGKTLHRPPSSFVAVVAMASAFFARCKTTAADEDAGGDVFLFFFADVRERLDDPPVDAGYYFGACLTGCLARLPARDVHGDGALAAAASAIQEEILELAEDPLAGWNFMSLAGKIPSDRVMNVSGSPGFRPYDVGDFGWGKPRRTEPIRMNHDGQVALVRAADGHGVQAEEHAPKFALGPKMGRDEPECHPCLENCALAEVARRKADGGGGEPSSSFVVAGGGGGEEGRRRRADLESRRRRSSWPAAEGARRGSGWRRRRGGSRRRADLECRHRRSSWPAAEGAGGARTWERREPSARSEPAASRSSSSSWPAAEGAGGARTWERREPSAEGAGGVVVVVGVEEGAGGARIVQSLMSAVSIVDVSYVAVPATAALPPEPIKLTAMEALWLPFPVLQHVLFYEVAGSPPFDSVVRSLRSSLGATLASFAPLAGKLVYLEGTGDVAIACSASDAVKFVAAESDADVRRLAGDELHDLATFQKLVPELDMGKLPTSVLAVQATRLEGGLAVGVTVHHGVADGKSLWMFLEAWAAACRGEATPVATPCFDRSAIKLHLGEEIARTVLRKYAPKLPQVAELEIFVEQRNRFTRRTFTVDAQQIERLKQRIARDGEARGAPLRRPPSTFVAVVATAWTCFARCKTTAADDGEVFLVFIADVRERLDPPVGAGYFGSCLTVRVARLPVRDIHGDGALAAAASAIQEEIAKVAEDPLAGWDFLRLMETLVPVTERAMNVSGSPAFRPYDVGDFGWGKPRRTEPIRMNHDGQVALVRAKDGRAVQGRGRMSAAVTVRVVGVSHVAVPAKAALPTEPMKLTATEALWLRIPLLQHVLFYESAGSSWPPFDGIVDSLRSSLGATLATFAPLAGRLVHLEDTGDVAIVCSASDAVRFVEAECDADVRSVAGGGGDAPDDDLRLLEQLAPELDMGELPTSVMAVQSTPLVGGVAVRVTVHHGVADGKSF

SEQ ID NO: 164716 - protein, 286 aa, Oryza sativa
  unsure (1)..(286): unsure at all Xaa locations
  Clone ID: PAT_MRT4530_6358C.1.pep
ARRRCRSTSRTGRGWRPSPPPASWHAARPPALAPAAGGRRRRTASPPETAPPTRTVPPPHRRRRTRRSASATGRERGAGGPRGTRRAGRGRRTPPPREGPSGARTRRPRRGPGCSRGSETGTRRWRRTPSGTRRPTXQPGVADQQPHDVAXRRRSSSRTRRGPLPPPRHAPSCAARPAAPARAAARRRRRAPXPSFPAPAKKTALSERESWCARRRRSWWEAPSRAXRRRPPRRKGPSGARRTPGRGARRRRRRRRHRWWRWSTHHPPRWRRRVRSPGPPREPPQP

SEQ ID NO: 164717 - protein, 311 aa, Oryza sativa
  Clone ID: PAT_MRT4530_63590C.1.pep
MAAETCVSVSPAEVAEAAAILDVAGDGDGEAKGQIVVVDDDSDSEPNPYEYRVFFEWLWDDYCKIDDVTRGPTFRTPGARIFPCVEVYSCRVIDLTGGLEWPINVFGFVAVRDGLDRKRNYIFNRPRGDAQTLTTEDPSFILTGPIRAINCSQRIEFEIDLKVRGKTQSDKDKVLSARYIVYETMGPNSIVGQVRSKARPGKRCSVEVTFAHLAGRWRRRSSKDGSVLAVADDGVIKLARSVAVVESTGVLNLHAIITRNDGSSSGDDGVGVAAEDHAEFAAQRFESSCRTLDLGFCKMLATVSWSMIPLI

SEQ ID NO: 164718 - protein, 140 aa, Oryza sativa
  unsure (1)..(140): unsure at all Xaa locations
  Clone ID: PAT_MRT4530_63591C.1.pep
RVALSSSHHTTYGILNHRIWEFRAVTTCRLPLTNPWDAQQTYRSFSESRVECTNSSGTPLXFLIESYTRRGRSRRXAKLLGTPTELPLTLYYFLMYKRYNRASXNLAQSCVLXSVMESSFYSIHMTVTAIRNVQTTLQSS

SEQ ID NO: 164719 - protein, 121 aa, Oryza sativa
  Clone ID: PAT_MRT4530_63592C.1.pep
PVIAVPSATGGHPQEGLDPAEHGLGAPPPLFAGGPPENQGGGKNEPFPPGRTVQPTRPSAGGYGPLFFPQKGGVFQHPLGSVLSLLGQASNQLSINKKNIQRKKKKTAKKKVIPPCFPKNT

SEQ ID NO: 164720 - protein, 67 aa, Oryza sativa
  Clone ID: PAT_MRT4530_63593C.1.pep
MAPTGSILGNLLEKKHRLRSCHPRHSYARRLTVPPILRVATASAAPLSVTLPPVPSLLCLTIASAHP

SEQ ID NO: 164721 - protein, 740 aa, Oryza sativa
  unsure (1)..(740): unsure at all Xaa locations
  Clone ID: PAT_MRT4530_63594C.1.pep
AITRLDFAGSSSSAPLTAATYAALVSACSRLRSLPQGRRVHRHLVASSSSSPDAQLAGNTVLGNHLITMYGRCAAPDSARQVFDEMPARNPVSWASVIAAHVQNGRAGDALGLFSSMLRSGTAADQFALGSAVRACTELGDVGTGRQVHAHALKSERGSDLIVQNALVTMYSKNGLVDDGFMLFERIKDKDLISWGSIIAGFAQQGFEMEALQVFREMIVEGSHHPNEFHFGSAFRACGAVGSWEYGEQIHGLSIKYRLDXYLYVGCSLSDMYARCKNLDSARVAFYRIEAPDLVSWNSIVNAYSVEGLLSEALVLFSEMRDSGLRPDGITVRGLLCACVGRDALYHGRLIHSYLVKLGLDGDVSVCNSLLSMYARCSDLSSAMDVFHEIKDQDVVTWNSILTACAQHNHPEEVLKLFSLLNKSEPSLDRISLNNVLSASAELGYFEMVKQVHAYAFKAGLVDDRMLSNTLIDTYAKCGSLDDAMRLFEIMGNNRDVFSWSSLIVGYAQFGYAKEAFDLFSRMRSLGIRPNHVTFIGVLTACSRVGFVNEGCYYYSIMEPEYGIVPTREHCSCIVDLLARAGKLTEAANFIDQMPFEPDIIMWKTLLAASKMHNDMEMGKRAAEGILNIDPSHSAAYVLLCNIYAASGNWNEFARLKKAMRTSGVKKSPGKSWVKLKGELKVFIVEDRSHPESEEIYAMLELIGMEMIKAGYVPKHSWKHAIVDHIDSDLFNEEMLAEYG

SEQ ID NO: 164722 - protein, 95 aa, Oryza sativa
  Clone ID: PAT_MRT4530_63595C.1.pep
TTGRVASSSTPSTVLPGSLLSDLDVVDRAPTAPSSPNVLHTAARCRPSALICVLSSAMSCALKCGGGGPALVSLSASSFSLAADLTQPLARWRLA

SEQ ID NO: 164723 - protein, 80 aa, Oryza sativa
  Clone ID: PAT_MRT4530_63596C.1.pep
MALHGGPHPAAAGAEAGAAAGNGGRLLKTEERQKFKGKTIVYGSMVFSSSSSKLAMGVATLLQGQHLSSLVLLSCFHDCL

SEQ ID NO: 164724 - protein, 174 aa, Oryza sativa
  unsure (1)..(174): unsure at all Xaa locations
  Clone ID: PAT_MRT4530_63597C.1.pep
MDFEIRAPCHLLQLRQTSSSLAPARTLRVRVPGWGGVXSGRGRGEGRSSPALEGWLGEAVARRWEADQAGDEAASAAPEPQRWRRVVGQHRXQGHLAVDGSRRKEGRRGXGGGGWSGEGGRGLAFAVDALXPAGEAGGGAVGRWQRGIGQSRSRTRWEGNERRRGRVNAFARII

SEQ ID NO: 164725 - protein, 639 aa, Oryza sativa
  unsure (1)..(639): unsure at all Xaa locations
  Clone ID: PAT_MRT4530_63598C.1.pep
MRYFVLETRLLSYYKRKPQHKMPKLPIKSLHIDGNCRVEDRGLKMHHGHMLYVLCVYNKREKHQRITMAAFNIQEALIWKEKIEMVIDQQQGVVASDGNLAHSSSQQKVSLENGRKSSFSDHESLYSHEEEEEEEDNQRSLMRRTTIGNGPPESLYDWTRENDLGISNQGSPDHVFSRRHCALSDAKMASLRIFEELQDVDYLARSCSRAMKAVGVVEASCXVWPRDLCYVRYWRRNDDGSYXVVVLFQSREHPNCGPQPGFVRAQIESGGFNISALISRNGRIRTQVQHLMQIDLKGWGVGYLPSFQCCLLHXIIATLGTIYXLLTAYNNTTHVYRDRGTNYRRSCHVKQCGXSDLKVIKMPECXSVCNYASMLDEESDEDEDQIPESEQETSTHGHDAPVKLPVLDEEDSDQIDVSGFSGNLRRDDRDNTRDCWRMSDGNNFRIPAGKPLMKLVAVDWFKDVKRMDHVARRKGCAVQVAAEKGLFALAVNLQVPGTTNYSMVFYFVTKKLIPNSLLQRFVDGDDEFRNSRFKLIPSVPKGSWIVRQSVGSTPCLLGKAVDITYIRGPNYLEIDVDIGSSTVANGVLGLVCGVITTLVVDMAFLVQGNTYEELPERLIGAVRVSHIELKSAIVPVLGD

SEQ ID NO: 164726 - protein, 193 aa, Oryza sativa
  Clone ID: PAT_MRT4530_63599C.1.pep
MQTGLQMDQSRQSTMLDEESDEDEDQIPESEQETSTHGHDAPVKLPVLDEEDSDQIDVSGFSGNLRRDDRDNTRDCWRMSDGNNFRVRSKTFIYDKSKIPAGKPLMKLVAVDWFKDVKRMDHVARRKGCAVQVAAEKGLFALAVNLQVPGTTNYSMVFYFVTKKLIPNSLLQRFVDGDDEFRNSRFKLIPSVP

SEQ ID NO: 164727 - protein, 141 aa, Oryza sativa
  Clone ID: PAT_MRT4530_6359C.1.pep
THHTRARARRSREREKVDGKVVWITGASRGIGEVLAMQFASLGAKLILSARNKEELERVKHNIINKHPNSRVEVLPMDLSSGEESLKEHVHEAESLFSNAGVDYMIHNAAFERSKRRALEETEQGLKATFDVNVFGTITLT

SEQ ID NO: 164728 - protein, 86 aa, Oryza sativa
  Clone ID: PAT_MRT4530_635C.1.pep
TAGEFPEYKKPLKNKKGQQHFCPPAFFKNSFQTRAKYPPLFGTWRSISPIGRRGNTHNARALERARGKFRADQPFICMGEPRGNKS

SEQ ID NO: 164729 - protein, 291 aa, Oryza sativa
  unsure (1)..(291): unsure at all Xaa locations
  Clone ID: PAT_MRT4530_63600C.1.pep
DIICVSSHGRFNCCFGFVSVDVKCSCAEIFNDSWHASLGSDLAVNPVTILLDIINLIKXFSRSIKISLMVLLLGVGIASVTDLQLNLLGSIIAVLTIAATRLKVSSTQLLYQSSPYQSAVLLVTGPFVDKLLTNRDVFAFTYTFQVVAFIVLSCSIAVCVNFSTFLVIGTTSPVTYQVLGHLKTCLILSFGYVLLRDPFTFRNVAGILVAIFGMGLYSFFSVSESRDKKLADGPSPPLPISSSQMAEMKDSEPLLGGGGGAAAKSSPWNEVKGLQSFDEVPRTAKSAFSRP

SEQ ID NO: 164730 - protein, 47 aa, Oryza sativa
  Clone ID: PAT_MRT4530_63601C.1.pep
KRGGRYEVFWWDIPCSSKTNSVQVGVHHLKWVRKKKLKYRVRKNRVY

SEQ ID NO: 164731 - protein, 165 aa, Oryza sativa
  Clone ID: PAT_MRT4530_63602C.1.pep
MVMTRRRAALLVVAMCACAALPSTTTANKFSINWKPNTNYSDWPAQHGPFYKGDWLVFYYTAGQADVIQVDAAGYNTCDATNAISNYSKGRTYAFELNETKTYYFICSYGYCFGGMRLQIKTEKLPPPSPPAAAKDKSAAAFTASRASLFYAAAAAVLAAILRMF

SEQ ID NO: 164732 - protein, 1524 aa, Oryza sativa
  Clone ID: PAT_MRT4530_63603C.1.pep
MYYHYLHGFEELVMEHTGEPEFTVAMPGLPPMAIRDLPSFFTDLDDTRLSAAFHGVQTTIEQLDIDRQSGSSSGIAGAKKPCIMEEDGRVDQSCDKEEDGVQEEGVNQEGVALKQKRTRKRNPKYEGGVWAAGCEFVKLEKPRYITKQAAQIMAQEGKLDLLLKTLEENEKKREQAETRARADLADFKKAMEARLPQVEQKVNDINSVVATLSTKVEQLEGSMLRQGRQEKGAVDAKEDPFSPSPSPALIHGMRESLFTAASPFGGEAGDTVAVTGGGNLGSSLPPMSCPQFSGDNPQMWRANCEVYFDVYGIPPSSWVKVATLNFTGNAAFWLQSVRNQLIGVTCIMHQLNAYESTAPILYFVTKFVDGLKDEEEALEGVKTAGSKKMEVGVNYIKQPPRIMNPMVGSTPQRNSGMGTEERRSAEVSKPREDRFSALKSYRKAKGLCFTCGERWGRDHKCATTVQLHVVQELLETLSIETDEQPESEAVSAEEEVKLMAISQQALNGTESSKSIRLRGWIQGTELLMLVDSGSSHSFIDEEVGRKLTGVEPLQQPLKGHCFKSNFRLLALGGYDIILGMDWLQQHSPMKIDWNQKWLEFNYNQQLIRLMGVAQQTNHCFEISGEQLLGMAKIGAIMYNPELKDEIERQIAEMLDSGVIQHSQSAWSSPALLVRKKDGTWRLCVDYRQLNNVTVKSKYPVPIIEELLDELTGAKWFSKLDLRAGYHQIRMVPGEEHKTAFQTHSGHYEYRVMSFGLTGAPATFQGAMNATLAPVLRRCALVFFDDILIYSPNLQSHLQHLREVLQLLKLDQWQVKLSKCSFAQQEVSYLGHVIGVHGVSTDPTKVQDVLNWAVPKNIKKLRGFLGLAGYYRKFVKGFGVISKPLTYLLRKGVTFQWTEETNEAFNQLKQSLVSAPVLALPDFSKQFVVETDASDTGIGAVLSQEGHPVAFLSKALGPRSRGLSTYEKEYALSRKEKSDDSQIVAISACTPTWLQAVTEGYIKDSFSSQLLAELAVSPSARPHFSLQQGIIRYKGRIWIGDNPSLQQQLINEMHSKPIGGHSGFPVTYRRMKQLFAWKGMKEAVKTQLKQCQICLQAKPERVKYPGLLQPLPVPVGAWQVISMDFIEGLPISERYSCILVIVDKFSKYAHFLPLIHPYTAQSVATTFMKNFYKLHGMPKVIISDRDRIFTSLFWEHLFTKSGTELHMSSSYHPQSDGQTERVNQCLEIFLRCFVHSTPSKWAAWLHLAEFWYNSSYHSAVQRTPFEIIYGFPPNHFGISSEDCINPDLDEWLADRKLMHQLIQQHVHRAQQQMKAYADKNRSFREFKEGDWVYLKLQPYVQSSVARRANHKLSFRYYGPYQVLEKVGTVAYKLKLPSDCHIHPVVHVSQLRAAVGFCPPVQQQLPSPLDTLQVPLQFLDSRVTKKGNKVLTQLLTQWSGMSPADASWEDKEELRARFPLAPAWGQAISQGRENVSIMEEDGRVDQSCDKEEDGVQEEGVNQEGIALKQKRTRKRNPKYEGGVWAA

SEQ ID NO: 164733 - protein, 90 aa, Oryza sativa
  unsure (1)..(90): unsure at all Xaa locations
  Clone ID: PAT_MRT4530_63604C.1.pep
ARAAVVLVHLEPRHRSLSTXSLLLLLPTPQLPHQPQTSASLSLPQXAXXVAGALRXXGXAASAXXIGRXGAXGVAGRLVLFRLGFFFFFF

SEQ ID NO: 164734 - protein, 125 aa, Oryza sativa
  Clone ID: PAT_MRT4530_63605C.1.pep
MTEQILGLLSSRSPLLSPLLLLPPSHCHMAFVCDGHIYEHCRHLSYNILTSSLGPGRSTDMEDEVGTRSGVPGLLVVRCNGGGILARVGEGRGGESRARSLVEERGRARESRDQVPPISLGAFGT

SEQ ID NO: 164735 - protein, 1056 aa, Oryza sativa
  Clone ID: PAT_MRT4530_63606C.1.pep
MAITRLLLQLLALPSTVIFLFLAPASRSIDAGDDLHALLSFRSHIAKDHSDALSSWSVVSNGTSDGTNGFCSWRGVTCSSGARHRRVVSLRVQGLGLVGTISPLVGNLTGLRELDLSDNKLEGEIPPSLARCLALQRLNLSVNFLSGVIPPSIGQLSKLEVLNIRHNNISGYVPSTFANLTALTMFSIADNYVHGQIPSWLGNLTALESFNIAGNMMRGSVPEAISQLTNLEALTISGNGLEGEIPASLFNLSSLKVFNLGSNIISGSLPTDIGLTLPNLRYFIAFYNRLEGQIPASFSNISVLEKFILHRNRFRGRIPPNSGINGQLTVFEVGNNELQATEPRDWEFLTSLANCSNLIYINLQLNNLSGILPNTIANLSLELQSIRLGGNQISGILPKGIGRYAKLTSLEFADNLFNGTIPSDIGKLTNLHELLLFSNGFQGEIPSSIGNMTQLNQLLLSGNYLEGRIPATIGNLSKLTSMDLSSNLLSGQIPEEIIRISSLTEALNLSNNALSGPISPYIGNLVNVGIIDLSSNKLSGQIPSTLGNCLALQFLYLQANLLHGLIPKELNKLRGLEVLDLSNNKFSGPIPEFLESFQLLKNLNLSFNNLSGMVPDKGIFSNASAVSLVSNDMLCGGPMFFHFPPCPFQSSDKPAHRSVVHILIFLIVGAFVFVIVCIATCYCIKRLREKSSKVNQDQGSKFIDEMYQRISYNELNVATGSFSAENLIGRGSFGSVYRGNLTCGSNVITVAVKVLDLHQTRAARSFMSECNALKRIRHRNLVRIITVCDSLDNNGDEFKALVLEFISNGNLDTWLHPSTENTSYIPGKLSLMQRLNIALDVAEALEYLHHHISPSIAHCDIKPSNVLLDKDMTAHIGDFSLARIMSAEAEGQCLGESSSVGIKGTIGYLAPEYGMGTEISREGDIYSYGVLLLEMLTGRRPTDTMFHDDMSLPKYVEMAYPDNLLEIMDNAIPQDGNSQDIVDWFIAPISRIGLACCRDSASQRMRMNEVVKELSGIKESEMCGMINTASLYITWQQERKDALSMHASNSKGFHGV

SEQ ID NO: 164736 - protein, 633 aa, Oryza sativa
  Clone ID: PAT_MRT4530_63607C.1.pep
MAVAVPDHTFNNGYSSKNQIEGRSLSWKRVFVQTDKGSVLGIELERGENAHTVKKKLQLALNIPTEESSLTCGDQLLNNDLSYICNDSPLLLTRNHMHRSCSTPCLSPNGKDVQHCDDSRVIEIVGCTSPSARMKQLVDDIVRGIEKGIEPVAISSGMGGAYYFRDMWGEHAAIVKPTDEEPFGPNNPKGFVGKSLGLPGLKKSVRVGETGSREVAAYLLDHKNFANVPPTMLVKITHSVFHMNEGVDYKTKSSDNKTQAFSKLASLQEFIPHDYDASDHGTSSFPVSAVHRIGILDIRIFNTDRHAGNILVRKLYNDASRFETQTELIPIDHGLCLPESLEDPYFEWIHWPQASIPFSEEDLEYITNLDPIKDAEMLRMELHTIHEASLRVLVLSTTFLKEAAACGFCLSEIGEMMSRQFTRKEEEPSDLEVLCMEARNWVEEREWLLPQADFEGEDDNESTQFDLDSEDDSTTFEASFSNNIRPIKGNSRDPPSKLAEVNEYVDEDDNNEFNKDDVGTCTSPITTWTPSTSNLSISSNELSFSGRRKSHSGVAKNKVTSKINSNSYSGNHSAKEKLPHNSSFAKLSDLSANKWSPFLEKFQDLLQSMFQDRKQTAGRNPWLTQRLGTSCQF

SEQ ID NO: 164737 - protein, 210 aa, Oryza sativa
  Clone ID: PAT_MRT4530_63608C.1.pep
MDAAVAGQHARRRIRPPEPLVMAGSPSTPAAFRCPSSRPRARSPASLPTGATYDRASIQRWLDTGHRTCPATRLPLASTDLVPNLLLRRLIHLHAATLPPSPSPEVVLSQLAAAGGEPAAAEKAVRSLAAKIAPEKGKRASVASAVAADLDSAVPALLSFAKGGAGADARVDAVRILAKVAPELVPYLTGDGTEKRGRVRMAVEALAAVL

SEQ ID NO: 164738 - protein, 118 aa, Oryza sativa
  Clone ID: PAT_MRT4530_63609C.1.pep
SSQSPNHDAVAGWWLADPAAQSGVVAGDDDDGDELEEEENAHSSSSAARAQLLPLPLRQPPCECPPPPALHFACHALGRRYRSACFGRQLCSAAADALLHSAGRSPHHLLRRDELKPR

SEQ ID NO: 164739 - protein, 93 aa, Oryza sativa
  unsure (1)..(93): unsure at all Xaa locations
  Clone ID: PAT_MRT4530_6360C.1.pep
NRRRARRCHLRVREPEGYPVHPFAVGFRPRNPXRRCRFCRAASLRGRAAVRRRIAAAAPPPSAAAPPPSAASPPPSAGVAPPPRHGRRAGLRP

SEQ ID NO: 164740 - protein, 156 aa, Oryza sativa
  Clone ID: PAT_MRT4530_63610C.1.pep
TRHLHACIYSTTGASLMATSGLATHTVHAADLLRKLKITASSACLASLASCRIIAVVIIDFDASISMLRKRAKPSSSSGGSYKQQHEIAFDHGGGGGGAAAISAPKLLVPSSSGEASPEAVLMSPTSTLQTASATSPCSGRTTGAAATAVPFSRRR

SEQ ID NO: 164741 - protein, 351 aa, Oryza sativa
  unsure (1)..(351): unsure at all Xaa locations
  Clone ID: PAT_MRT4530_63611C.1.pep
MVNSVLSSLPTYYMYSLSLPKSIIENIDRARRNCLWRGTDINSSRKSLVLWERVCQPKSRGGLGVINLRLHNNALLLQXLTTXHKFHIGLSIPWVSLIWSTYYINKVPHAIHSYAVSLKDSVSLTSSKSISQRFNLPLSEQAFHEYDTMSAADPLDQLSDENDVWSYVWGNGLFSSKKIYDINFMHIHAPSYLAWIWKSKCAMKVKVFGWLLLIDRLNTYDMLDRRHCPPNNSDLTCVLCSTCARETTFHLFFQCPFSADCWAQFGIVWDISLAFTDMLHQAMNSYRSTHFVEKILYAAWNIWKQRNSLIFQNLAPSISSWKALFKSDLSLLVFRLNVSERRSLLNWLYLL

SEQ ID NO: 164742 - protein, 93 aa, Oryza sativa
  Clone ID: PAT_MRT4530_63612C.1.pep
QPPPQPAPGPPPTHATGPAPPRPGPTQPKPASTGTTRSLGGSQAARRAAGGQAAQQPGNARARKAASRWLASDRPAREDQGGQQPSSSLRKKG

SEQ ID NO: 164743 - protein, 1544 aa, Oryza sativa
  unsure (1)..(1544): unsure at all Xaa locations
  Clone ID: PAT_MRT4530_63613C.1.pep
MPPSPPSGWDFHPGNEIRDQCRRLHGTPVHSSSFYCFHPFKLVVDVPRSTFRLEESSVAIALRACLGGSPAGFFVSHLNDRCYNFCVRDKSVGLWIYNLRSYICRDYHMRFFLWRDGGPNWRFEFRRWESEQLSEWSVVKRKKSMSVKSKSVTVASSSIPISKVFNRFHVHDSSRSCSKFLIASSSDPNSQNPISGPKVSKVVDKPSDPIPKPTPSAGPKPLGSGPFKRFSPRVRKVWVKKSVVKPKSPRLPLSAAAENPFSRESSPSSMANLHPNPLRFIPPGLHLHPAGPHRRRRVDSVNFTPSIMSHEQYVLALVLPPLPEDQSDEHRAEIREFLDQVRNIRVLASFPHPNAVALFQISSPVHRDALVLGEPIAYDAVHEVCFVRHNQGPNWRNAPYNHRGWVMLLDFPLDYVTLHNVKQVISTFGELDWWYDSDTLKGRVLARVWYKDLDSVPQYVVWEQPNAPNGQSWTIYVYTLNGEFADAFPLDDDLPMGEGPVYPNVNFEDVPAWQFGNVQNFDQEENQGWDNWDEGQDNVNDNVDFLPEIPQPTDVLQINSSFASSILAVNSGNDVPVVSGANEILDPVPLAVAPPPSVFLALTDSDAPVKPAKRTYKKRAVGSATPVVATGLRSSKRLLAIFDARKLSFKDDILVEPDPNQGIGKPRGKSVKKLKQVAHEVGLLFSGSSLQESDFMEGVNSADKCRAVRQAVDDSSCSVFCLQETKKESFDTAYVKKLAPKRFDSFSFSPSVGASGVYGPCVDPDRSLFAQWLFDLQIPDNENWILLGDFNFYRSVENKNRAGWDMNDMMIFNNIISNLGLLELPLKGRSYTWSNMQNSPLLEQLDWFFTTVSWTASYPSTLVKPLARSISDHVPCVVQIETSIPKSNLIRFENFWIEHEGFFQLISSIWSNHGTGLDAAKNITSKFKSLRKGLKKWSKGLSKLSSLIANCNLVIAFIDNLEEIRDLTLAEWNLRFIVKRKVLQYLRYKQMYWQKRCTIRWATFGGENTKFFHAAATERLLKXMPTDRAPGPDGFNGCFIKSCXPIIRQDFYTLCAQFXKKSTPERVNDYGPISLQSVALKLLTKVLADRLQSVITELIHQNQYGFIKGRTIQDCLSWSFEYLHQCQQSKREIVLLKLDFEKAFDTIEHSTILDIMRQKGFDSKWLNWIDLIFSSASSSVLLNGVPGRNFYCKRGVRQGDPLSPLLFVLDADLLQSVVNKAYSQGVLTIPIPTPDNDCSQFVQYADDTLLILIASSKELFCLKAILNTYADSTGLKINYSKSCMIPLNVDIEKVQHLSKMFGCSVGTLPFTYLGLPLGTTRPKIIDFAPLVDRVERRLSATSALLSYGDRLTMVNSVLSSLPTYYMCSLSLPKSIIENIDRARRNCLWRGTDINSSRKSLVLWERVCQPKSRGGLGVINLRLHNNALLMKNMHKFYNRLSIPWVSLIWSTYYINKVPHADRPRGSFWWKDVLQFADIFRGLSTCKVGDGKTCLFWDDFWNNKVRSVMYPRIHSYAVSLKDSVSLTSSKSISQRFNLPLSEQAFH

SEQ ID NO: 164744 - protein, 624 aa, Oryza sativa
  Clone ID: PAT_MRT4530_63614C.1.pep
MKRELLIAAPTHEAMRRAHWSEVKLTFDQSDHPTVFARGGELVLVVSPTVYNVKLRRVLIDAIKAPGMKLHPSLPIISVMPGHTWLLDHIELPVAFGDPTNFRIERLDFDVANLNLPYKAVLGRLALVKFMAATHYAYHHMKIPGPNGPTTICGDPEEAGGAPEASTSRASKKRITSGDEVPIKEITLGGDLSKTAKIGGNLDTKYEDALVSFLRTNSNIFAWKPSDMPRVRREVIEHRLAVRRGAQPIWQKVQRQALEQQAIIREGVTWLLEVGFIREVIHPEWLANPVVVPKANSKLRMCIDYTDLNKACPKDPFPLPRIDQIVHSTAGCDLLCFLDAYLGYHQIRMAREDEEKTTFITPVGTFCYTTMPFGLNNAGPTFQRMTRINLSNQIARNVEAYVDDLVGGGPETTTGEQEALVSGPEATRTNAEGSPPGPTGDERPEAGTPDDKDRPRRKVQRPIYFVSEALRKPCHYFQAHWVSVVTSYPLGQIQHNREGTGQIVKWAIELAEFDLLFEPRHAIKSQVLADFIVEWTPADDSDLPSDPFLSEGTGAGVMLTSPSGDVLKYVVRLDFRATNNMAEYEGLLAGLRATAGMGICRLLVLGDFQLVVNQFSKEYQCTDS

SEQ ID NO: 164745 - protein, 308 aa, Oryza sativa
  Clone ID: PAT_MRT4530_63615C.1.pep
MRGGIKTTCAGAGTDADVRASPGNLTDVDADHLSPPLPTIVANAGSASPATRCPHRHRIGYLIIRHQSRCWIRCEGGAPLALDPLGAAPPEAAEPPPPQRREIIELTRDIEASTQLFIWAIKEAKPPPPPPVSRESGSMARDMRSTSRIGVSWSGVAAPLMFLPNEAEEVQVASTSVEKSVAKLMDGDTDNTARRAPGRELAVRARAAVGRASPSRSCTSPSRPRACRRGWAARPAEGSAAAARRAVAAVRRGEENLGRPSPFAADHRSSAVAVKPSRRRRPLRRRPSSFVVCRCGEYRWVRLVVLYA

SEQ ID NO: 164746 - protein, 305 aa, Oryza sativa
  Clone ID: PAT_MRT4530_63616C.1.pep
MGCSAGIIAIDLAKHLLQVHAETYALVVSTENITLNAYMGNYRPMLVTNTLFRMGGAAVLLSNRRAERRRAKYQLMHTVRTHRGGASDRSYACVTQEEDGAGNVGVSLSKELMSVAGDALRTNITTLGPLVLPLSEQLRFLATVVLRRVFGHAAGVKPYLPDFTAALDHFCIHAGGRGVLDELERSLKLSAWHMEPSRMTLYRFGNTSSSSLWYELSYCEAKGRIRRGDRVWQIAFGSGFKCNSAVWKALRTVDGGAGRDAGAWAQDIDALPVHVPKVVPIVDDDDGANGGDGDRHDAASHVRPE

SEQ ID NO: 164747 - protein, 72 aa, Oryza sativa
  Clone ID: PAT_MRT4530_63617C.1.pep
MAIWPDGPAQGPVIWPSPTQVVPVPARLDSRVVPGLLPRHAGPARPGTKFRDAKQTYFQPYVRHGTKNREEK

SEQ ID NO: 164748 - protein, 131 aa, Oryza sativa
  Clone ID: PAT_MRT4530_63618C.1.pep
MSTKTVPEPEPHVLAVDDSIVDRTVISRLLRSSKYRVTTVDSGKRALEVLSLDRNVHMIITDYCMPEMTGFDLLKRVKESAELKEIPVVLMSSENSPTRIRRCLEEGAEDFLIKPVRPSDVSRLCNRVIMK

SEQ ID NO: 164749 - protein, 73 aa, Oryza sativa
  Clone ID: PAT_MRT4530_63619C.1.pep
FRRTAEHQHLEAEPARRALRWCATNARWWAPATKAENAQAEIEPTSYTRLPTPPDRTIFLIVKNMVHNINDLT

SEQ ID NO: 164750 - protein, 328 aa, Oryza sativa
  Clone ID: PAT_MRT4530_6361C.1.pep
MVLPVLAPLAGATAVAFLLFKFATVDGDFTLVSRGAPRREKVDGKVVWITGASRGIGEVLAMQFASLGAKLILSARNKEELERVKHNIINKHPNSRVEVLPMDLSSGEESLKEHVHEAESLFSNAGVDYMIHNAAFERPKRRALEDTEHGLKATFDVNVFGTITLTRLLAPSMMDRGMGHFVVMSSAAGKVPSPGQALYSASKHALNGYFSSLRSELCTKGIKVTVVCPGPIEAPQSSGATSSSQKPSSEKRVPVERCAELTIVAATHGLKEAWISYQPVLGVMYLVQYMPTVGLWLMDKVGAKRLDVAAKKGNAYGWNLLFGGKKSA

SEQ ID NO: 164751 - protein, 98 aa, Oryza sativa
  Clone ID: PAT_MRT4530_63620C.1.pep
ERDGGGRKDGDGGAAAGSLAGARVHRQVRARPSSGSSVVPFALPPFAGDGRRQEGELKLLGTWASPYVSRVKLALHLKGLSYEYVVEEDHFNNKSELL

SEQ ID NO: 164752 - protein, 723 aa, Oryza sativa
  unsure (1)..(723): unsure at all Xaa locations
  Clone ID: PAT_MRT4530_63621C.1.pep
TAPRRGGRRCGGAWPRGVRFGDMVWGKVKSHPWWPGHVYSITLTSDGEVRRGYRDGLVLVAFFGDSSYGWFEPHELLPFEEHFREKFAQPGGRNFPTAIDEAADEVARRAALAFLCPCHRPNAARPHELDPRYLLVDVPGFDTDAEYHPEQVAAEREKIDPRALLDYLKGAAVEQLDAAELIGKPKRHIPAVQMSSMLEAYRLSRYALKDPTYAQAFGMDYDEAQAAKTALEKKAREGIXLACPILLTESHGSLERRGEPMGVGEASQNMLLLRXDIWWPMSETDASICAVQEQSTGEFCPAVSVGLSPCLGLNKKALEAXTPKMDQPILASLLFSLSNXSALDNDQLTKKKPSMPDAFPAAPMAXRSRRRPAGVPFRSPDAAAPQQHPRRRRGVLAAEAHSTAAAVRATHPARASSRRRRAGRRRRRAHXAATAAAAPKKATKPKKAAARKREREEPADAAAAAAAGGVAGEPKKKKKKKLAPGLLPAKVDHDLKQVISELQSLPLVASYVAGRRSISDEARSFLLAFRSKSFKKSLSPMPPPPPTARSRRRRRSRPXRPGDTTAASAKVAGVKRAPSDRQEELATKKKAKLNKIKTLATDKKAAGLELAAAAPAAARKNDAIAARKKEKDPRSGSGDLKXINTTXLMMKFPPKSSLQSVASLKARVARSGRSTSTAFAFNWSSTWCRVIYRFKVDADVVLKYARANNTMVRQGGPTTTSAV

SEQ ID NO: 164753 - protein, 193 aa, Oryza sativa
  Clone ID: PAT_MRT4530_63622C.1.pep
SLTKLAPSSSPSAPSLSRRAMRTIHPRTTRPLSPMPPPPPTARSRRRRRSRPRGPATPPPPPPRLPASSAPRLIARRSLPPRRKPSSTRSTRSPLTRRPPVWSSPARRLRRRGRMMRSLARKKEKEPALAPAIKTPIATALMEVPPKTTLPSVASLKARFARFGPLNVDGIRVYWKSTCAASSTGSSPTPTSR

SEQ ID NO: 164754 - protein, 213 aa, Oryza sativa
  Clone ID: PAT_MRT4530_63623C.1.pep
MALCIRRAMPERALHVKNTARDAPVATPALLLPPPLLCCSSSEAAKRPITLLDGFSELLAPLEQRAALDGAPDPEQQHLQPLQLLVCGSWRLQPPPNGGYRPVSDLADHRGIQSLLLGCPLLWKLGRAESLLAVGGGLCGLHTPGWFRWAATEHVESDPVPRPLVGRWKRLRETYGPLFADVMYSTHGLTMGHGANQQENETLLIQTSQAQER

SEQ ID NO: 164755 - protein, 50 aa, Oryza sativa
  Clone ID: PAT_MRT4530_63624C.1.pep
VPFFLLSTSFSHYVSLLLLFSVLVHSGGVHGGHYYAFIRPTLSDQWLVFL

SEQ ID NO: 164756 - protein, 578 aa, Oryza sativa
  unsure (1)..(578): unsure at all Xaa locations
  Clone ID: PAT_MRT4530_63625C.1.pep
MEGCSELQEEDKEDLIKEIFKEEVLAVVKEMRKNWDPGPDGFPXEFYEHFWGLISADLMKVILDFQQGLIDIKPELWCDNLVSKTHLQIXKYRPICLLNVSFKIITKVLMMRLVTIIQYLIAKNQTSFIKNRNIMEGVLVLHESLNSLHQKKQSGLLFKVDFEKAYDKVNWSFIFQVLKAKKFPDKWCDWIMKTVRGDKVAIKINDXIGPYSTYKGLRQGDPMSPLLFNLAVEALTMMVQRAEQKQLIQGLEINNECSIPILHXQYADDKIFLLRDKLEDAKNLKNILCLFEQLSGLKINFNKSEVIFLGNDVLRHQEYSKIFTCNKDQGGMVLLDLDIMNKALLGKWLWPLENTDGIWQQLLREKYLIKKILANKKLKNGDSHFWQGMIDIKEAFMQFIRKKPGDGKNILFWEDNWLGGRPIAEQIPQVYSVTHSKNITLAMVKEKGWQSIVFRRNLTGDRLRSWNXIKQSYKDVIISNCLYKKDXTKNGEYTLKTFYTFLKIQDMIHWIQGKDKTTSQLILVGVAAVLWSIWKHRNNACFSQIYPIDPTEIIFCACYWISTWAVLTCERLFVLDVA

SEQ ID NO: 164757 - protein, 85 aa, Oryza sativa
  Clone ID: PAT_MRT4530_63626C.1.pep
QKQSIGITQVLTYRAKSVQQVHPCQAGEARPKGAHLKRRLGFPNMTSLYQLFLTNRTLQLMSRKQLTEKADIVRFTNRKPRVVDV

SEQ ID NO: 164758 - protein, 337 aa, Oryza sativa
  unsure (1)..(337): unsure at all Xaa locations
  Clone ID: PAT_MRT4530_63627C.1.pep
IIAFHCYYIFYLLSSTYILLGCIVLTLAIVASRPXRYHEPTIGCTVSSVADKTLVRHIWLRTLDCLHNXILIDITSNGSTFVVSENNQGNEEHKXKGVNKNGLVIATCINEKCLIDQVPIIFEDENKGNNNGATFTQNIIVMXCMSTTYATTEQLIVKIIDEIHLSQDNLLAVSGDKKELCDVSLISMPQLVNKHVKSIIEPPCVVFKHIIRVAREKEDLRLLSFLNTWGYIQFDDLCPLNCLDKKLFFSCLNELQVGLQEGECCGSPSLISESNHMAIKKSTSPYVVIDMDKFNRLKXNVKPRTVSNQRGEDDEDITRSDKTMAILYIHKSKVHAF

SEQ ID NO: 164759 - protein, 147 aa, Oryza sativa
  Clone ID: PAT_MRT4530_63628C.1.pep
YPRPAALPPSPLPPPAISGREGRDPPPGIASAWNRAATPSPLTAEPPTPPPPSAPPPPRAAAATTLWLALKVSSVKIGPLTRAICKNKGILLGSATPNLLCCRIAGLIRKIPGSPPVSLSTRAAASACAFVFLSPSHSAKALSREAR

SEQ ID NO: 164760 - protein, 145 aa, Oryza sativa
  Clone ID: PAT_MRT4530_63629C.1.pep
MPPRCPPSTATAPRAHLPEPLALPHHFLTRGRRRLGSVCRRCLLPSPATTPPSTNEELLSFLGSSVGIEKLFGQPPLQPSTAREDRAGAEVGRRGASRRSARPSLPPCSHLLLSRRLPLLFRTGRAQAVGGTDEGPFLQQELLKS

SEQ ID NO: 164761 - protein, 412 aa, Oryza sativa
  Clone ID: PAT_MRT4530_6362C.1.pep
MKPGLLKSRRSSAGDEEEGSGGSGGLPTATRKEWCWSLGILLKAVAALLILMAGVLIGLATSASLSCYYVEGSGKQAEARRGDGGGGEGGSRCRDDGCGAALSFQRFVQPHPPWGHSMKDEELFWRASMAPRVEEYPYQRVPKVAFLFLTRGPLPFAPLWERFFHGHEGLYSVYVHALPEYRLNVSSSSPFHGRQIPSGDVSWGSITLVDAEKRLLANALLDFSNERFVLASESCVPVFNFPTVYEYLVNSAQSYVESYNIDVPQCAGRYNPRMAPDVLEEQWRKGSEWFEMSRDLAADIVADRKYHAIFRKHCTPSCYPDEHYIPTYLHLRHGARNANRTVTWVDWSRGGPHPARFGKATVTPAFVQAIRNNGTRCAYNGKPTTVCYLFARKFAPSALGPLLNMSTTLLEF

SEQ ID NO: 164762 - protein, 158 aa, Oryza sativa
  Clone ID: PAT_MRT4530_63630C.1.pep
KTLTSAIPTPRRPPDLSHAHAALPTPPRRPPSPCHRAARRLPPPPRARTCRSRSLYPTTSSHAAVAASDLCVAAVYSPAPRLLRRPRFVAVARRPWPHSRVIPHPYIPVAPPRHIQITTTIPPERRAALLSRLLRWDREAIRTTSTPTKHRQRGQSWG

SEQ ID NO: 164763 - protein, 154 aa, Oryza sativa
  Clone ID: PAT_MRT4530_63631C.1.pep
MAAAAMVFLVFAPCLAQAEERPTAAHPHGLPFESPLALSPDAYEFFHPSERARRGHAAGAAPALSPRAAPRGQLRESAASVARADQEEGGVAPARKVGRGCARAGTVAGVVAGAAAVAAFAALAVAYAVARRRVGVAAHGDAEACARAAPKTSA

SEQ ID NO: 164764 - protein, 88 aa, Oryza sativa
  Clone ID: PAT_MRT4530_63632C.1.pep
RRRPPLLAPARAAPPAPRPSPPAGSVARRRHSARTPFALLRPPPPPPPPPPTPRSPPPTSLGFAGTLRSCGHRFGEGAAVGWTSSLVA

SEQ ID NO: 164765 - protein, 52 aa, Oryza sativa
  Clone ID: PAT_MRT4530_63633C.1.pep
VKRSNEVVINYISLIHSARRLKYDVEKVTTKKETILKSNVRHAKTILLANAS

SEQ ID NO: 164766 - protein, 106 aa, Oryza sativa
  Clone ID: PAT_MRT4530_63634C.1.pep
MDDAGEICSFSRSSSSAREDDEEDQRWAALEKLPTYDRARTALLAMPPDGELREVNVQRLAAVERRALLQRVAGVGDDHARFLAKFKERVDRGKGRHNILLEHYYT

SEQ ID NO: 164767 - protein, 139 aa, Oryza sativa
  Clone ID: PAT_MRT4530_63635C.1.pep
MQIFVKTLTGKTITLEVESSDTIDNVKAKIQDKEGIPPDQQRLIFAGKQLEDGRTLADYNIQKESTLHLVLRLRGGGRPGYPMIEPNLLALARSKMEKKMICRKCYARLPYKATNCRKKKCGHTNELRPKKKLVSKLSV

SEQ ID NO: 164768 - protein, 69 aa, Oryza sativa
  Clone ID: PAT_MRT4530_63636C.1.pep
HSTIALPALLTGTKCYVDVATQPDNTPQMNKDAGLGISITNTHNNHPIRLIYRELSGMSSWQKRQLHLI

SEQ ID NO: 164769 - protein, 681 aa, Oryza sativa
  unsure (1)..(681): unsure at all Xaa locations
  Clone ID: PAT_MRT4530_63637C.1.pep
MTPTLIDISMITGLDVTSSANAMGLNTKNQYDFKTKSIGGWSGYVAAYMGQDSITPREHVAFLLMWLEKFLFCGSSCGPTTNWQFVTEALETKRQFPLGKILLGYLYQMLNNASAKLAVGSVVGAGGPWWLLQSWLNLVVMKVVNRPSVTEAEFPRLEPITDDDGEEHTHRRCMSYGEYASTPADAGAKLSAELLKDWFCSFYEGIQKDARXLWFLYGDSTDLELPXDFRFEDINHERYQKSREVFTVAITPCILPVGIHQGRNIQXFGMGQLPIGLFFADKIQCRGEISSTLMMDRLLNLQGPPLGSIDNIKLATFRSKTTESSPPHQSNSGKDIEYAPGLIPNGGGPSPPVIGYNAPKTSALLQGLIREPADAGKKRKTRSSAVNISALAPKKKTKTKKTTPADDLPALDPSIEQALDEEVIEDDVDEAAAEKKKTAMKKKSAATTSKPAPPVLADFFSFEIRDYLDEREEDTISKALAPLSDDVKKVLEDISHRLEASSLDSLVVDCGSVKTRLHEIQALIPDELADILTPAVYLEQHQFKLEKAKLRLAERRERKDIEATIQANRQLVHEEKSKLDQLSEGPIKSNIDRLKARKIELLAQLEECNAELDIEHKKLADLPKSIEEQKARLKSAIKHVADLTKSLKVIPVTDAQDAQAIEEVEQIRRKSISAIQRYLSQ

SEQ ID NO: 164770 - protein, 52 aa, Oryza sativa
  Clone ID: PAT_MRT4530_63638C.1.pep
MAIDKKTENTSSNHPGHYKQATRRRTHDVRDEQPSSIASGSASPAPTTATEE

SEQ ID NO: 164771 - protein, 34 aa, Oryza sativa
  Clone ID: PAT_MRT4530_63639C.1.pep
RPGPAHGVRSASYTIPAPSWTASPPRTRSTRICP

SEQ ID NO: 164772 - protein, 110 aa, Oryza sativa
  Clone ID: PAT_MRT4530_6363C.1.pep
CWSPLLYLTRVHGKVLLRTEANITLPSSMSLRRHHLAVKWEDGHLCICYLTLYIMGLLYSCYALSGQFILWSVAMLFLSERLSIQSIVWSLNYCMGTYYLFYRIKGMEFL

SEQ ID NO: 164773 - protein, 138 aa, Oryza sativa
  Clone ID: PAT_MRT4530_63640C.1.pep
MSLVGVGGIHPARTCPRDYNTVSIVITKSHLKEAESKLEGTKSNLDITRFNNPHRHPPPPHATLSCSGPTLHRPPFTGLTLPDPTMDGPYLGGATSNFLIVSLPPTDATSSREKEHPPSFRRHHLNHPTYRHGPLGRR

SEQ ID NO: 164774 - protein, 98 aa, Oryza sativa
  Clone ID: PAT_MRT4530_63641C.1.pep
RGIRKGPPPGRLGAPRPRVGAGEREAAATTVREEARGGEERVRVGDAAAAATAVAAGLLGGQPPRGDGTIGGLAHQQHLSGGRWRCRRRRRRVEIFTG

SEQ ID NO: 164775 - protein, 122 aa, Oryza sativa
  Clone ID: PAT_MRT4530_63642C.1.pep
QSPSQVPRRRSSFPSPARGGRGRWLDPRNEEGISSSGQSWDSVGERGQRVRANALEHFPTARLHHNEGRTTACFQCLLSCSVSPWPSSSTSATASNSSAPAVSWPASSCTSSFSSLAMFHHR

SEQ ID NO: 164776 - protein, 37 aa, Oryza sativa
  Clone ID: PAT_MRT4530_63643C.1.pep
LATVKPHHIIIGRAYTHMRGDFYFQYTQRHSFKNVCL

SEQ ID NO: 164777 - protein, 59 aa, Oryza sativa
  Clone ID: PAT_MRT4530_63644C.1.pep
WGTRNKSVRLFMRLDFLKLAFYLASHPSKTRRPDDVSYQFSRILQLGHKCTMDVNVLIL

SEQ ID NO: 164778 - protein, 304 aa, Oryza sativa
  Clone ID: PAT_MRT4530_63645C.1.pep
MAEHLASIFGTEKDRVNCPFYFKIGACRHGDRCSRLHNRPTVSPTIVLANMYQRPDMITPGVDAQGQPIDPEKMQEHFEDFYEDIYEELSKFGEVETLNVCDNLADHMIGNVYVQFREEEQAVAAHNALQGRFYSGRPIIVEYSPVTDFREATCRQFEENSCNRGGYCNFMHVKQIGRELRRKLYGGRSRRSHGRSRSPSPRHRRGNRDRDDFRRERDGYRGGGDGYRGGGGGGGGDGYRGGDSYRGGGGGGRRGGGSRYDRYDDGGRRRHGSPPRRARSPVRESSEERRAKIEQWNREREEKP

SEQ ID NO: 164779 - protein, 149 aa, Oryza sativa
  unsure (1)..(149): unsure at all Xaa locations
  Clone ID: PAT_MRT4530_63646C.1.pep
XGGXXRXXCSPXXXXXXKREXXSKXXXXNXXGXXXEXRGXGXXXXXXXGRXXXXXXGIXXKMKXXXXXXHSXXKKKKGXGXPXXKTPXGRGEXXKAKXGGSRVXPVXTXXNXGPXNCNXXHYXGXGNRAPPGVFFFFXSTXVXHNIISQ

SEQ ID NO: 164780 - protein, 301 aa, Oryza sativa
  Clone ID: PAT_MRT4530_63647C.1.pep
MRAAAAPDPSPAPARSMLKRLFDRQLLRVSPAERIVAVGGGEKDEVEPSSVCLDGMVRSFLEDGSGVGAAVERAGGHGARRCNCFHGGGSSDDDDDEDDAAASSDVAETIKGLVHCATLRERNLLADVCGHVERHRAGGARRRELLGLVAASLRAAGHDAAVCVSRWDKSPTHPAGEHAYVDVLLPPASDRGARERVLVDVDFRSAFEVARPTKAYRALLQRLPAVFVGKDDRLRLLVAASADAARASLRKRGLHLPPWRKPEYMRAKWLSPYDREPAPPDEASASAAAAEVAGEEAPAAA

SEQ ID NO: 164781 - protein, 494 aa, Oryza sativa
  Clone ID: PAT_MRT4530_63648C.1.pep
MLRAAATAALRRLPQSQAPRRQARGLQYASPERRPLDGARWALYARLSAHLPSGGMVEELGRWLRERRPLSEEQVLFCVRRFRKFKQNKHALQLMDWMEARGVNLELKHHALRLDLVSKLNGIHAAEEYFGSLPDIFRSKQTYSTLLNCYAEHRMAEKGLELYENMKAMNIVSDILVYNNLMCLYLKTDQPEKIPTTVVKMQESGIQPNKFSYFVLTESYIMMNDIESAEKVLKELQEVNSVPWSLYATLANGYNKLQQFDKAEFTLKKAEEVLDKHDVFSWHCLLSHYANSGNLSEVKRIWESLKSAFKKCTNRSYLVMLKALKKLDDFDTLQQIFQEWESSHEHYDMKIPNIIIQAYLDKGMVDKAEAMRQTTMAQDHSNYRTFCIFAEFYLEKSKMNEALQVWKDAKKMVKGQDWVPEKLVNRYLKHFEDSKDVDGMETFCECLKNLGRLDAEAYEALIRTYISVGRTNPSIPQRMEVDRVDIRPEMFESL

SEQ ID NO: 164782 - protein, 158 aa, Oryza sativa
  unsure (1)..(158): unsure at all Xaa locations
  Clone ID: PAT_MRT4530_63649C.1.pep
CGGGIGSGAGGWGRERSGREEAVAGXGAGGGASRVCGRRLFRVGGKGGRRAKVEDXSDARWRRXIGEGGGGLXGGRWAWLVRRRRDGGARXATQGGGRRTRRGERSGHGEERARDXEERSRDVEEIDAIGYGNRMVEIMHVCKMRLLCQESRPPLRTF

SEQ ID NO: 164783 - protein, 104 aa, Oryza sativa
  unsure (1)..(104): unsure at all Xaa locations
  Clone ID: PAT_MRT4530_6364C.1.pep
LYIISVKGIKGRVNRVLXAWVGDMVMAPVKKGKPALRKKVMPAVIVPKGKLWGPKDGVFMYFENKAGGIVNPKGEMKGFSIPGPLGKEGPPLWPRIASPPKALV

SEQ ID NO: 164784 - protein, 378 aa, Oryza sativa
  Clone ID: PAT_MRT4530_63650C.1.pep
MSSSASSTPRAGGGGSGGSQHTPPLPPAPHGNGHGGGGGGGGGGGGAHVRLMCSFGGRILPRPGDHQLRYVGGETRIVSVPRAATFDALVAALAKVAPALFPAGGPSPALRYQLPQDDLDALISITSDDDVDNLIEEIDRFQGLAAASIKPPRLRLFLFASSPADHASAAAFGSVLSGAGGDSSSDQWFVDALNAPAPAPIERGRSEASSIISEVPDYLFGLDTTSDEPSPGPGGARPKVDTEMAHVEDDAPVLSRGTPPAPYVTESAPWPAPPPPYMTQQVYYVPVRPVHYLDPSSQGGYMPGPVYHIVGGGGSEARGDLYSTGGSVSAAAGVGGVYGVPHPMQPFPPMMYGHAPPPGAVVYSSEGKPPMEGGAHAS

SEQ ID NO: 164785 - protein, 46 aa, Oryza sativa
  Clone ID: PAT_MRT4530_63651C.1.pep
QSTLKTTHMCVACVCAASCSGKAMCYLLINQLVSSTTMRVSAFRIK

SEQ ID NO: 164786 - protein, 198 aa, Oryza sativa
  Clone ID: PAT_MRT4530_63652C.1.pep
GCGYANAVYFHSGLGAALNPSPSAPFNKYVNEEYVASFADVVYSKPNIAVVADGAGAQSLSKWVDQFFKGVPAAARSGQTLKTEATKYFGGEQRTSHASGNSVVIAFPGSDSAGSKPEIEVLATLLGAQPTIKWAPGFSLLSKATAGTPGVSVASANQAYSDAGLLTVQLTGAAASVRKAAEETVKALKNIAAGTVSK

SEQ ID NO: 164787 - protein, 297 aa, Oryza sativa
  Clone ID: PAT_MRT4530_63653C.1.pep
MFLPFIARQMACSHLAAAAAAASPPAARSPTAYSAATASAFARLSAMPRVASGGLAVRGRGGVAAVVAAAAGAAAATPVADIEERRATEKQPIIVIDNYDSFTYNLCQYMGELGLNFEVYRNDELTIEDVKRKNPRGILISPGPGEPQDSGISLQTVLELGPTIPIFGVCMGLQCIGEAFGGKIIRAPSGVMHGKSSPVRYDEELGKALFNGLPNPFTAARYHSLVIEQETFPHDALEATAWTEDGLIMAARHKKYRHIQGVQFHPESIITPEGKRIILNFVRFIEELEKQRAGEKN

SEQ ID NO: 164788 - protein, 129 aa, Oryza sativa
  Clone ID: PAT_MRT4530_63654C.1.pep
GEMMEAGLEPDNTTYTMVIDAFCRKGDVKTGLRLLKEMQNKGRKPGVVTYNVIMNGFCKLGQMKNADMLLNAMINIGVSPDDITYNILLDGHCKHGKVTDIEELKSAKGTVPDLGVYTSIVGEIVKKKT

SEQ ID NO: 164789 - protein, 88 aa, Oryza sativa
  unsure (1)..(88): unsure at all Xaa locations
  Clone ID: PAT_MRT4530_63655C.1.pep
KPAATPPPSSSSSSDHPPPPXPXSPPSXPAXTTASPPPQPPPYPXRSTSXAAPPSXVXPXXPAPAMEPXERRPRDPPTLRSSPPSLSS

SEQ ID NO: 164790 - protein, 218 aa, Oryza sativa
  unsure (1)..(218): unsure at all Xaa locations
  Clone ID: PAT_MRT4530_63656C.1.pep
MASYGSAAYGDGDGEKPSAQLGQPLLPPPNQPYYAFPAAAYAPPPPPPPPPPPPTXGVRPGHLPGPRPPPPPPPAPRPLPPRVLRPHAPAPPLPRAPRRPRLPPLPVRARRPRRGAPPRPLPRQPAPAPVRRSPPRAPPPRPQPRPRPPAPIPXPCPPPSPTAATSSAPPPRAPDPASSVPEGRRTPTPRCGWTPGGSWMTSSTSSGTSPRGPCRWRS

SEQ ID NO: 164791 - protein, 66 aa, Oryza sativa
  unsure (1)..(66): unsure at all Xaa locations
  Clone ID: PAT_MRT4530_63657C.1.pep
YSSILTRXGYKRDGLSPVIYSNALIPQGRFGSLVGTMSVTATVRDRRLQIKLAKHQILDLAGWLSS

SEQ ID NO: 164792 - protein, 90 aa, Oryza sativa
  Clone ID: PAT_MRT4530_63658C.1.pep
IPQEHVSTRAYSYLSRDMSSKVATACAYKPQPLTDSIGISTVWSFFLTVSSSIVPTRRALMSTSLRSVLVAISALYAPNTPPQSGPGFMV

SEQ ID NO: 164793 - protein, 81 aa, Oryza sativa
  Clone ID: PAT_MRT4530_63659C.1.pep
GSRCFWSLPVVETVHRALTLAASTTRVRSTWNASSSSNSHQTRMIPACTASCIGVSIRLTTCANSSLISALSSHSELVYFL

SEQ ID NO: 164794 - protein, 321 aa, Oryza sativa
  Clone ID: PAT_MRT4530_6365C.1.pep
MNLIVSWKEQEADQFPLLLVRCMVMWMDQCRREKSGAMGALCGLGSHFSTASSCQRLPGKVAVITGAASGIGKATAAEFIRNGAKVILADIQDDLGRAVAAELGPDAAYTRCDVTDEAQIAAAVDLAVARHGRLDILYSNAGISGSSAPAPLASLDLADFDRVMAANARSAVAAVKHAARVMVPRRGGCVLCTGSTTGMLGGLAALPYSLSKAAVVGVVRLAAAELARSGVRVNAISPHAIATPLLVRSLARMNPGVSDEQLKEMVERGMSELHGAVLELEDVARAAVYLASDEAKFVTGQNHVIDGGFTVGKPMDMRVPR

SEQ ID NO: 164795 - protein, 136 aa, Oryza sativa
  Clone ID: PAT_MRT4530_63660C.1.pep
IIPQPNVVFKKPRPEGCPNFLFKAKANSLGSPLAGKNPKFRPTPGEGIAKASRKSREQARTLKKKKGKKPGAFPPKKKQQTHPGFSKKSENEALKGGPNEKGKGDQKKKAPKDVKLWGGFVLSLRSPKKRPPLFWS

SEQ ID NO: 164796 - protein, 55 aa, Oryza sativa
  Clone ID: PAT_MRT4530_63661C.1.pep
NLVDKITVDLGPGLFKFLKQKHLEFFHLRVFLFKGPKKVFYPQTHYLQLLEPFLL

SEQ ID NO: 164797 - protein, 361 aa, Oryza sativa
  Clone ID: PAT_MRT4530_63662C.1.pep
MAASDSDSDADAAAAAAASLLPAPIHLLPPDALHNVLLRLPLRDAVVCRPVSRLFHETLSHNFLALLPSLRLLLLRHPRPEGGGCLHAFDPDRRHWLRLPFSAFLPNHFLPPLGSAWARHGTVLAGPGGVVLVLTELAALSYTPSGSGKWMKHPLSLPSKPRSPILASGAAAVFALCDVGTPWRSQWKLFSCPLSMLTGGWAPVERSAWGDVFEILKRPRLLAGAGGRRVLMIGGLRSSFAIDAPCSTVLILRLDLATMEWDEAGRMPPNMYRCFTGLCEAAAQGNAMPTAVAGGNNKVKVFGGDGKVWFAGKRVRGKLAMWEEDELGNSGGKWDWVDGVPGYSDGVYRGFVFDGGFTAMP

SEQ ID NO: 164798 - protein, 415 aa, Oryza sativa
  Clone ID: PAT_MRT4530_63663C.1.pep
MAASDSDSDSDSDADAAASLLPAPIHLLPPDALHNVLLRLPLRDAVVCRPVSRLFHETLSHNFLALLPSLRLLLLRHPRPDGGGCLHAFDPDRRHWLRLPFSAFLPNQSFSPVASSPSLLYLWLESPSPSPPSLPSSSSSTASTAHPPKSLAVCNPFAGTYSFLPPLGSAWARHGTVLAGPGGVVLVLTELAALSYTPSGSGKWMKHPLSLPSKPRSPILASGAAAVFALCDVGTPWRSQWKLFSCPLSMLTGGWAPVERSAWGDVFEILKRPRLLAGAGGRRVLMIGGLRSSFAIDAPCSTVLILRLDLATMEWDEAGRMPPNMYRCFTGLCEAAAQGNAMPTAVAGGNNKVKVFGGDGKVWFAGKRVRGKLAMWEEDELGNSGGKWDWVDGVPGYSDGVYRGFVFDGGFTAMP

SEQ ID NO: 164799 - protein, 40 aa, Oryza sativa
  Clone ID: PAT_MRT4530_63664C.1.pep
ENRHPGTVQQSHQIQYRCGIPTGIVAEATSCLINRINTRV

SEQ ID NO: 164800 - protein, 167 aa, Oryza sativa
  Clone ID: PAT_MRT4530_63665C.1.pep
MIKLRYSKRLFRRSSSKGSTDSSSSSSSSSDGDVGGRSGGGGSGEIEWEVRPGGMLVQKRDGRGGVEVITVRVATGFSWHDVSIGATCTFGELKTVVSIVTGLEPREQRLLFRGKEREDSDHLHMVGVRDKDKVLLLEDPALKDMKLRAALAARATVQSPYQPFIQV

SEQ ID NO: 164801 - protein, 617 aa, Oryza sativa
  Clone ID: PAT_MRT4530_63666C.1.pep
MASPPSPLEAIARLLADLARRRSHPPPGGGRSGDSLAASVSSLAAALNPHGGGASSSSSSGTRVLDAVLSLMCFDPMEVDRARVDCLVRTTVSALSASVSCRVDHIDGAEMLTVGSSVAPGDCRELVHSCAALLEKLGDPDVADHSYDLLYAVVKAALLSPRYLCLFPLPYYREDEDSTCDMGTISSVLTRHPTYQVLPNDYTIPLRGLGAVLELQTAVVSSVLDVLFEPMAWGISMELGQKLPFSYDYFPHQHVDLLAILTGPLSCRKFVDLTSYIDSQSHASKGSVKYNSSWSMIVNFPLWFNFATALLFHREGSHGYLSEALSMEIISESIRDVNLAHRAAMYLSWVLCPSNEDQRQILAGNILELSHSWARNNKKGPSHVHHTSTVNHRRKLRIPTVGDTEKLHLSTNPVSSLIKEFDDRCVKFCSKTANSQVQDEELSDLPIHFNFLHLWIPLGILLVSSSFVNDQDCDMLLHYSSTGQVLESNEVQRKTKDHICNDSFSASCKGFTETWASAGASLVFRWLDLIINMSAVIFEREDICDHFVSQLKSKTNPYLLKCLYSLLEVLDEASQRDFLVDLHDRLLNWNKKGQSFDGFEAFEDIILRMNKKFHFRT

SEQ ID NO: 164802 - protein, 232 aa, Oryza sativa
  Clone ID: PAT_MRT4530_63667C.1.pep
MAAAASTLASLSATAAAAAGKRLLLSSPSRSLSLSLASRGRIAVMPHLRAGILSAAPRRAVSASAPAAATIAVGDKLPDATLSYFDSPDGELKTVTVRDLTAGKKVVLFAVPGAFTPTCTQKHVPGFVAKAGELRAKGVDAVACVSVNDAFVMRAWKESLGVGDEVLLLSDGNGELARAMGVELDLSDKPAGLGVRSRRYALLAEDGVVKVLNLEEGGAFTTSSAEEMLKAL

SEQ ID NO: 164803 - protein, 93 aa, Oryza sativa
  Clone ID: PAT_MRT4530_63668C.1.pep
QVINLRSIRPLDRATINASVRKTNRLVTLEEGFPQHGVGAEICMSVVEDSFEYLDAPVERIAGADVPMPYAANLERMAVPQVLTAAALFEQEL

SEQ ID NO: 164804 - protein, 78 aa, Oryza sativa
  Clone ID: PAT_MRT4530_63669C.1.pep
WLRRRMAAAHLDSGCLGSLTKLKSIPCDSWSGWLVPTIRRMTQWANKLRVTSAHTEIDEDGTHGGLHQQAALGAGSDW

SEQ ID NO: 164805 - protein, 1792 aa, Oryza sativa
  Clone ID: PAT_MRT4530_6366C.1.pep
MRGEHEGERFRPSTSTAAGVHSGIRQPPSKPQVGSWRDIIVGVGTQGAVGEKEREAAWIEVRRRKGSHSRGAHLSPPTRPAALKTTREVPRWLQGRCFKCLGLGHQKAHCTGQIRCFRCWYTGHLASSCAEKGERGEREEGEVRGAPKESVQGRAQVEGRRLPARRQEPRRAVPQARRQEETSTAEPGASRRPKSDQASASVKEMAGFQICTARPHEYMEEFWTGEPELRPAIGHCVLSWTAGMERNEAWLNQHTLMASVLKTRPSVSSGELLVAIVQQAGVREENLRVDVTHTEDFLLSFRTLRDRNSVFRRSHEIYVQEVPVSFKLWSRRSWADSSDLKFFTKISLDGLPAHLWERETVRNKGSWWRLSRLQMLDVWVFSLGSRTQTSFRSCFRSKCQRRLGQEVLGGKVLRAQLLLALLGHGQRFSMTLSFMSKRSSIPLPCTLRLRTQPVRLLVREGTVEAANSAAVELHHLAPEARGTSVKQPVAPDPLEAEVCSYGGKGSMLALSPVIEAVTGSAEPGRMVAGAMMAAGTEGMAPRPNVWFSPQQSQGSPALVDASTPVFQDVPLPLENLAHSPGSTVLPSPRIFRSISPLRLSEEDQVDGLMAQAMLPPPAQAFVLASPGTMDSLLVSPRLRSTADAVRGCAFRGSGHDPSPASTPGHVSSVQTLPPLARHLSFEDMGGDPPLMARAAVLEEIFEALSPGGNPVGARLPSPPADGQSHAGPSTADGPPSSADRLSPPWSPVRSALLVGPALGVAHFDRVYVCRKESVPAPQVVELAPSPQPARRSPLGAVILGQASPLRPVMSQSQASRVPDGSAVDAFIVTISTPPPCSLLGTPPASVPVTRSRRRVELPRDFTPWRSPRLALQGDGARRHTISKVQRVTMKKLGIIEEEDEATQETAEQYMCLFDNPLPPHHVEAMAELLQLDLAEPMDPLPAEPTMALFSVLVWNVRGLNNTAKRALVQESVVSSNASVVCFQESKLEVVNAVLIFELCGPGFNCFEVLPAEQTRGGVIIAWKGDLLQGTLVHTGRWSLIVNLSWGDRSWSLSSVYGPQADDEKLLFLDEMSAIRDLCLVEWIITGDFNLITAAADKNNLRINRRLMNAFRSKVNELELKEVYLFGRRYTWSSEQAVPTLVKLDRLFASTQWEDMFPEAHLQALSSSGSDHCPQLLTCGDRVPRQRRFRFESYWTRLEGFEEVVKETWQMARLSKFLSKWGQRHISSFRLQLQIANELILRSSNSIRFQDIHMPRLNLADLDAAFNEEAVWEAIKIMPNEKSPTPDGFTGLFYQKCWEIIKQDVMAALHKFCSGNNQNLELLNTAIITLLPKKEASSLLKDYRPISLIHSFAKLAAKVMALRLTPRMADLVACTQSAFIRGRSIHENFIFVKGLTKLFHCRKKAMILLKLDILKAFDSVSWPFLLDLLQFRGFGPNWRRINPTSVVPNMSFYADDAVIFFKPVHHEAATIKAVLNLFGDATGLLSNFAKSAITPIRCTEEQRLLVQEVLGCRMEDLPITYLGLPLSIRNPTKAELQPIMDRMAKKVAGWKPKLLSPDGRLCLIKSVLMAIPVHLLSVVQLPRWVIKDIERRCRGFLWKGQEEISGGHCLVAWREICMPIGNGGLGIKDIDSFGKALRLKWEFKRQEQRDRPWTMANWESEKDVGDLFNSLAIHILGDGSHTDFCRGNWLPRGGSIANNCPTLFSFVSRTKLMVAQGLISHRWVRDLQGSLSSRALAEYLSLWDELQSVAVQEGPMISSFLPQLSALLGKQFGRPKRQRESDFFFGWQQRVDV

SEQ ID NO: 164806 - protein, 138 aa, Oryza sativa
  unsure (1)..(138): unsure at all Xaa locations
  Clone ID: PAT_MRT4530_63670C.1.pep
STSPLKFTMSXGMPSXDEATGQVRLEGDVSDKKEEKTQEQSEASGMPSPQEEEAAIKKKYGGILPKRTPHITKAXQGGSHKXKGPLEALRPKLQPTQQHARARRTPYASADNDECMNLPPEDLIQNGDPIEDKNXEEQ

SEQ ID NO: 164807 - protein, 190 aa, Oryza sativa
  unsure (1)..(190): unsure at all Xaa locations
  Clone ID: PAT_MRT4530_63671C.1.pep
VSDEAALLQRKLDAGGGEEGEDGDEVVLAIRPREGRRRSRARCXFIVVAGVRGQEDVVAESDKGTSRADATAAAAAAPPPVSSKRLRWWAVVLANIVFVLGGQSVGCFSAGYTTIRGGDSLWLATVVQSCGAPLTVLLLLLLYFQMGSPAPPLIEPSERWWRQSSAGAGLDGRLSPSAAGSVEKRGEEKK

SEQ ID NO: 164808 - protein, 49 aa, Oryza sativa
  Clone ID: PAT_MRT4530_63672C.1.pep
MPFDPAPVSPSLLLEAPSPQHCSKFWSPKTRSARISRIKLKISSKASHL

SEQ ID NO: 164809 - protein, 116 aa, Oryza sativa
  Clone ID: PAT_MRT4530_63673C.1.pep
MAAWSWTRSGCYVNWGGAPIIKASKIGKRGKTPDATAIVSKEEKEAVEVWKRSDGGVRLQASVGVSDLASSRREGPNLHRGRCPADRWLRGGSRLPASLPTVKAGQRTFMRLQLRV

SEQ ID NO: 164810 - protein, 61 aa, Oryza sativa
  Clone ID: PAT_MRT4530_63674C.1.pep
ESTQKNTTVLVTRREGGQWEEDGVGSGERALEGNRRWRTHWQQGPTGVGVRLAGERALEGA

SEQ ID NO: 164811 - protein, 98 aa, Oryza sativa
  Clone ID: PAT_MRT4530_63675C.1.pep
KRQAPQASLPRFFRPGAFFRGWPPPKPAWSPPWIRPQKNPPQPPVPLKKPPPTFFINSQVLNKEGRPGGWGNLGPYVCTPPCPNHGGGGPKGYVCSSV

SEQ ID NO: 164812 - protein, 81 aa, Oryza sativa
  Clone ID: PAT_MRT4530_63676C.1.pep
MVATKDGFRSSVGSVHPGLGGVKVGEGEGEVINFFIGLPEQEGGCSQSLTPPQAPHLPVSFSLREAEGDGIGGAQARALKR

SEQ ID NO: 164813 - protein, 76 aa, Oryza sativa
  Clone ID: PAT_MRT4530_63677C.1.pep
MTEAALRHAHPRAFYSSAVVDMCTGETAVSADDVDENPKHRSACCCMLPLAGVEFMMNITAPYIAAKFPALAIASN

SEQ ID NO: 164814 - protein, 140 aa, Oryza sativa
  Clone ID: PAT_MRT4530_63678C.1.pep
MAAPITAATSPLSPASRVQVMCSMLNPTSASFSRQTASFPSIRLRPVPSRFQALSCSAKQDTIDKVCEIVKNQLAVDEGTAVSGETKFVDLGADSLDTVEIVMGLEEAFQITVDESSAQVIQTVEDAAVLIDKLVAEKDA

SEQ ID NO: 164815 - protein, 208 aa, Oryza sativa
  Clone ID: PAT_MRT4530_63679C.1.pep
MAAVARALLFAAIVCTALVMAVTAAADGEAAAIVVGLAKCGDCSSKNMKGQDAFKGLQVAIKCRNGDGDVPLAADDLHGAADCFAQLHSATSSTPCPGQEPSKIVPLSSTTDNGVDKANTFVAVAGKRMYSSTSPAECTSAFLYDYFHKHPFFDYFHKKPQGPEPKPDPKPTPLPANGGGGGAGNGGGGAQGNSGGAAPSPSSPPVYH

SEQ ID NO: 164816 - protein, 61 aa, Oryza sativa
  Clone ID: PAT_MRT4530_6367C.1.pep
MASKPILSVFANNLIVNHLQAGYRHVDTAAQYGIEQEVGKGLKAAMEAGINRKDLFVTSKI

SEQ ID NO: 164817 - protein, 619 aa, Oryza sativa
  Clone ID: PAT_MRT4530_63680C.1.pep
MGRGDEAEKEGKRRRGRGRSSRRSRDASSDPDPDSASSPSPSSASSPSRSPDRRSRSRSSGSKRRKASSSSRRHRHHHHKSSGRSRRSRDDDDERRRRRRRRDEERGRRGGDASESSGSGSEEPDRAEEAREIVRDILGDFPAVAGELRQLLQMIDNGEGIDISGISDKPLVKRLKKLFRSLKLRESSNGAYLLPPKSVPTLDVVGSALVASGELADNENKNPASPTRQEQPSSNFDVQNKNDSTPEEPAKNDADEQPPKRRVIGPAMPSRELLAAAAEMTEALRSRDAEVEADDGFLIGPPPPAMVAEAASANEAERFEEVTRILAADENSPYDVVGINWKMSSDNIKKRYWKLSLLVHPDKCPHPSAQEAFVKLNNAFKDLQDPEKRGVIDEKIKKKEEMEQFEVELKAMREAAEWRRLQGVSLEGDDELLAVPKQAQAPKRDEWMTTLPPERKPGVPMHSTTSFSMNGKEGRGDTSVWTDTPLERAQKAQQNCTLFMGGERAQKAQQNYLEAYNKAKAIADADEEKIKTSDASLVDTYNSSKRSVSLVQKHRESKKEKKKQKQRDKEEWEGNHPWKPWDREKDLTAGRQNVNLDPENMAQGLSSRFSSGAVQRNFL

SEQ ID NO: 164818 - protein, 224 aa, Oryza sativa
  Clone ID: PAT_MRT4530_63681C.1.pep
MAAVAMADVARALLFAALVMAVTAAADGEAAAIVVGQAKCGECTRKNMKAQDAFKGLQVAIKCKNSDGVYESKAIGDLDGDGAFSVPLAADDLHGAADCFAQLHSAASSTPCPGQEPSKIVPLSSTTDNGVDKANTFVAVAGKRMYSSTSPAECTSAFLYDYFHKHPFFDYFHKKPQGPEPKPDPKPTPLPANGGGGGAGNGDGGAEGNSGGAAPSPSSPPVYH

SEQ ID NO: 164819 - protein, 209 aa, Oryza sativa
  unsure (1)..(209): unsure at all Xaa locations
  Clone ID: PAT_MRT4530_63682C.1.pep
MAAVARALLFAAVVVCTALVMAVTAAADGEAAAIVVGLAKCGGCSSKNMKGQDAFKGLQVAIKCRNGDGEYESXAVGDLDGDGAFSVPLAADDLHGAADCFAQLHSAESSTPCPGQEPSKIVPLSSTTDNGGDKANTFVAVAGKRMRYSSSAECNSAFLCPFFDYFHKRPQGPKPTPLPKPTPANGGGAANGGGAAAPSPSPPAGISQL

SEQ ID NO: 164820 - protein, 327 aa, Oryza sativa
  Clone ID: PAT_MRT4530_63683C.1.pep
MAILASMAAMAFLLLMEAMSVSHGQLQVGFYSDSCPDAEDIVTAAVQDAAGSDPTILPALLRLQFHDCFVRGCDASVLIRSARNDAEVNNNKHQGLRGQAVVDAAKAELEDQCPGVVSCADIIALAARDAIAMTGGPSFDVPTGRRDGLVSNLRDADVLPDVVDSIQVLRSRFAASGLDDRDLVLLTAAHTIGTTACFFVKDRLYNYRLRGGGVGSDPSIPAAFLAELKARCAPGDFNTRVALDRGSERDFDDSILRNIRSGLAVIASDAALDASNATRGLVTAYLGAASRRFERDFVAAMVKMGTIGALTGDDGEVRDVCSQFNTD

SEQ ID NO: 164821 - protein, 243 aa, Oryza sativa
  unsure (1)..(243): unsure at all Xaa locations
  Clone ID: PAT_MRT4530_63684C.1.pep
MASLFKDPTKLSAYRDRRFTGTQEEYEAALQASVTVYVGNMSFYTTEEQAYELFSRAGEIRKIIMGLDKNSKTPCGFCFILYYSREDAEDAVKYISGTMLDDRPIRVDFDWGFEEGRQWGRGRSGGQVRDEYRTDYDPGRGGYGTMAQKELEAHSLSCTLPSTRDRAGTSRARGCSCGSGSSXEHRTGCYVQRTRRRNDERSSQRAPDSEFKGDAIDSEKNPRFREKGDSDEEDDDYDKRRRR

SEQ ID NO: 164822 - protein, 204 aa, Oryza sativa
  Clone ID: PAT_MRT4530_63685C.1.pep
MAAVARALVLGAVVVCAALVMAVTAAADGEAAVALVVGLAKCGGCSRKNIKAQDAFKGLQVAIKCKNSDGEYESKAVGDLDGDGAFSVPLAADDLHGAAGCFAQLHSAASSAPCPGQEPSKIVPLPSTTDNGGNKANTFVAVAGKRMHYSSSAECTSAFLCPFFDYFYNRPQGPKPTPANGGGAANGGGAAAPAPSPPAGISQL

SEQ ID NO: 164823 - protein, 115 aa, Oryza sativa
  Clone ID: PAT_MRT4530_63686C.1.pep
GDEYRTDYDPGRGGYGKMVQKELEAQRELVDYGGAFQPNAPPQYDRGDRKRGYGDSYRNDRDYQRKRYRNDERSSQRAPDSEFKRDAIDSEKNPRFREKGDSDEEDDDYDKRRRR

SEQ ID NO: 164824 - protein, 232 aa, Oryza sativa
  Clone ID: PAT_MRT4530_63687C.1.pep
MGPQLKIQFQHVARTLLLFAAVVCAAVMAVAAAADGEVAAVVVGQAKCGECTRKNMMAQDAFKGLQVAIKCKNSDGEYESKAVGDLDGDGAFSVPLAADDLHGAADCFAQLHSATSSTPCPGQEPSKIVPLSSTTDNGGDKANTFVVVAGKRMHSSTSPAECTSAFLYDYFHKHPFFDYFHKKPQGPEPKPDPKPTPLPANGGGGGAGNGGGGAQGNSGGAAPSPSSPPVYH

SEQ ID NO: 164825 - protein, 136 aa, Oryza sativa
  unsure (1)..(136): unsure at all Xaa locations
  Clone ID: PAT_MRT4530_63688C.1.pep
SPTRSQDSPLDACWLALYRELTARERFQSRFRHSVALGLRMQWXQQLLDRSRECRCASMRRMVRSYXESMPMILEQGWSYWLSVYYGSQGMPSXQWYYGEGSSYEDYYGEQQWXAEMTCVRLTWARHYAEHLSRDI

SEQ ID NO: 164826 - protein, 55 aa, Oryza sativa
  unsure (1)..(55): unsure at all Xaa locations
  Clone ID: PAT_MRT4530_63689C.1.pep
MAPKKDKAPPXSSKPXKXGGGKQKKKKWSKGKXKEKVNNSVLFDKATYDKLLSEV

SEQ ID NO: 164827 - protein, 84 aa, Oryza sativa
  unsure (1)..(84): unsure at all Xaa locations
  Clone ID: PAT_MRT4530_6368C.1.pep
TEFTDGKSPTRTELGRYHIMWGPISPNSTXRSTDPRYKRDPPGGPKASNLTANTTTTAYEVGAYRSQVAGXSSRTSSTTVSLVS

SEQ ID NO: 164828 - protein, 60 aa, Oryza sativa
  Clone ID: PAT_MRT4530_63690C.1.pep
IVSPTSGDPIIHAWLLFPCASSTMEPMLYLSCVVAATREDDKPTPCIGRLDHRTFYAKAV

SEQ ID NO: 164829 - protein, 143 aa, Oryza sativa
  unsure (1)..(143): unsure at all Xaa locations
  Clone ID: PAT_MRT4530_63691C.1.pep
QTLFQIIRGTAIAPLSPFENIALVAPKGQGSKSLILRERFSDDKXGARERKFYLALSKTPCLYGSIPRSAKASTTNVDKAPSQILRFLDHSRTVGGSRQGIRNEEMERYSAVSDLAGCGFEEEGYPVINYESDLQTVMSTTVR

SEQ ID NO: 164830 - protein, 238 aa, Oryza sativa
  unsure (1)..(238): unsure at all Xaa locations
  Clone ID: PAT_MRT4530_63692C.1.pep
KFKNWIYVHGLHQPEKFFVLVRPVATYEIADSINLATLXFPQDLFREKDNIQLRVFNYILYGNGKPTRGISDTSIQLVRTCLVLNWDKNSSLEEVRAFFVEVSTKGLIQDFIRIGLVKSHISYIRKRNNSPDSGLISADHMNPFYSISPKSGILQQSLRQNHGTIRMFLNRNKESQSLLILSSSNCFRMGPFNHVKHHNVINQSIKKNTLITIKNSSGPLGTATPISNFYXSFLPLLT

SEQ ID NO: 164831 - protein, 83 aa, Oryza sativa
  Clone ID: PAT_MRT4530_63693C.1.pep
RRNLHKKKGGERKKFNGARGCTGPKNKRPRLGRGEGGREYKDAKKSRIRDYRGSEGTRGGTRLETKRSSKRKGYGRRGARGPS

SEQ ID NO: 164832 - protein, 53 aa, Oryza sativa
  Clone ID: PAT_MRT4530_63694C.1.pep
TKFRRRFFSNIRYKQKIHPIPFINTETTYKFVNMKTKSTLLSQLTLTNGVRPY

SEQ ID NO: 164833 - protein, 141 aa, Oryza sativa
  Clone ID: PAT_MRT4530_63695C.1.pep
LLSPALKLLYPKLALKSKGPALYPEKREQCASIFMFCWWMHLDIIEKWSITTCVPTLNHIIPDIRYKLHSKKSKVDNLPRRKPVIYICFRMLYRTNKVFQTIWNEKPDGTVQRDIKIQKGSTIRETKKHYGIIHYLTRLNG

SEQ ID NO: 164834 - protein, 117 aa, Oryza sativa
  unsure (1)..(117): unsure at all Xaa locations
  Clone ID: PAT_MRT4530_63696C.1.pep
MYSNMAKYSTLFLIIVYMLTRTSIMADHHKDXVVYNLLERCKPQLCYPIYSLSRCRAGLKRQSVSHVSPSRATHEPLRADYCRQLAXVNTSNHVAERSTHLTRCIYTELAATNIADP

SEQ ID NO: 164835 - protein, 486 aa, Oryza sativa
  Clone ID: PAT_MRT4530_63697C.1.pep
MAPTPNPPLPLPPPYDSLPRLLLHHHRRLPRRRLVLAAHALAAVAGHLTVPAPPHHPHALLILAYARHLASWPRAPIHLLLLFRSSLRLSVPPTRHTLPLAVSAAAAASAGRHLPLALSLHAVAVTRNLLPFPHVSNALISLYARSALPDSARRVFDGMRAPDVVSHNALVHGYVKAGRLGLAVRVFEGMPERDAVSWGTVVAGCAKAGRLEKAVRLFDRMRREGYRPDDVALAAVLSCCAQLGALDKGQEVHEYVRRTRPRPNVYLCTGIVDLYAKCGRVEVAREVFDACPEKNVFTWNALIVGLAMHGHGTVALDYFDRMLVEGFRPDGTTFLGVLIGCSHAGLVDTARRIFYEMQHNHGVPRELKHYGCMADLLGRAGLIDEAMEMISSMPMEADTYVWGGILAGCRMHGNNVEFAEVAARRLLELNPDDGGVYSAMAGIYADAGRWEDVARVRRSMDEMVGMRNVGRSSIAMELKDGIKMLS

SEQ ID NO: 164836 - protein, 70 aa, Oryza sativa
  Clone ID: PAT_MRT4530_63698C.1.pep
KNKSKFHHRYLNLYRCVIPVPKLANRLFRFLNLFDCIIPIPKLADHSFRSSNLFSCVTPVPKLGIKNDLK

SEQ ID NO: 164837 - protein, 103 aa, Oryza sativa
  Clone ID: PAT_MRT4530_63699C.1.pep
PAPPTTPPAENTPPPRMAAAGGAAQPPRQNKLAPHSELRVEVPPDAPVRVRLVAGTAEVLGTELPPEGWVPVPPRSKIAICTWHGATAELDGDLESQYTSNET

SEQ ID NO: 164838 - protein, 84 aa, Oryza sativa
  Clone ID: PAT_MRT4530_6369C.1.pep
SRRDSRTRQAGTRDGHARRLLVVLLKWVWNLYGRSSILDAVDPRLRGDDDDEEHSDLWQIERVLVVGLWCAHLDVRTGLDRLTP

SEQ ID NO: 164839 - protein, 49 aa, Oryza sativa
  Clone ID: PAT_MRT4530_636C.1.pep
AQRSPTHSLCRVIGSNHPVHYIQLLCGGTGQHVDLLTKPLHKSSTKNII

SEQ ID NO: 164840 - protein, 81 aa, Oryza sativa
  Clone ID: PAT_MRT4530_63700C.1.pep
SKRPTRRPPRVRPAPRPVGPHVGELTAPPSLPLRAPRGDETTRVVRGGEDEPTPPPPPPPREEEAAGLLVFSSLSLLNQLS

SEQ ID NO: 164841 - protein, 75 aa, Oryza sativa
  Clone ID: PAT_MRT4530_63701C.1.pep
MSADAVALCMGISVSKQTLLISTGDLKMRRGAAAGSLLGSGAGPARDAALAAAPRMDEEEATPDRRNDLAAAAVA

SEQ ID NO: 164842 - protein, 189 aa, Oryza sativa
  Clone ID: PAT_MRT4530_63702C.1.pep
MFLEEEVSTSLSPFTTIHPQADYRSTEREITPNLTVLAAAAARGLRSRTRTRTSRQARPARPNPPYRSRALAAAPCPDAWCGGGAAVFVNVGCVGVFRDPTVPRSTTVSPYPAGTEPCCAPRIGDTGNQKQSKRRREGEAGGAAKASGSAAFAALRDLHEYWTLYDNVRGHVGHISVKTELALYGYGGV

SEQ ID NO: 164843 - protein, 74 aa, Oryza sativa
  Clone ID: PAT_MRT4530_63703C.1.pep
LPGTPSAGFPTLCASASVRPQGECAAKLWLALLIFLHSSLYWSSSLLLSVCFSRSHPHIAVWARASIMNLFLLA

SEQ ID NO: 164844 - protein, 112 aa, Oryza sativa
  unsure (1)..(112): unsure at all Xaa locations
  Clone ID: PAT_MRT4530_63704C.1.pep
SRGVVAERHDDSVRAPGSGAPXAISSSGSTTSVRKMAGPSKMIEXTSMVTXETAASVKASPANFDGVALGGQCHQQLDGDGERLGVADKVDEMXSRLTMGLLHQDGVGGYRC

SEQ ID NO: 164845 - protein, 424 aa, Oryza sativa
  Clone ID: PAT_MRT4530_63705C.1.pep
MEGQAVEDLAASALAARGLVTAPGGLGAPADALAVAANGHICELLGVIEEDTTNIPAQGFDCRMYEHGHDSELGQNNDGAAIPTSDEVPGEMLISYDKNNPSMALGTMYPTMEEFKLAVRQFAIKEEFDLGVEKSFDEHTCVSSMRQIATTPTLKWVASKAVSILRDDPNIGAKRLQNRLQTDHKCEISYDTVWRGKERALEEVYGKWEESVELLFRWKAEHTGKPCQHVLAYVTRQRGVNLEQFVHNYYSVNRFRAAYGREIEPMTVKTQWPQVDLPFLVGAPLAKLPVGRRRKLRRKGWMEGGHKKNGSKDGPFTNESEGEKGGDNDTAPTNGKGKKMIRGPMTCQKCGEKGHRQASAKCPLNRTAKKSWQLQQVQERLAAYQPSQASQCSSHGQAAAGQPSQSQAAASQPDDRLAAWEHAN

SEQ ID NO: 164846 - protein, 331 aa, Oryza sativa
  Clone ID: PAT_MRT4530_63706C.1.pep
MRLDSSARNPLVAFSFEELRAVTSNFRQDSLIGGGRFGRVYKGAVAASAAGDGDGAEPQPVAVKVHDGDNSFQGHREWLAEVIFLGHLSHPNLVRLVGYCCEGDHRLLVYEYMPRGSVESHLFSRVMAPLSWATRMKIALGAARGLAFLHEAEKPVIYRDFKTSNILLDEEFNAKLSDFGLAKDGPVGDKSHVSTRIMGTYGYAAPEYVMTGHLTAMSDVYSYGVVLLELLTGRKSLDKSRPPREQTLADWALPLLTHKRKVMSIVDPRLSAAAAAAGAGGELPARAVHKAAMLAYHCLNRNPKARPLMRDIVASLEPLQADDEARDAAGA

SEQ ID NO: 164847 - protein, 316 aa, Oryza sativa
  Clone ID: PAT_MRT4530_63707C.1.pep
MIAPLDRACLGEGRNCHVHLLLGLQGSAGAAAVVQGALRQCAADEQCGGFGVAVEERMVGEEELARDTYSLMHESQLVLTSAAFRGQCSPATAYCCCSTIAATKSTSLACPNAKAVRKAAVPCGEAHAGPGVEVGGCDSPIPITPPSAFMASIKFRNDKCPLMPAKMPIGVLSLLFQSILSAGGNPHELQFNLSTSSKPQPGDFSSSAPYYPCPCLGMVSEVSDSDDHEHELNNKAFSFSRKGSPLAKRPEWKDRLSTLINTLVHISTRSLSQNLIDAMKADERAPGRGPRSHRSAFPCGATAWSTSRGKDKGSGE

SEQ ID NO: 164848 - protein, 94 aa, Oryza sativa
  Clone ID: PAT_MRT4530_63708C.1.pep
KLRIPLKIKIFLWYLNKGVILTKDNLAKRRWKGSLLCSFCISKESIQDLFLDCVFARYIWTTLFFTFGIRQPRNTTYMFGNLLHGVEPRLKRQM

SEQ ID NO: 164849 - protein, 119 aa, Oryza sativa
  unsure (1)..(119): unsure at all Xaa locations
  Clone ID: PAT_MRT4530_63709C.1.pep
VPIVEPEILLDGEHGIXRTFEVAQKVWSDTFLYMADNNVMFXEGILLKPSMVTPGAEXRTGLTPELVFDYTLKLLHIRIRSDGLGIMFLSSGQSDVEATHNLNAMNQGPNLWYVSFLYA

SEQ ID NO: 164850 - protein, 112 aa, Oryza sativa
  unsure (1)..(112): unsure at all Xaa locations
  Clone ID: PAT_MRT4530_6370C.1.pep
FLGHDSEGQRRRRRDGGRGRTGGCSAGAIEVEXRAGEAARWRRTGGARRAEPRRWRRRRHGGGRGGTVEAEGGGGAGAVEPEAARWRRRDRAERECATRWGIGERRRGLIGH

SEQ ID NO: 164851 - protein, 65 aa, Oryza sativa
  Clone ID: PAT_MRT4530_63710C.1.pep
LSCRLFVLGLLAFRQCEHALTAGCFLCPVYRPVRPLNLLGLSFFNMEIYVWPSIVTKKKKKKGAA

SEQ ID NO: 164852 - protein, 96 aa, Oryza sativa
  Clone ID: PAT_MRT4530_63711C.1.pep
IGEFFLGGLFFFFLFFSDRDFGFSLAMFKRPPGPVFFFFSANFFFVFYKKKKGYTLIWIFFWGPLPFFIIKGALSILLTRGGGQKDWGGNIFIFFF

SEQ ID NO: 164853 - protein, 121 aa, Oryza sativa
  unsure (1)..(121): unsure at all Xaa locations
  Clone ID: PAT_MRT4530_63712C.1.pep
MDGKSFFLVQQILVSTHGYXNMYTWSHCKLSQRLIQLLSAHHHPLYRAFYXHWRTWYLTRGCIGFLFPVKGXVLRSAGPDNRIGYIGVVQGCIVLDSWIVLVWLLCLSTYLSYCCCENKAA

SEQ ID NO: 164854 - protein, 75 aa, Oryza sativa
  Clone ID: PAT_MRT4530_63713C.1.pep
TLSLSFHIELYWNSSMEEIDLAYREAANGVSSTRPVIEMTIPSVLDKTISPPGMPISCSQHCSCIPRVASDLYKL

SEQ ID NO: 164855 - protein, 54 aa, Oryza sativa
  Clone ID: PAT_MRT4530_63714C.1.pep
MAEHLLIAARSIQDGGCYEKPFFGPGKFAATMTTQDYDNLKLNYSETELQCSGG

SEQ ID NO: 164856 - protein, 342 aa, Oryza sativa
  Clone ID: PAT_MRT4530_63715C.1.pep
MAPSRPMASAVLLVVCTLMALQAMGAGAYYNNGSDDGVTMQMFEEWMAKFGKTYKCHGEKEHRFGIFRDNVHFIRGYKPQVTYDSAVGINQFADLTNDEFVATYTGAKPPHPKEAPRPVDPIWTPCCIDWRFRGAVTGVKDQGACGSCWAFAAVAAIEGLTKIRTGQLTPLSEQELVDCDTNSNGCGGGHTDRAFELVASKGGITAESDYRYEGFQGKCRVDDMLFNHAARIGGYRAVPPNDERQLATAVARQPVTVYIDASGPAFQFYKSGVFPGPCGASSNHAVTLVGYCQDGASGKKYWVAKNSWGKTWGQQGYILLEKDVVQPHGTCGLAVSPFYPTV

SEQ ID NO: 164857 - protein, 66 aa, Oryza sativa
  Clone ID: PAT_MRT4530_63716C.1.pep
IDIYKKYSNMNVRSMNCKSVSVSMFGLYPCSYSEKDLQRPENFKDVEQCLWSILKTQHNSLKKNII

SEQ ID NO: 164858 - protein, 105 aa, Oryza sativa
  Clone ID: PAT_MRT4530_63717C.1.pep
MGPQQDRSAAKPYANGSTAAAAAAGRKENNKVVRYRECQRNHAASIGGHAVDGCREFMASGADGTAAALLCAACGCHQSFHRREVEAAAAECDCSSDTSSGTGRR

SEQ ID NO: 164859 - protein, 38 aa, Oryza sativa
  Clone ID: PAT_MRT4530_63718C.1.pep
IINSKVIAQIASHYTAANTYIIYRYLLNSDIIYNFSYF

SEQ ID NO: 164860 - protein, 92 aa, Oryza sativa
  Clone ID: PAT_MRT4530_63719C.1.pep
SRPGSGRRPTSDPTPLGGGPRGIGGQPPPSNLWEGVAAALPRARLTSGRATRHWGTAGLLQLVFGKEWPPPYLRPHSSWGRATWHWGTASSL

SEQ ID NO: 164861 - protein, 92 aa, Oryza sativa
  Clone ID: PAT_MRT4530_6371C.1.pep
MPGSHALLPSSAVAGVGRRQRQLEGRRHAVAHEGGGSGALPSQIRRWRAREGPFVGGSGAGGLRWRPKAYPSDSIQSAIPDYLKRSKPVTHA

SEQ ID NO: 164862 - protein, 67 aa, Oryza sativa
  unsure (1)..(67): unsure at all Xaa locations
  Clone ID: PAT_MRT4530_63720C.1.pep
GGQGASACHAAPLGLSGCATPRPSPGHHVAGRAGGAKDAAPRLXCAAPQPSHAAFNTAWGDVRRRSI

SEQ ID NO: 164863 - protein, 106 aa, Oryza sativa
  Clone ID: PAT_MRT4530_63721C.1.pep
GGRPNCGAGPAGGGGLVIVGGGRRRREVAVQSAQHLRQLLSNPMDRRKTERSGLIEEDDYDDARRGRAAAMGAMGAARGEPPVEEVSWQGQPRVLGGGEETAAGMR

SEQ ID NO: 164864 - protein, 60 aa, Oryza sativa
  Clone ID: PAT_MRT4530_63722C.1.pep
SADGNEEQGFSTASNEEDNCCICYNSDSDTTFEPCHHRSCYGARSLGVLPFCFPGRLHRH

SEQ ID NO: 164865 - protein, 164 aa, Oryza sativa
  Clone ID: PAT_MRT4530_63723C.1.pep
MGSRGGVNIGAGRGGRPDGDGTAWRAESEATVTRGDATTRGLERRRDGREGDRETPTLGPRPVDRSDLSPPKNSSLGDRDTPTPGPRPVDRRDLLLSKNSSSGDRDTSTPDPRPVDRSDLSPPKFSSSSDRDMPTPGPQPVGYNNLSTSNVTINIVVIATIKTD

SEQ ID NO: 164866 - protein, 93 aa, Oryza sativa
  Clone ID: PAT_MRT4530_63724C.1.pep
MARILASCIGYVHLCLVFLLPSGVQNRSTCDILNRSLEENNKDLRTTILTIKYTTQRYESAISDLAGHGFEVEGYPVVDYESDLQTAMSTIVR

SEQ ID NO: 164867 - protein, 235 aa, Oryza sativa
  unsure (1)..(235): unsure at all Xaa locations
  Clone ID: PAT_MRT4530_63725C.1.pep
ETQLAPYRRNMQDLLCDSGMIPYPEPFQSMYQKRRLGTLGIEWRPPSVNFAVGPTYNATTGEYQIIPVIDPDRWEPLPEITDFIELEPENEVISDDTDSEYDGLDEHSSEGEHEALNGDSSGASYSSGEIDGDNLTDSALRRSRRKKKKSDGGVVTSSGRRVKKRNFDERDVPQVSRPHKSRKSRNDRSSKRKKSPKSKGLRPQRXCARNALSFLSKIGASTEEDEDDSESSFSD

SEQ ID NO: 164868 - protein, 107 aa, Oryza sativa
  unsure (1)..(107): unsure at all Xaa locations
  Clone ID: PAT_MRT4530_63726C.1.pep
XQLXLCYDTMNXYSXXXXSXXLTXFXXVNRKLHXLXXAWXXXXXFANXXGXXXXQNIXXPFXFXPILXXFPGXXTIIGISKNLXGXGXXXPQFXPXXEXXFXHSPGX

SEQ ID NO: 164869 - protein, 230 aa, Oryza sativa
  unsure (1)..(230): unsure at all Xaa locations
  Clone ID: PAT_MRT4530_63727C.1.pep
PRVRSSSPAIAAASAAVVALAVANRVLYKLALVPLKQYPFFLAQLTTFGYVAVYFSILYARYRAGVVTGDMLALPKRRLAAIGLLEALGLAAGMSAGAMLPGPAIPILSQSFLVWQLIFSALLLGRTYSMRQIIGCFLVASGVILAVASGANEGQFLSEVKFIWLALMVASSAFQAGASILKESVFIDGAKRLKGRRPDXFVXNSFGSGFQALFVFLLLPLLSNXEGIKC

SEQ ID NO: 164870 - protein, 808 aa, Oryza sativa
  Clone ID: PAT_MRT4530_63728C.1.pep
MAKAMCSLGACLAVMLVVLAAAVAGVGCSIVSYDGRSLILDGERRIVISGSIHYPRSTPEMWPDLIKKAKEGGLNAIETYVFWNGHEPRRREFNFEGNYDVVRFFKEIQNAGMYAILRIGPYICGEWNYGGLPVWLRDIPGIKFRLHNKPFENGMEAFTTLIVKKMKDANMFAGQGGPIILAQIENEYGYTMLQPENIQSAHEYIHWCADMANKQNVGVPWIMCQQDNDVPPNVVNTCNGFYCHEWFSNRTSIPKMWTENWTGWYRDWDQPEFRRPTEDIAFAVAMFFQMRGSLQNYYMYHGGTNFGRTAGGPYITTSYDYDAPLDEYGNLRQPKYGHLKELHSVLMSMEKILLHGDYIDTNYGDNVTVTKYTLNATSACFINNRFDDRDVNVTLDGTTHFLPAWSVSILPNCKTVAFNSAKIKTQTTVMVNKTSMVEQQTEHFKWSWMPENLRPFMTDEKGNFRKNELLEQIVTTTDQSDYLWYRTSLEHKGEGSYVLYVNTTGHELYAFVNGKLVGQQYSPNENFTFQLKSPNYGGSFELLPAGIVGGPVKLIDSSGSAIDLSNNSWSYKAGLAGEYRKIYLDKPGNKWRSHNSTIPINRPFTWYKTTFQAPAGEDSVVVDLHGLNKGVAWVNGNSLGRYWPSYVAADMPGCHHCDYRGVFKAEVEAQKCLTGCGEPSQQLYHVPRSFLNKGEPNTLILFEEAGGDPSEVAVRTVVEGSVCASAEVGDTVTLSCGAHGRTISSVDVASFGVARGRCGSYDGGCESKVAYDAFAAACVGKESCTVLVTDAFANAGCVSGVLTVQATC

SEQ ID NO: 164871 - protein, 360 aa, Oryza sativa
  Clone ID: PAT_MRT4530_63729C.1.pep
MSSSPAIAAASAAVVALAVANRVLYKLALVPLKQYPFFLAQLTTFGYVAVYFSILYARYRAGVVTGDMLALPKRRLAAIGLLEALGLAAGMSAGAMLPGPAIPILSQCNTIYGFCKTIYLNHPKSFLVWQLIFSALLLGRTYSMRQIIGCFLVASGVILAVASGANEGQFLSEVKFIWLALMVASSAFQAGASILKESVFIDGAKRLKGRRPDIFVVNSFGSGFQALFVFLLLPLLSNLKGIKFAELPAYLNGGAECFLNVDDSLIDCGGAPFLPLLFILVNMAFNIALLNLVKLSSALVASLTATSAVPISIYILSLPLPYIPHGAELSSSFILGGVVLLMGLIIYNLPQSSKKQSKIE

SEQ ID NO: 164872 - protein, 71 aa, Oryza sativa
  Clone ID: PAT_MRT4530_6372C.1.pep
DRRKLMHMELALPHTTFLILLLQINMNKTKNKSNHSFGPLSRSTNPMHAFDLSISHKRYVHAFCTLRTDLS

SEQ ID NO: 164873 - protein, 62 aa, Oryza sativa
  Clone ID: PAT_MRT4530_63730C.1.pep
MAGAGQGVGASWSRTAMSMVVRLRARGGVAWGLSDADDRERWAAYEGRVEQCRKLEQDKWSR

SEQ ID NO: 164874 - protein, 74 aa, Oryza sativa
  Clone ID: PAT_MRT4530_63731C.1.pep
VENHFHPVLREQHKKAPVEVRVAAERGGRVGHDYTKNLTAPKLHVPLQLNWIQSFRAKETLRWCFRKKTLRQGA

SEQ ID NO: 164875 - protein, 79 aa, Oryza sativa
  unsure (1)..(79): unsure at all Xaa locations
  Clone ID: PAT_MRT4530_63732C.1.pep
FFFFFFFFFWQKKQVQYRESDSNKLKDSKTKRRHQRXXWTPTTXRLTNHAQPTPPPTPLRTHSPTPPVAPPGXTFAXDV

SEQ ID NO: 164876 - protein, 250 aa, Oryza sativa
  Clone ID: PAT_MRT4530_63733C.1.pep
MMPTEEGNFGWMAARRHGNLPYFCLNFARRQKFSTKVGAHNTPTLILINTHAYSYRYKHLRKIGLAYPDIALMKPSRTSRYRQVRLSALQAMYQTSLESRCSPEFIVLEASIHSVRLIQSTGRCQFPSDISSTTMLREETNDGNLDEVFIIGDEYDNERQHQSPHGKVMFNSLGSGSFAPTKLMNSSVRLRREQTDLRYSLSARFLTAHCSCYSMYALHLHRNAFERERDDDGLTQIQFVGARTELTSRH

SEQ ID NO: 164877 - protein, 82 aa, Oryza sativa
  Clone ID: PAT_MRT4530_63734C.1.pep
YLQEVQLVFKLGLICTGAKPLSRPSMKEVLQVLQRWTGASSPQIAAGRGERRGQPPAADRGSRQEPLEVETQAARGGAWGGG

SEQ ID NO: 164878 - protein, 141 aa, Oryza sativa
  Clone ID: PAT_MRT4530_63735C.1.pep
APKVAAAGCLPQVAAVAAAAAASPGDGGSSPSIGGGCCFSRRQRLLPQAVVAGASSSGGDGSSLKQRRWLLRLPMAAASPSSSGDDCYFSQRWRLLLPAVAATSLGDGGCLFPTTNGHHSSPSPSPILLYVQSIIASYSCS

SEQ ID NO: 164879 - protein, 81 aa, Oryza sativa
  Clone ID: PAT_MRT4530_63736C.1.pep
ANKQMRARDHGYWSPTKKPRYVLDECPITQPTAIQKLLFTIERVLRSSQSLHQKLQPSGGLGKWQISCVLGLSDHHHGWTV

SEQ ID NO: 164880 - protein, 76 aa, Oryza sativa
  Clone ID: PAT_MRT4530_63737C.1.pep
FFIFFSFILFFFFWVYIFYFPSFFSFMGQPTRGNKSKIITPPKTFGTSKLPKQIRVLKVPHQKLQSRMKKKTFGTP

SEQ ID NO: 164881 - protein, 192 aa, Oryza sativa
  Clone ID: PAT_MRT4530_63738C.1.pep
MLAALFSSSFSSLPRWGWPAAGCWIHAPVVPAPSVAATPEAGAASTSASASTSTSFSPGAAVKRVIGSHYGFLGLTNASLNGNATNRFVGVELDAVKQRVCVAASLSSPSQTPLSDPRADDPPSMNATESLKNQHCVPHLELGELIRPCRVPGAGLRRQQHPIHYCRHHCGSSASAASPASAAGDVLRREAS

SEQ ID NO: 164882 - protein, 84 aa, Oryza sativa
  Clone ID: PAT_MRT4530_63739C.1.pep
LPHVPVQRFSSYPLCLAICSLLKAWPCFFPCFPFYICVCKCPGPPFFVLNLYPLNNSVLILVKLQYNKKNKIKIKISVPIYISH

SEQ ID NO: 164883 - protein, 1258 aa, Oryza sativa
  Clone ID: PAT_MRT4530_6373C.1.pep
MEELFMQVFERRDWVKAQVQEQVVSYSESLACAILAAGRRPPPWLLPALDSVPARGNNTKMSSIDLAHMRNENSLHHAQSQTYQRVKPKTHEFGGCKPGGLHIVNYAGEIDQSQICVSESVVQEFNIAHSLNEGLPSTSPVEVPHSVMSSLLQEDTSQPVESNLQGIPHSVSSPLPEQITMGVSETDSLTGMTCMASQLPENVSLLSLKSIALEGPDSVFTPLSQKEIADAGDTVSLMEPIAKTESVAGLISMASPQFDNDRLQTNLLEGPDSVPTSLSQADARHTAETDSVEILDQEEDTDTPREYSFPDKRVDENLKILEHQSSECHVRSPPCDGSSLRPDYLANAICEAPKMLSTPQENMLGDEQQGSECHVLSPPCDGSSLQPDYLASTVCEAPKMLSTLQEKCFEAQSEAYDVYVRNDMNGSVIPERFSTESAEKLLRSHDGTECKIFSFDIAMEIDSDSCETVSDKQALATQPSAQHLLHSSRCGEITSKKSDAQSNNSHQGRSVADVIQVQGNSSFEGIEINCQSDHALYSLCSTMSTSMDCQPDILDKMENRADMSGKPQHPVHHLDRLGSSECISLDLERRIVTSNWKSSVSYKVHTSVDSSSQRTMSSLSDIIHFNSLRMKSLSSSSSSLSGNVATVPQDSLPNCSDILSDGDGEYTRKTNNCSVYPGADVKYVAVDDQILNHTDYVSSGCEVLNPENHPSSTPPSTFPSYASSDQQSQQACASNCSNKELGEKCIHDDPGQPVSDGHIPLQNGDNCADFDETVEVHQSCGIPIPANSPTIKERVLEAYRDSTKWVNLSSNLSSKCKINSKITSPLRSKYESLTARFEKLLGPASLVEVEPKWHYPSYDTKMMGVFGNQEDCEIPLTPSFGKYSLQKPSGVCYTSNCTGSITDLACFQIDEDSSTSEASRKYMDVGRLDLPTTTASSRESDHQAHLIIDQAMQNPKENRAPSIRKEVKVTQSLHDRESKGRILGNQNEIHKSEVNLDKGWKPSNIVTSMTSFIPLVKQKQRPTTVCVKRDVRVKALEVAEAVKRREQKKQNEREMRKAAAELERERVKQEREQKLKQMEQKKKTDARKRQWEDDGRKEKEKKKKFIEEPRKQQKQLGERMHAGNSREDASQKDPDDTEIRKNTVRVVINQLLSDEKTESFPILVTSGSNNVKAVVADGNSGSSGHQIHGRLSDDADKSYEMSPYEDSDEEDGGDLEHKEKVRRRQKHIPPWTRVNLTGEEWLPHPVVISLVTKERNLG

SEQ ID NO: 164884 - protein, 90 aa, Oryza sativa
  unsure (1)..(90): unsure at all Xaa locations
  Clone ID: PAT_MRT4530_63740C.1.pep
QKDSQVLQFYYIIHILFSKGGPVPNSPYSEXSYYNSLAVVLQRRDWENPXVTQLNRLAAHPPFRQLAXIXKXARTRSPFPTVCAXCNGEW

SEQ ID NO: 164885 - protein, 240 aa, Oryza sativa
  Clone ID: PAT_MRT4530_63741C.1.pep
MQQPSVSLAPNTSCHPQHAGSAAGSSRRSHGHLGVLLHVDHSDGRRAGALYAATNLRSLEAIPATGPTLRSLEEAIAAPNLLSHEAVISANNTYQDAKPRARKFFELEMTVQDCDLDQYGVVNNTVYPSYIERAREELISGLGMSRTSIACTGNAMALTELNIKYFTPLKRGEKFVVRLSLGRIKGARIYAEQYIERLPDRKLVVESTATIICLNRKHRPTRVWPELSSKLLDYFSSQED

SEQ ID NO: 164886 - protein, 81 aa, Oryza sativa
  unsure (1)..(81): unsure at all Xaa locations
  Clone ID: PAT_MRT4530_63742C.1.pep
MALSKRGGGGGEGEGILASFSRSSVAAHGREAATMAKKLLRXTGKAAWIAGTNXLVLVVPLIILIDREQQVNDFEFQKAFF

SEQ ID NO: 164887 - protein, 122 aa, Oryza sativa
  Clone ID: PAT_MRT4530_63743C.1.pep
MLSPGVRDRLVWHWKSDKRYSVRLAYQTFFYGQHTFACDDLIWHANGLAKCKSFLWFAFQQHCWMTNLLQKRGIDSHSVYPFCAQELETGNHILLGYVFAQQVWLRVLSLSDWSTLSPPHGN

SEQ ID NO: 164888 - protein, 90 aa, Oryza sativa
  Clone ID: PAT_MRT4530_63744C.1.pep
TNVKLMMQYYQYWLAFFQESLFLNYSCFLLNSFLLMCLLNKLLLCIIVLFSLFALFKDFYYFFLFLFFLILFIVILPFLPLFLSLFYTFS

SEQ ID NO: 164889 - protein, 94 aa, Oryza sativa
  Clone ID: PAT_MRT4530_63745C.1.pep
MCHPGLPPLPPGCEVKRRRAPPVARVGSPPPVPRREQPHQAQPHHYCVCSPTAHRGSFRCRWHRRGYEWGAGRRRSVAPASPCASIARVFVQSV

SEQ ID NO: 164890 - protein, 43 aa, Oryza sativa
  Clone ID: PAT_MRT4530_63746C.1.pep
SITVVLFFSCWYKHHSFILSKSFNTTITGVHKESHQKSSSTAQ

SEQ ID NO: 164891 - protein, 71 aa, Oryza sativa
  Clone ID: PAT_MRT4530_63747C.1.pep
SGGSRAAPVLAVASGNDSHRKVRRLSCQVRYARCALSSNKFRDGRCLAFHVRSDKLPVPVSSNIMMRVSVL

SEQ ID NO: 164892 - protein, 69 aa, Oryza sativa
  Clone ID: PAT_MRT4530_63748C.1.pep
NLPHIKTSHALILDYTIYFFKFQIKKTFLALKIKGILNSPPFSPRKKNITISFLFFYFTTAAPVLKPFF

SEQ ID NO: 164893 - protein, 216 aa, Oryza sativa
  unsure (1)..(216): unsure at all Xaa locations
  Clone ID: PAT_MRT4530_63749C.1.pep
GGNLKAPGRGGPFGPGSNQAPKGKEFFAAWIQGFGEGGPPALVGNGPRWKQTAFCPEIWNXGFXGRRKIPGKESKXGGGAPKHSPQPGEVGINXPKXPPGXFGRKRFSRGSXGRSPPAGVPQPRYFRPGEXXPPGGGXVFGPXXPPGKKRAPGRXEGXAGXGXPETQRGFPPGXNAPPXLGXFSAGGFLGGKGXIPXPFPPERSGGRKFSEIPQPK

SEQ ID NO: 164894 - protein, 174 aa, Oryza sativa
  Clone ID: PAT_MRT4530_6374C.1.pep
MAQQGAPAPTGGPNASAGQGGRHTVDTAHRGRGGTVDRDHGWSTGSTQKLATEGGGWLAGRPDQAAAAPGRTLAADGGTSWRRTREAEGKRKGGGRPHRAPGGEGRRVRRRAPRDDGGTALPLRLHGREAADGDWDDLGRAERTPAVDGEGDGVAEVRHQTEKPTEVMATDDSG

SEQ ID NO: 164895 - protein, 73 aa, Oryza sativa
  Clone ID: PAT_MRT4530_63750C.1.pep
GLAPPVKYKPAVKNKFDPPCNPTLGHARWAAPMVKYCKTGSPEGQKPYPCLEMVKNKVRLGSPTPGTDLGGNF

SEQ ID NO: 164896 - protein, 444 aa, Oryza sativa
  Clone ID: PAT_MRT4530_63751C.1.pep
MAVEKTVPGGVRTVLVTGGAGYIGSHAVLQLLLAGFRAVVVDNLNNSSELAVRRVAALAGDHSRNLAFHKVDLRDKGALEKVFASTRFDAVVHFAGLKAVGVMCQEVDLRDKGALEKVFASTRFDAVVHFAGLKAVGESVQKPLLYYDNNVNGTVNLLEVMSAHGCKKLVFSSSAAVYGSPKNSPCTEEFPLTPNNPYGKTKLVVEDICRDIYRTDPEWKIILLRYFNPVGAHPSGYLGEDPCGIPNNLMPYVQQVAVGRRPALTILGNDYATRDGTGVRDYIHVVDLADGHIAALQKLFESSSIGCEAYNLGTGKGTSVLEIVKAFEKASGKKIPLIIGPRRPGDAEILFSLPAKAEKELNWKAKFGIDEMCRDQWNWASKNPYGYGSLDSTKQNGHHSYGSIGSPKQNGHCTNGFSESTRHNGHNGYGLVDSAKHNGNGHFH

SEQ ID NO: 164897 - protein, 140 aa, Oryza sativa
  Clone ID: PAT_MRT4530_63752C.1.pep
MQVRGSRSICKTQDGQVATRKTIVLVPSSTTTLLAIVESMHTQGSKSKGRTEDGRRDASSLCPGLSGRGMEHGKEGEDRTRIHPGCAGDKLGRTVAACQPWQGRGREGLPEIKRLGWYGRRPVAARSWGPSDVTALTSEL

SEQ ID NO: 164898 - protein, 111 aa, Oryza sativa
  Clone ID: PAT_MRT4530_63753C.1.pep
IKFMGLLFRCFFFCTLNLFGKEIKRCWYLLFFIYFKNNKVQLNKKGPTLRAGGGIKNWGAQNPTGVEKKRVQRRGEKFTLKREEKHITAGHHHKKRGGEKKQERPFYPKNG

SEQ ID NO: 164899 - protein, 71 aa, Oryza sativa
  Clone ID: PAT_MRT4530_63754C.1.pep
HPVVNQFDRGGLCESTITATIREIQSHLHTEGPLILSILNLLENFCKPPVIWTTNVFWCFTARKEPGAGHH

SEQ ID NO: 164900 - protein, 55 aa, Oryza sativa
  Clone ID: PAT_MRT4530_63755C.1.pep
AAPALQGYGYANGAARRWRGEARHERGKRTESSGSEGRKGWDAVLGGEDGESSCR

SEQ ID NO: 164901 - protein, 249 aa, Oryza sativa
  Clone ID: PAT_MRT4530_63756C.1.pep
MSLSLLQGYSSAEEDDPAAAGAGAGELSDSGDSSAEDAGSDGEEASAAPRPAAKPRPRPNPSRGDAGGGGGDGSLLPSALDAFAEISGPPEFLNNRVAEPEEAVEALGVLDRRGKGGRGSDSKQPPPGAVVVAKPQLVAIRERVSSGTNGANPPVSTEGKRIIGAANPGPEDAADLLRMCLQCGIPKTYSHARGMVCPVCNDRPEQAREPEKKKGSTVKDKEKIKRMRGQSSHASWKSETEMALRQQFD

SEQ ID NO: 164902 - protein, 71 aa, Oryza sativa
  Clone ID: PAT_MRT4530_63757C.1.pep
ISGAMHTAVPRVSGQRPESFTGYIDFIYDSPCETFTGWTLDYPMNTITLGLGTMQVLDHRSLPLDALRSET

SEQ ID NO: 164903 - protein, 69 aa, Oryza sativa
  unsure (1)..(69): unsure at all Xaa locations
  Clone ID: PAT_MRT4530_63758C.1.pep
PSPFRPPPSLPLPTTTLPGCASLGNMFHRRRCRPPSTRTPAPXLSLHSAPRKKQKRRNEGRRKAKRRXR

SEQ ID NO: 164904 - protein, 104 aa, Oryza sativa
  Clone ID: PAT_MRT4530_63759C.1.pep
MARYPDLAVIELETAPSRHPNTRTSGNIRFPFPIPFPFSTSSLPLTASGEHRATVPVACTEDLISSYVFAKLLTAEALPCCPFLELEHQQLQRYHHVLELELEN

SEQ ID NO: 164905 - protein, 1002 aa, Oryza sativa
  unsure (1)..(1002): unsure at all Xaa locations
  Clone ID: PAT_MRT4530_6375C.1.pep
MSYRIDSHTNVPKYPIQLVYGYHPSTVACQVGGLGAQGSADMTSKRFDNNVNINTAPGVPTMTSLMWTQVGSIVFPIYTVVPISSNPISVGNENGAVVTSRNDPPTMIPPAAKFXNQNQAPTRIATQKSSTWCHIHKTSKHSLSDCSVVRHVAAELKACKECGIQHASPTDITWCPIHKSKKHDLSSCKVFLGTVKPQRPQIRQPRAQPRCVAEERDTETTPDRFVGFVDVDPHEPSVLHXLADQESSPSSPRDVNVIEGAEDSATIHGDNGARYTRLTRHLQDNWRSRRESEYEXSRHLLMRVPRIPTSRSQSLTSTSRTSSAVLCRTPQKESTKRXNAKFALHHKELPPRLSGRSTRSSSWRRTTRRLQLSQEDIXSWLNPLYGTSRSQGARESTGRGHDPLHVLHXSPSSPLQNQRQTAPLHPRRRSPPHRRLSPLLGSIPPSRAYKRDPRXSSSVSPSSPSSPRSLPLSPREPKRRRLPATXSRLCRCCRRPRAAPFAPPASPRVAAPRPPLPFPKPFASTALTAPHRTLASALFPFSIDGTTSPPQARGCRCFCRLRPTIIAALAAVVGRHYLRRLLRLVPHLGHPIALAIHRRSPLLPVEMSYSPCRRPPAFFFPPPRASSFSPNPSTALPRSSQSPSAASRPWSRSGSAVXAVVPRSSPPHSSPLATRRTXGLPPPFLFPSASRVRRHDVPPSAASVRPGAAAAWSETKAQTPVEFCLWSGAEAPLGSPFSAAVVSFRCEDXRASSVSILRFIYVWNCILLVVXVPWLVLDRDLIHKIVWKFGLXSGRDTLSGQPFHGITPESSSKPLGKITLPVTFGQADNFQTXQVTFDVAEFDTAYNAILGRTALTKFMAASHYAYQLLKMLGPKGKITIQRNAKLAAQCDKRSLDMVEQTPNLPTTAVPPTKPSDMPGVPREMIEYKLMVRPDAKPVKQKLRRLTPDRKQAIREELDRLLKAGFIREVLHPEWLANPVMVSVMLGKGIFRVDCRQQVGTGL

SEQ ID NO: 164906 - protein, 1474 aa, Oryza sativa
  Clone ID: PAT_MRT4530_63760C.1.pep
MDTHNYETSKQKWALVWASGPAASHTLAASAPALPQPASRQSFLPSSTARWPRFPPVLGPLPRGATSHRESGISAVRGPRGRIGENGEGLRAQTPTQADDAPWSHGAFEILLYLVSYYAISDLFNLIVRAIDYNEKQQNNEDQIMVRLEYLSSPFNEKKNLYIPICSYALLLLIHLFTAAPVLFMAEVVLAGLRLAATPICVKLLCNASTCLGVDMTRELHELETIIIPQFELVIEAAEKGNHRAKLDRWLRELKQAFYNAEDLLDEHEYNILKCKAKHKDSLVKDSTQVHDSSISNILKQPMRAVSSRMSNLRPENRKILCQLNELKTMLEKAKEFRELIHLPAGNSLEGPSVPTIVVPVVTSLLPPRVFGRNMDRDRIIHLLTKPMATVSSSVGYSGLAIVAHGGAGKSTLAQCVYNDKRVQEHFDVRIWVCISRKLDVHRHTREIIESATNGECPRVDNLDTLQCRLKDIMQKSEKFLLVLDDVWFDESVNEREWDQLLDPLVSQQEGSRVLVTSRRDVLPAALHCKDVVHLENMEDAEFLALFKYHAFSGTEIRNPQLHARLEEVAEKIAKRLGQSPLAARTVGSQLSRNKDIAIWKSALNIENLSEPMKALLWSYNKLDSRLQRCFLYCSLFPKGHKYKIDEMVDLWVAEGLVDSRNQGDKRIEDIGRDYFNEMVSGSFFQPVSERYMGTWYIMHDLLHDLAESLTKEDCFRLEDDGVKEIPATVRHLSICVDSMKFHKQKICKLRYLRTVICIDPLMDDGDDIFNQLLKNLKKLRVLHLSFYNSSSLPECIGELKHLRYLSIISTLISELPRSLCTLFHLELLHLNDKVKNLPDRLCNLRKLRRLEAYDDRNRMYKLYRAALPQIPYIGKLSLLQDIDGFCVQKQKGYELRQLRDMNKLGGNLRVVNLENVTGKDEASESKLHQKTHLRGLHLSWNDVDDMDVSHLEILEGLRPPSQLEDLTIEGYKSTMYPSWLLDGSYFENLESFTLANCCVIGSLPPNTEIFRHCMTLTLENVPNMKTLPFLPEGLTSLSIEGCPLLVFTTNNDELEHHDYRESITRANNLETQLVLIWEANSDSDIRSTLSSEHSSMKKLTELMDTDMSGNLQTIESALEIERDEALVKEDIIKVWLCCHEERMRFIYSRKAGLPLVLPSGLCVLSLSSCSITDGALAICLGGLTSLRNLFLTEIMTLTTLPPEEVFQHLGNLRYLVIRSCWCLRSFGGLRSATSLSEIRLFSCPSLQLARGAEFMQMSLEKLCVYNCVLSADFFCGDWPHLDDIRLSGCRSSASLHVGDLTSLESFSLYHLPDLCALEGLSSLQLHHVHLIDVPKLTTESISQFRVQRSLYISSSVMLNHMLSAEGFVVPGFLSLESCKEPSVSFEESANFTSVKCLRLCNCEMRSPPGNMKCLSSLTKLDIYDCPNISSLPDLPSSLQHICIWGCELLKESCRAPDGESWPKIAHIRWKEFR

SEQ ID NO: 164907 - protein, 65 aa, Oryza sativa
  unsure (1)..(65): unsure at all Xaa locations
  Clone ID: PAT_MRT4530_63761C.1.pep
RQPIRFLVMCRLXALLVFWFSVHLSCNGELGLGQWLLFLFFNINGFAGSPSVLVSMEQVINQFNF

SEQ ID NO: 164908 - protein, 108 aa, Oryza sativa
  Clone ID: PAT_MRT4530_63762C.1.pep
FVFFFFFFFFFFFFFFFFGGTPFFIPSLGLTNNHHTHTHSLANSLPFFFFNAHTRHVHPYTTSRLCCCHGGGVLRRSSLKRGGGLFPRAHKQAKMGSTKIGPVEVPPL

SEQ ID NO: 164909 - protein, 112 aa, Oryza sativa
  Clone ID: PAT_MRT4530_63763C.1.pep
AVEEGHHLNHAGFSTTTKLLWVYVQRTSLPTHSSTLLQGRRPGSGERSRAAAGGGILGVRGRRTPRPRMRRGRRRPAAWIRTATGGGGRRMRRGETRDGAGKTLESSAPSEI

SEQ ID NO: 164910 - protein, 70 aa, Oryza sativa
  Clone ID: PAT_MRT4530_63764C.1.pep
TCDLGPPHLIPPLGELTSKTHTAKINIGINGFRGIRRIAARAVLHSDDLEPVVPNYPYVTRGVRDIQAPL

SEQ ID NO: 164911 - protein, 38 aa, Oryza sativa
  Clone ID: PAT_MRT4530_63765C.1.pep
SGTSLSVSYSEVCICHVFHHVLSPSQYMCHPVSLFPDL

SEQ ID NO: 164912 - protein, 96 aa, Oryza sativa
  unsure (1)..(96): unsure at all Xaa locations
  Clone ID: PAT_MRT4530_63766C.1.pep
EFSLQMRXSVDVGFASFVHKTIRKKRFYSSLLGRXFNFAWQDDCGDMREGGALLQVESRGGSYRDSRVSCYGEPGGGLLGXLGVSGEKGSTQVLVH

SEQ ID NO: 164913 - protein, 62 aa, Oryza sativa
  Clone ID: PAT_MRT4530_63767C.1.pep
MIAAPPTPYHIAKTKAVEGYRYRAYHTGPIKQLRLHNNQQMLDCVSKITTSPWDQGLHFRLW

SEQ ID NO: 164914 - protein, 37 aa, Oryza sativa
  Clone ID: PAT_MRT4530_63768C.1.pep
SCHVIVYSVLLLLSALGGKKERTWRQYTNCDTIQQLI

SEQ ID NO: 164915 - protein, 63 aa, Oryza sativa
  Clone ID: PAT_MRT4530_63769C.1.pep
RGRGVTPVAVVPVAPVVSAATAGVWATAGGATPTGTGGINRWGPLGQVFYLSNRAPIIIIRWL

SEQ ID NO: 164916 - protein, 87 aa, Oryza sativa
  Clone ID: PAT_MRT4530_6376C.1.pep
HPTAMGLHLIVPALLSIQELIIAGPMFFKAAIATSGAMTAPGSSYPRGIPLLGLLPTQARGDTGGPLPIKAADLLTLFITLSLSLRL

SEQ ID NO: 164917 - protein, 149 aa, Oryza sativa
  Clone ID: PAT_MRT4530_63770C.1.pep
MAAFSSIIFPLEDIVMSSPFPLVGLPGENPLLVLFETLTDSGGQSFVAPLPGDVVLAILFTNKPGSTSTTFSIVLSTVVTLQPHLLDLAIKEKRRHTKNDKGDDWSFIWNSDKYTTKSQQCWQYLGIVWNSGLNFFQMVVLAHIQFNQK

SEQ ID NO: 164918 - protein, 247 aa, Oryza sativa
  Clone ID: PAT_MRT4530_63771C.1.pep
LAINPDRSSNPSFSQPHHPRREEGNVVNKGSHVVVSLLQLQLRGSVSAPPHARRRHGQRRHHGGGGARARGGDAQRADPPGRLRRRHRHRRPPAAAQCGGGVGRRHHHRGGPSCRGRREGGVGGRGSEEGRRRRRGRRGDAGGAGAAGGEDEDGGPPHRDAGGRQERRRRRQRARQGGRRRRRQGGGEVEELRDQGGVPQEEAHVRQDLHHVGAHQVLRQVLQVLHPHLRLARSCRDSIHPSNPSVS

SEQ ID NO: 164919 - protein, 80 aa, Oryza sativa
  Clone ID: PAT_MRT4530_63772C.1.pep
YFHISLRVTHAWMHEPINVSDTIQIDREHFVEMCKLLDRTWQGTCICMPACMSECTGASYSEIAGCSHCDPLINSRSTDD

SEQ ID NO: 164920 - protein, 303 aa, Oryza sativa
  Clone ID: PAT_MRT4530_63773C.1.pep
MQHGPPEFNALPNRKDANLRTRVVRSLMIGITDIRYFTDSTMYSTEDFLTPSLNCYVTNAYIRIDKVTAVASIDSSIYPSYKKSACKILTSAGGTLLPPLPTLLSPPLPTHSDDVGDGDGDSVGAVEEPTAASLLSLPSISQIRMGGSQRWWRGRGSGEGVFPSPPSLRSGWEACSGGASEGAAAGWEESDGGGAAAASLPSPPLPLSDLDGRPVAVTRQWERPWDGRSPTAVSVPSPPLPLSDPDGKGSGGASEGAAAGWEETAACGFDENSSSTVASATSNVTSNDDRQRRCLHAENAVRS

SEQ ID NO: 164921 - protein, 112 aa, Oryza sativa
  Clone ID: PAT_MRT4530_63774C.1.pep
MHTQHAGRFRPVTIKPCEWCGRIFVGASAYVRMHAYSSGDYISKLDDDLQPAGRCKRTPAYERWFVVSVIEPMVPCIAHPSEKQKGKCVGRLSIALVLPPASRVDRESSQRR

SEQ ID NO: 164922 - protein, 807 aa, Oryza sativa
  Clone ID: PAT_MRT4530_63775C.1.pep
MEPASQVGTGAWKMLTCTRSKGRNRYFQHGEASPFLSPVRGGGGVAISVCEEEAAAAAAPGLGRGHLLDGMSRRTTTARWVPRDRPEPAGRSGTGAPGRASHALGQMPRRRTTTTTARWVPRQGQKGEPGGSGHAAAPVDRLSALPDTLLHHVMSFLKAWEVVRTCVLSRRWRDLWASAPCVDIRLRGSGRDGAPPEDFGRFVYRLLLAREVSAPVDTLRLRSSNGEEYAETYDNDDVNIWICSAIKRNVRVIHLNGHRKDELVLEHTAFVSHHLKILKLSHIKLDGKILKQLSSQCTSLEDLELNNCPVNGGEILSVSLKKLTMVKCSITMDLSICAPNLELLCCITPYYHVPLFENLSSLVAATIMLDDSFLRRDEFLYEVEEETSDDEDDNKTTSDHCDSKMDADSDAYDDDDNDDILYDEYLNSRHGNLVDDYNYGSDIDSDDDLHEYSQIAHECRGGRYGYCHDSKRREAAGGGGMEVGRGPAGWRPVAGGLTLPSPRSGRRGSGGMGGWPAAGWEAGHFGKRVSEKLIGEVENIEYRTQKGAVYFLVEGNAHPPEEASLGLRSQLKASDHSAAAPAISSGHPLDGMSRRNTTGWPVPRGGAEPTGKPGPSAPVRAAHAFGQMPRRRTTTTARWVRRHQVHKGKPRGAATVDRLSALPDALLHHVMSFLKAWEVVRTCVLSRRWRHTWASAPCVDIRAPSSRRERGPGRDSDPPEDFGRFVYRLLLAREVSAPVDTLRLRSSNGEEYAEMYDNDDVNMWISSAIKRNARVIHLNGHREDDDLVLEHTAFVSQRLKILKLSNS

SEQ ID NO: 164923 - protein, 99 aa, Oryza sativa
  Clone ID: PAT_MRT4530_63776C.1.pep
MELEAVVVFPWTLLSCPAVLTVVARLPRQMSPVVRRTTQPFLRNRSEKLSRTFLLWSLKVSRSYAMAASSAVLKVSRVVKLLRWWQDREQLCRSNGGGT

SEQ ID NO: 164924 - protein, 65 aa, Oryza sativa
  Clone ID: PAT_MRT4530_63777C.1.pep
MKKWMEFCKDFTASGRKVINCCSGYLLLLLLLLLLLMLLHFCVLSVPLDLWSEGVFSSRQNWKFG

SEQ ID NO: 164925 - protein, 366 aa, Oryza sativa
  Clone ID: PAT_MRT4530_63778C.1.pep
MARRGCADSLAVTVVEASGGSRGGCRRRGGRVLGAGGVHYLTEEQHACGYMSDAERHPGGGFVVDSDDEASGGVPNSDLPLGSGFVLDSEDEVCGGDPESELPPEGTFVPDSEGEDCVIPDSEEEACGGGLDSELPPDSCVVPDSEEEACGDDPDSELPPDGCVVPDSEEEACGGDPDSQLPPDSCVVPDSEEEACGGDPDSELPPDGYVVPDSEEEACGGDHDSELPPDGCVIPDSKDEACGSDHDSELPPDGVAAGDEGVDEFAEIRERNCLHVEIKRMQVEIKKTFMFLAINSKKVISKDNSSSSIFFHISFSIEISGAAGRRPRGSAPAGGGLGSLAAAGDVAGPRQAGRPRDGRRASGRAV

SEQ ID NO: 164926 - protein, 463 aa, Oryza sativa
  Clone ID: PAT_MRT4530_63779C.1.pep
MARRGCADSPAVTVMEVTARRGRWAVRKQRAVEIDADSQQASGGSRGGCRRRGGRVLGAGGVHYLTEEQHACGYMSDAERHPGGGFIVDSDDEASGGVPNSDLPLGSGFVLDSKDEICGGDPESELPPEGTFVPDSEGEEYGVVPNSELPPGGGFVPDFEDETCGGDPDSPLPPNGCVVLDSEEEACGGDPDSELPPDGCVVPDSEEEEACGGDPDSELPPDGCVVPDSEDEACGGDPDSQLAPDGCVVPDSEEEACGGDPDSKLPPDGCVVPDSEEEACGGDPDSELPPDGCVVPDSEDEACGGDPDSELPPDGCVIPDSEDEACGGDHDSELPPDSVAAGDEGVDEFAEICERNCLHVEIKRMQVEIKKTSMFLAINSKKVISKDNSSSSIFFHISLSIEIRGLKVSVGQIRRWWGRARREASTKVQWVASLHGVTGGLPTAGAVGGLSSVAGGLDGGAVG

SEQ ID NO: 164927 - protein, 47 aa, Oryza sativa
  Clone ID: PAT_MRT4530_6377C.1.pep
VETGKDANPAFGQHPSRFRVIIPFLQLLIGICHVLIFQTLRAWPFFP

SEQ ID NO: 164928 - protein, 52 aa, Oryza sativa
  unsure (1)..(52): unsure at all Xaa locations
  Clone ID: PAT_MRT4530_63780C.1.pep
RHPGVFFGGEVWPSTLPHAHIQDDRGYERLDSVARPQSTDLIRAXMVKGTAG

SEQ ID NO: 164929 - protein, 51 aa, Oryza sativa
  unsure (1)..(51): unsure at all Xaa locations
  Clone ID: PAT_MRT4530_63781C.1.pep
ACGFNVPSRYGTTLGTMVHPVPLPPLRACXEFYSVVVRKLKTSSDIIICXL

SEQ ID NO: 164930 - protein, 389 aa, Oryza sativa
  Clone ID: PAT_MRT4530_63783C.1.pep
MAAMASSPPTTPNLGSQPTWVPYEPTRDCSQGLCSMYCPQWCYFIFPPPPPAFDITGSSSDDSSGPTFSPLVIAIIGVLASAFLLVSYYTIISKYCGTFSSLRNRLLGSSAHRGSGGGADGGDNSRSQEPWSVALSDGMDETLINKITVCKYRRGDGFVDSTDCSVCLGEFREGESLRLLPKCSHAFHVPCIDTWLKSHSNCPLCRCNIAFVTVGMVSPEPEARVPREDRRDNHELVLTIDNPEHVREEPQNVVTGVAVGNGGRNHEAKDGPGRSEDANGTAEIREDGALMPPTRAPSSLSDTHREGRMSIADVLQASLEDELMVARESGLLAGSSGSSRRCHGEHSKDGGGRSGRALPDGANMKRLAPAGRSCFSSRSGRGKDSVLPM

SEQ ID NO: 164931 - protein, 300 aa, Oryza sativa
  Clone ID: PAT_MRT4530_63784C.1.pep
MAHLSNLFLTPGDFIRVTLYRQCSSFSLWSPSTRLSKRLKVLPFLLRLRPDAPELSTLLKILNLFAQVSGLHTNIGKIEIYLIRDIGLATGYADFAPARSRTPMICFVNATSSERHIANTVGPTAGGIMNATCGNVPELIIALFALHKNKMEILKWSLLGSILSNLLLVLGSSLLFGGIVNIGKERPLDKRQADVSIGLLLLGVLCHIATLVSKYTSSTGDSINSSSVMQLSRSCAIVMLIAYFGSLMFQLKTHRQIFELEEGDETPGKKSRTGIFPCTNQSPSTTRGITPVREIFPATI

SEQ ID NO: 164932 - protein, 260 aa, Oryza sativa
  Clone ID: PAT_MRT4530_63785C.1.pep
MAEAASAAAAATTEQANGSSGGEQKTRHSEVGHKSLLKSDDLYQYILETSVYPREHECMKELREVTANHPWNLMTTSADEGQFLNLLLKLIGAKKTMEIGVYTGYSLLATALAIPDDGTILAMDINRENYELGLPSIEKAGVAHKIDFREGPALPVLDQLVEEEGNHGSFDFVFVDADKDNYLNYHERLMKLVKVGGLVGYDNTLWNGSVVLPADAPMRKYIRYYRDFVLELNKALAADHRVEICQLPVGDGITLCRRVK

SEQ ID NO: 164933 - protein, 118 aa, Oryza sativa
  Clone ID: PAT_MRT4530_63786C.1.pep
REREKGTKSRAQVVVVERENSVDLSLSLYLSLSLTRSVWLALLLPLFCFALPCLPLLAVSVCHPLAHLLAVLLFVFPPLAVAASNATASGGGGGIAMRPPVKKKLSAAQASELCLLLG

SEQ ID NO: 164934 - protein, 89 aa, Oryza sativa
  Clone ID: PAT_MRT4530_63787C.1.pep
SPPCYFKCPPLLGYRGFSFPNNSPISSPFPELISWPFARPWFNSSKSHPETESSLAGALLFVPRPYKLPPFGVEKPSLFSSSLSLILSQ

SEQ ID NO: 164935 - protein, 186 aa, Oryza sativa
  Clone ID: PAT_MRT4530_63788C.1.pep
MDPDAVKSTLSNLAFGNVMAAAARDYQKEIVAKEKAQAASASHDEVDLDELLDDPELEKLHAERIAALKKEVEKREVLKRQGHGEYREITEGDFLGENAPFFVTKLGIKTLPCVILFKKGIAADRLIGFQDLGSKDDFSTRALENILKMKGIIDEKKKDEDDEDDETYMSMNRRVRSSTAQDSDSD

SEQ ID NO: 164936 - protein, 92 aa, Oryza sativa
  Clone ID: PAT_MRT4530_63789C.1.pep
MPPGKEQQRTSRRIGHSSNASSSSQKSIRGTQIHVPDCYIHKPVYQELLHGDQLRFTHPECFAFLLGFDKLYQQIQDFIFKASLKFDLLLLD

SEQ ID NO: 164937 - protein, 174 aa, Oryza sativa
  unsure (1)..(174): unsure at all Xaa locations
  Clone ID: PAT_MRT4530_6378C.1.pep
NLCRGGTLYPHDVTSLGHPARISKADTGLPYANERGPRPTTCXVPDNTVPGSLGVLPGTTPVNPLVSWHQGFPGXLVTQPRVSHSIHVVALVICSDVQGNRSLEATAQAFPPDFKFEGNRRYSHSVSEFRGATRWLQGKHVACLAQGLDLHESSRNLLHEKYPVTTTRRKQSKT

SEQ ID NO: 164938 - protein, 238 aa, Oryza sativa
  unsure (1)..(238): unsure at all Xaa locations
  Clone ID: PAT_MRT4530_63790C.1.pep
MDPDAVKSTLSNLAFGNVMAAAARDYQKVRCELLCAAXQIVAKEKAQAASASHDEVDLDELLDDPELEKLHAERIAALKKEVEKREVLKRQGHGEYREITEGDFLGEVTGSEKVICHFYLDARPTIMDKHLKALAPIYLGTKFIKLDAENAPFFVTKLGIKTLPCVILFKKGIAADRLIGFQDLGSKDDFSTRALENILKMKGIIDEKKKDEDDEDDETYMSMNRRVRSSTAQDSDSD

SEQ ID NO: 164939 - protein, 129 aa, Oryza sativa
  Clone ID: PAT_MRT4530_63791C.1.pep
VLVPVICWALEHVARFLRRHFTNSSLYRTYLEKPCTWVETNTTAVKFLSSNAEILLGFLLILSLFSRQRNPMQTFMYWQLLKLMYHSPFTAGYHRAIWLKIGRTVNPYIHRYTPFLHDPINAGMRWWFR

SEQ ID NO: 164940 - protein, 84 aa, Oryza sativa
  Clone ID: PAT_MRT4530_63792C.1.pep
TCIKTPKRNMTIKPRLTYTGEDITESTWDNVKNKTHNEGSRPGLKGQPRNWSKKASRRGHQRPAQATRARREQRFEGPRACKRT

SEQ ID NO: 164941 - protein, 89 aa, Oryza sativa
  unsure (1)..(89): unsure at all Xaa locations
  Clone ID: PAT_MRT4530_63793C.1.pep
MCTEATSSQELCRRSAASSPETPPPDPASSPPPPPPPPPSSPPPRPASSPSAAAGAXPPHLPLPQSLSPSSTLSPLPRSAAHLLSCCCT

SEQ ID NO: 164942 - protein, 124 aa, Oryza sativa
  unsure (1)..(124): unsure at all Xaa locations
  Clone ID: PAT_MRT4530_63794C.1.pep
MGSGAWQQRQRRRWRQGLWQRRMGRTSAPAAADGEEAGRGGGEEGGGGGGGGWGXGRLRPRRWRRSRIRRRRLRRGCGGAATEVLRGCGFSTHGEEEEKRAKSARVEERSLRILRWETKSCGGE

SEQ ID NO: 164943 - protein, 385 aa, Oryza sativa
  Clone ID: PAT_MRT4530_63795C.1.pep
MLLSGPSPQQPTPPLLLPESSGEDGGHDSSSRAAASGGGGGPKKRAETWVQDETLCLIALRREMDSHFNTSKSNKHLWEAISARMREQGFDRSPTMCTDKWRNLLKEFKKARSHARGGGGGGVGGGGAGTGGGNCPAKMACYKEIDDLLKRRGKPTGGGGAAVGSGAVKSPTVTSKIDSYLQFDKGFEDASIPFGPVEASGRSLLSVEDRLEPDSHPLALTADAVATNGVNPWNWRDTSTNGGDNQVTFGGRVILVKWGDYTKRIGIDGTADAIKEAIKSAFGLRTRRAFWLEDEDEVVRSLDRDMPVGTYTLHLDTGMTIKLYMFENDEVRTEDKTFYTEEDFRDFLSRRGWTLLREYSGYRIADTLDDLRPGVIYEGMRSLGD

SEQ ID NO: 164944 - protein, 250 aa, Oryza sativa
  unsure (1)..(250): unsure at all Xaa locations
  Clone ID: PAT_MRT4530_63796C.1.pep
AWLRQDEEEEVEEKEEEEEEADDEVQMYRAARCRAPGDVDALKCALFAKMRRAEWGGALGFARRLREAEPGEVEWRLMEALLHELKGDLAEAERLFNEVLAEKPLLVRALHGLALCMHKRSEGPTVFEMLEKALQLAISGERVPEERNIKLLIAQMHVVKGQLDVCIRXLQNLINEDPRDFRPHLCQGIVYALLDKKEEADELFDTYRSLVPDEFPDQEVLLVMLYKQPEWGPRTGYKRILDLNFYLRSD

SEQ ID NO: 164945 - protein, 37 aa, Oryza sativa
  Clone ID: PAT_MRT4530_63797C.1.pep
MATSASAPARNSGRPEGSGYWTPLRLYDASDADECLA

SEQ ID NO: 164946 - protein, 91 aa, Oryza sativa
  Clone ID: PAT_MRT4530_63798C.1.pep
FGSGVPARAGASGLALARAPPPRPRLLLRAAVTVTGSEGELCRLSPARAAGPRLAVAGVELGRAYSWFLISPVAGKEMNLQHLHEQLRALD

SEQ ID NO: 164947 - protein, 565 aa, Oryza sativa
  Clone ID: PAT_MRT4530_63799C.1.pep
MASRAPPLLLLLIVLSLVVLAALLAAAAADASAVAGGGRSSPSTTTFVLAGERTRRKDPLDGLRLYSGGWNISDEHYWASVGFTVAPVFAAAAIWFVVFGVSLFLAGCCFCCCPGSSRGGGGSYSCTALVVSLVLLLAFTAAAAVGCGVLYDGQGRFDGSTAATVEYVAGKSGDAVASLRGFASSMEAAKAAGVGPVSLPASVKGSIDGVVRKMSSAADELAARMASNAAKIRDALETIRKILIVVAATMLILAVLGLGWCFLGGFWLQQRFCSVAPSFCYTSVEVVILWDKFFEGCYKTGSCCNGIDILTILLHEYHSVVGDTCAAMGEWVQRPQARTALDDILPCVDTAAAADALARSKDVTHHLVTVLNGVIANVSNAAAAGLPPPLYYNQSGPPVPLLCSPGERCDPGEVDLAAAPRAWRERVCRTTRAAAAAPEVCATVGRLTPAMYAQMVAAASACDALSRYGPVLADMADCAFVRRAFRVVGDEHCPGLGRHSAEVYRGLLAVAVAALASVVLWVAHSRERRRRRDAVELRAAASPYTVHHSHLEEGALLKSPRMMYR

SEQ ID NO: 164948 - protein, 692 aa, Oryza sativa
  Clone ID: PAT_MRT4530_6379C.1.pep
MTAGSTASGRASNPGEATLHISAAAAGGGDGKQTIDFGKVLVRIQESLVVLNRAQVETQAAIVKLDLGMNNWRPQVEEAVQELREEVGELRQQVDLLGKAVQTSTAASSPRVPLTDEERKASLLPTPASPTKETTAAGGAEKWANGHRAPQNFRGRASGVVTSLVLTPIKSTYDATPSHLNFAGNWESGEGNFGTQFWEKSFNHRMPKLDFPIFDGSDPQDWRMKCEHYFDVCDTSPNPWLGTVQEYYEKFDELANQLLVYDLAANDRYFTHKFTNGLRKEIRGAVILHRPRDLETAFVLASLQEEEMAKSPTDFKRYDGGAPTRAQVKRAYPLPLPPPRPSGSIEAKSDGVKAVPSPDKMATLRAYRKAQGLCYICAKKWSHNHKCANSVQLHAVQEVFAHLQDPQDSVSADILDVESPARSELMVVSLLALQGVESVGTMRILGYVQGFEVLILVDSGSSVSFISSKLATGLSGLHSLPTPLKVQVASGGVLHCDSIVTQCEWFTQGYTFRTDLRVLPLTSFDMILGIDWLATHSPMTVDWCNRVLTISAHRQSITLCGIKPAVNTCALATPRQMQAFGDRHAVAHLVQLCELSTPVTVEQIPEVVQKVLQDYATVFDKPTGLPPSRPYDHTIPLIHGAQPVNVRPYRYTPAQKDEIESQVQDILTKGIIRPSASPFSSPVLLVKKKDGS

SEQ ID NO: 164949 - protein, 68 aa, Oryza sativa
  Clone ID: PAT_MRT4530_637C.1.pep
MGGWATGRWAGGWLVPPLPPLFIVFTNHGLWEHLFFYMLKKEKAVKKKKKKKKKKKKKKKKKKKKKKQ

SEQ ID NO: 164950 - protein, 65 aa, Oryza sativa
  Clone ID: PAT_MRT4530_63800C.1.pep
MAHIRRLQKGNQSDQVSLYQLDSTLPAAAAQRATAGMQQRGCMFTSATATHESDPLGGGASGITD

SEQ ID NO: 164951 - protein, 72 aa, Oryza sativa
  Clone ID: PAT_MRT4530_63801C.1.pep
FYIDTRSASLRGRVDYIGVAEIMAAVHTSAWIGHDLHSEKTVTERMRAQTPLCEVDHDYGSNVERKKVRGLI

SEQ ID NO: 164952 - protein, 220 aa, Oryza sativa
  Clone ID: PAT_MRT4530_63802C.1.pep
MVHSDIRMDKVTQAVENLKEEWNQAVAQLEGCIAAIESCGKMGKGTEEASSLPRLNGSAQDALQLLNSLQCRLDPLAEQLPTFEEVQSGQATLQSWKEQYQKLRMRLRNANLQANANIKKAAQEERELLLGGGEESTIRRRNLQTKAGMTSAAESITESLRRSRQLMVQEVERSANTLATFDESTSVLRKAEGEYQGHRSLLMRTRGLLSTMQRQDVLDR

SEQ ID NO: 164953 - protein, 136 aa, Oryza sativa
  unsure (1)..(136): unsure at all Xaa locations
  Clone ID: PAT_MRT4530_63803C.1.pep
XXXMXXQEGLXSLGKWLEXSIXXXXRADGLLRELVNSSPLNXLXGCRRRGGXXXRSRVXARAXSPQVEDPRXAXPCXXRPXQSGVRHXXXSXYTTEWTXGXXXLNXXVHVXXHSTXXVHXXXXRHRGQPQXGXXVX

SEQ ID NO: 164954 - protein, 62 aa, Oryza sativa
  Clone ID: PAT_MRT4530_63804C.1.pep
HKAYDKNHVKLRKYSLHMNTHMLHYYMIYKCNNPTCTYKLKIYLHKIGPYTPACKYTTKITY

SEQ ID NO: 164955 - protein, 131 aa, Oryza sativa
  Clone ID: PAT_MRT4530_63805C.1.pep
RTFEGWVLDDRRTTFFLCYIGNFLYNISVREGYGDGDSGRPAHWRTAPHHRQSSSLLPSSSYSLGQPKRMIIGSGFSIRRQMLANIQRFICSIWSTKPPRHHRHTACHVDFDYKSTSPSRPYCSVWCRCSC

SEQ ID NO: 164956 - protein, 86 aa, Oryza sativa
  unsure (1)..(86): unsure at all Xaa locations
  Clone ID: PAT_MRT4530_63806C.1.pep
MARLAMTVRRAMQGQRAVGDTMAHSSRSGDQREGGVAAGTACGDRAARCGRPARDAGAHSCRSGGXDGPPRRWSSGRRGSRQPCGV

SEQ ID NO: 164957 - protein, 68 aa, Oryza sativa
  Clone ID: PAT_MRT4530_63807C.1.pep
MGEAKAESTRTGHESKQRRRAVEQQHTHLPEEAEKRDEPRPEGSEAARYTRPDPLDSSSYSSSFTSPI

SEQ ID NO: 164958 - protein, 921 aa, Oryza sativa
  Clone ID: PAT_MRT4530_63808C.1.pep
MRRPRSRGAAKQTRLREADEIRLLEAWIDAGKPARGTRPPPLSKSSSSPADTAAAKRGAKGAGGVPSKAAGEHPEYGACARFDELPLSNKTKDGLRKAGYTEMSEIQRAALPHALCGRDVLGAAKTGSGKTLAFVIPVLMSAATLNLGSSLEQEEASECIHCLAEVVSKFPVKPFAAATLCQVCLMNVQWQKRGFPLPPRAYFDPAILATAILVLGRRTHFGAGSAVRKWIGTEESTDLIKVSLPGFTKSATSSAYIETLQWSGPDGREDNSICFILTGKLKLFSKALEKLYRERWGPEDGVGCIVLSPNKDLAGQIFNVFQKVGKLHGFSAACIVGNRKGLDEEKAVINNMNILVCTPGRLLQHMGETTNFDCSQIQILVIDEADQVLDKNFQEQVDNVVSQLPKVRQTLLFSATQTKSVKDLARVSLKDPEYISVHEEATTATPDTLEQYAMIVPLEQKLNMLWSFIKRHLKSRILVFLSSVKQVKFVYEVFKKLRPGISLRCMHGRMKYEVQQAIVAEFKEGHSVLFSTDIFARGLDIEDVDWVVQVDCPENIALYIHRVGRTARYNKRGKALIFLCPEEEKMLEKLKAAESKIPIHIKKPNTEQLQQISQNIASVLVQYPNLQQLGKRAFVTYLKSVYLQSDKEVFDLSRFSMENFAAYAASLGLPVTPKIRFVSHKKNVPKKYMGDIDVKRMKRSSKPEVIEINPQAKSNLIEDDGDYDILYPKEQQTDVNMADGLDDVLYPKVSTADTNNEPEKVTQLGNKSVKKKKLKINVHRPLGTRVKFDDEGHTIPPFASIAEEVGSGDVIDKDKISQRYAEMLREMQEHDKEDKLEHKRILREKKLQKKLKLKRKRNEEMDAGSENSGSESDRDQRTASKGKKRYFNSDDEEGSKDAAKDGDVLAQQEALALKLLSKMHS

SEQ ID NO: 164959 - protein, 67 aa, Oryza sativa
  Clone ID: PAT_MRT4530_63809C.1.pep
FFHVRCWKRQASVFTLKAVKKGLYASHPGEVNWSSLNEQPLVRLLLLIITGSHFFFFFFFFFFFFFL

SEQ ID NO: 164960 - protein, 468 aa, Oryza sativa
  Clone ID: PAT_MRT4530_6380C.1.pep
MKSRHGAAKRAPEKKPGIFQLDDIPENAVFMIHQLLSLRDAARASLLTRKWLRVWRFYPNLEFTTKALGLKKRIHKVQRRAKFVSCVNTVIRHHAGTGVKSFIIKKNLNNQKYTHYLDRWMYFAVSSGAKELTLDLRPQRFIHYRNIQYNFPSSNFATPMPTSVEHLKLLFCYLRPSPTFFGLSNLKTLELSFVRITKEDLESLLSYTFSLQELKLSQCPNIDHLRIPDVPSKLNYLDIDLCWIRALEIHIQNLVIFNYHGSVRFRIIQGEGSLFKEARFQFSCGDAIEYAITEMAPALPNLETLFLIGFSKMVIPTRDPRHRFHCLKHLQLKMIMLSKKYNNLCLVSFLDAAPFLESLIVHVCNGSLYYPGKKTDLRRLEKREPHKNLKFAKMTGFDGERSSIELALHILESSTNLECLILDPRKYKSEWKYIYEENLRDVQWRVHNFTISEYIAEAVPSHVKLLFS

SEQ ID NO: 164961 - protein, 504 aa, Oryza sativa
  Clone ID: PAT_MRT4530_63810C.1.pep
MDTFFSAVLGDLLGRSISFIVDSYYQQHQGVEENLQKLHHVLLRIQAIVEEASSRHITNQAMLLQLTMLSNMMYRGYYFLDNFRYRIVRPHAQDELGDRSLGMSPFSPFKRLCFSTRTRKIVSEVLERKELQKMLGHLETIVSDMQEFVVFLSSYPRMGRQPYCSYLLLEKCMFGRQAEQERVINFLLKPCRPGAEGCDVLPIIGPGRVGKSTLVEHVCRDERVRKYFSTIVFYSPDGIGGEYHALLTDTVVIKHQNPSSTEQSLLVIELSNDMDDETWRRILHRLRNHITPVSKIIITSRSKNIATFGTTGALQLDFLPKEAFWYFFKTIAFGSSNPEEEPKLAAVCMEIAVLMNGSFIGAHVIGGILRSNLSAQFWYTFLEYYRYFTGWYIHLQGEHQSDMFKKRSGLTYIWSYKNWSAVTATFHLYQISSANLNDLPVIRTSELLTRDIKLEGKFDALEWRSSVPPYYSYMVHHERRARPATSGARRGGTPTSSTAASSGR

SEQ ID NO: 164962 - protein, 462 aa, Oryza sativa
  unsure (1)..(462): unsure at all Xaa locations
  Clone ID: PAT_MRT4530_63811C.1.pep
CDLPCSERTAFRTFGDDREPRFWNLRNDERGAAEADGEGTTSAAILERRRDTAGTRLDDAEXRGRRTRTAXRRDERHDDRERREDEDDDDRGRRGGDEGQPAQRLRGGGDGVEHAAAMLVKVVVQRGDEPTRRNGWLARRRRSGELRATPQPGRRRGWRYSTDRGGSDVGRRSGEAAGMAGDGGVVATPLVVGEDASLVISPRNGGEAGEEEAAATPGEVTAQPDGARARRERRLEAAGAKEREGRRRERSSGGLRGKRRASRGRGSHCDAGRGDGTAGRCTGEVAQAAGGGRRRGREMRAAGRGGEATGERGRGLKLENRSRGFHFIGEEREPATGKVGTAAEKAAGGHGSWPELARAFPAIGGTIQGGNWGELKRIQWGLIPPNQFGKKGIDSRGFRGGTALGFRGERERRPAGGGRRPHVLRACGEQLGVGQVLFAPGVEDASGAMRSLGVLSFRETLK

SEQ ID NO: 164963 - protein, 284 aa, Oryza sativa
  Clone ID: PAT_MRT4530_63812C.1.pep
MAIRGPEASSFFPLTLVFSVGFFCARFFLDRLVYKPLAAYCFSSKASKLMNDEVRQAKIVKFSESIWKLTYYGSVQAWVLLIIKQEPWSLDTMQYFEGWPNQYMTSSLMLFYMCQCGFYIYSIFALVAWETRRKDFAVMMSHHVVTSILIGYAYLTGFFRIGTIILALHDASDVFLETAKLCKYTEKELGASLFFGLFALSWLLLRLIYFPFWIIKTSSYQSIISLRKLEKFPTTLYYIFNTMLLTLLVFHIYWWKLICLMIMKQLNNKGQVGEDVRSDSEDEE

SEQ ID NO: 164964 - protein, 247 aa, Oryza sativa
  unsure (1)..(247): unsure at all Xaa locations
  Clone ID: PAT_MRT4530_63813C.1.pep
GAPGGGSAGGRAGPAVGGVAARRAAAPRDEAWERQRRMGEAETXRRGNDFGGDPWTKARRGRHKAXXRGGEDKDDDGAVAAHLTDVDDGRERLDGGTNATTTGNDERTTTTTTGAGEEAMRAAGSXFGRRRSRAGEEDGAAAPTEVAATSAGAQARRQGWLETVEWWRHHXRRRGRVSGDFPMKRRRSWGRGGSCDAGRGDGAAGRCTGEAGGAAGGRPAPEREKEKAGRGGAATGERGRRLARGPH

SEQ ID NO: 164965 - protein, 326 aa, Oryza sativa
  Clone ID: PAT_MRT4530_63814C.1.pep
MPTGFAFAITCRSGHHDHWATGSSTRINSNIADAQRLALRGISGVGGGVWTDDGHPKRKAEGRRRPARQGTASSQEARDCLQPSAQPAKRRAAGPPQTEPNPPDGKRWLVTRELEESTGSTTRRALRNLQMYDKVEVTSMAVRSLMVAWELDEGVSIRDLDKARGDGGGRGEEEINLCHQPLILEVAQGLVGYGFPAPEPDSSPPHRAQQRQTTARRRAAVPCRDRPEPTTASTAAHMHPMAVAVAAAVSCPRLVPGRIPLSAASVAVARGRGCGVAVRARGQSAATPDPAAILRWPAVVTTAAAEEDGEGDFECGVLGCGFRVGL

SEQ ID NO: 164966 - protein, 34 aa, Oryza sativa
  Clone ID: PAT_MRT4530_63815C.1.pep
LYCRPLRTSARTQEAARRDNLQLRCNQIHCLYLH

SEQ ID NO: 164967 - protein, 67 aa, Oryza sativa
  Clone ID: PAT_MRT4530_63816C.1.pep
VQLLLNFIIINIPILPLSLSIHSQSSIINSIFIFSIYLYLYYNFYIHPSIVKYSIFMMLHINLFRSY

SEQ ID NO: 164968 - protein, 122 aa, Oryza sativa
  unsure (1)..(122): unsure at all Xaa locations
  Clone ID: PAT_MRT4530_63817C.1.pep
VFLVCKTCLCSLPCLYKLSCLCMQICIFIYIYICVYIYICIYICVCVCVCVCVCXLCVCCVCVCVCIYIYIHMYIYIYICIYICMYVCMYVCMYVCMYVCMYVCMYVCMYVCMYVLSYSIQW

SEQ ID NO: 164969 - protein, 57 aa, Oryza sativa
  Clone ID: PAT_MRT4530_63818C.1.pep
MASNDDRAVNLGGGRLEEENLLGTKTREMDKINIPSRTEGDEWTILITVITKEHPYN

SEQ ID NO: 164970 - protein, 190 aa, Oryza sativa
  unsure (1)..(190): unsure at all Xaa locations
  Clone ID: PAT_MRT4530_63819C.1.pep
ENAPKKKYHHHLGXGGYSVAVPKWXEMEASLIERGIEPVTAKWPDRSKFWYYAHGGTLNPVVVSLVFTDQIREAASRLTDAVEASSQGTFRPDREKHELSLALQIPEHPGRTRGKGVVPSNIGFKKHIHMYRSRMRSKIDTEAKIADLDYRVSSYELSMQEEVARKVDERMAAHRCHDPQPYIPHVIISP

SEQ ID NO: 164971 - protein, 82 aa, Oryza sativa
  unsure (1)..(82): unsure at all Xaa locations
  Clone ID: PAT_MRT4530_6381C.1.pep
MVVFLLHQTISLRGRVPRREERGRRVCHSGGHITMRLTVKSAXPKSILYGPDRPKYLAPFLEQTPSHLTXELTGDYRWDTVG

SEQ ID NO: 164972 - protein, 45 aa, Oryza sativa
  Clone ID: PAT_MRT4530_63820C.1.pep
ATVTCDEISQEQVELPRSTCTLGEMLSLQDVKNDNFINELPSVST

SEQ ID NO: 164973 - protein, 623 aa, Oryza sativa
  Clone ID: PAT_MRT4530_63821C.1.pep
MALTLRKKQLDSIVRMLHLNQQLQGSPDGVGGGVGSAEEEEAYKILVMDSPCVALLAPVLRVGELRRHGVTLHLNIDKARQQVPDAPAVYLLRPTAANVDRVAADAAAGLYASFHLNFSTCVPRALLERLASATAASRSAHRVARVADQYLDFVCLEEGLFSLAQPRAYVALNDPAAAEADITALVDAIALGLFCVVATLGAVPVIRCAGGGPAEMVAAALDARLRDHLIAKPNLFTEAASTAVASFQRPLLCLFDRNFELSVGIQHDWSYRPLVHDVLGLKSNKLKLPEKYDLDDTDPFWVANSWLQFPKVAEEIEAQLAKYKQDVDEVNQRTGGGRDGVEFDGTDLIGNTRHLMNAVNSLPELTERKKMIDKHTNIATALLGHIKGRSLDGYFECENSMLVDGTLDRTKLMNLLRGNGTKEDKLRLAVTYLLSFETPVPSDLEQVEAALRESEVDMSAFQYVKRIKSLNSQFAGASNTASKVNIVDWAEKLYGHSISAMTGVRNLLSDGKQLAATRAVEALMEGKPNPEVDNYLLFDPRAPKSGTAGQFRGPFREAIVFMIGGGNYIEYRSLTELTQRSQTTKQVIYGATEILNGVEFIQQLSELGQKAGLGGVSSSLPPQ

SEQ ID NO: 164974 - protein, 176 aa, Oryza sativa
  Clone ID: PAT_MRT4530_63822C.1.pep
ILYSPTLSFSLGTNIIDQVLVTAATEIKVHHLSDQNIPYNHPKCATGKNSSLLATTQLSASNRTATLLVTTPTINVSVSKCFASPGGSAFPVRTAQLLGGRGRYRRNKTARMLNLCIRGQDTERSAILSGSNVWWGKGWSTIVVHCSNISLFSGSEVFKCTLFVSRFISYFIYIGS

SEQ ID NO: 164975 - protein, 362 aa, Oryza sativa
  Clone ID: PAT_MRT4530_63824C.1.pep
RPGPQNPSPAAAIAAIAAAMDPSQPSGSSADASASSSSSSSSSAVENLAAGMAAMSLQDRFELLRGIGEECIQEDELMNLLQKKPVPICYDGFEPSGRMHIAQGIVKTINVNKMVRAGCKVKIWIADWFAQLNNKMGGDIKKIQTVGRYMIEIWRAAGMNLDGVEFLWSSEEINKRANEYWPLVMDIARKNNVKRIMRCCQIMGRNDSDELTAAQIFYPCMQCADIFFLKADICQLGMDQRKAQVNLKIKQAFCPPNIVDGNPCLEYIKYIVFPWFETFEVVRKEENGGNKTFANMNELIADYESGALHPADVKPALAKAINQILQPIRDHFKNNSEAKVLLNTVKNYKVKTEDTSSSPQAS

SEQ ID NO: 164976 - protein, 76 aa, Oryza sativa
  Clone ID: PAT_MRT4530_63825C.1.pep
GTRPPTRPDSSGSLPQPPRIDPTERTGNRGMRGLRPKHSTADAKAAFTGPPTTAPTRPTDPPTRENLDYKKHQTTR

SEQ ID NO: 164977 - protein, 40 aa, Oryza sativa
  Clone ID: PAT_MRT4530_63827C.1.pep
PISVVAPELSSCILWNRVLFCSMVCFVCHFDILPHEPSIP

SEQ ID NO: 164978 - protein, 422 aa, Oryza sativa
  unsure (1)..(422): unsure at all Xaa locations
  Clone ID: PAT_MRT4530_63828C.1.pep
ASPNHPHHAKVSPPPLKRQWAGQLDTPVDPTPSRPSSPLVPRKGSSYTSDQAGTHSRLXPGLTSVDAGAPAGGPRMSAAXGGWSTVDRDHAAARGRSDAVIGGRARLGSAQSRLAGHGERRQRAVAGDGKRRRGRQXATGAEAAAHGPCGCAAAAGGRRGKGKRGGGGPHRGFASAGREVRGGERVHGEQGCRPKTGKWKSSPAREGDGVPVGFRQREAVAEMTHAAVXASGGGGFSGGGARLEAAASGGASGERRGLGRRHGRGWRERKGGEEARGKDFIGTGEADVAGDGPYVAGDVGEWRERXGFKIESAPCERARESGRGGGVGRRCGREVRAEXGARIRRDTTAAWGGGAPAWAAVAAGRGWLEVGDDLTVGPHLSASQRGEKGRGPAQEGEGXRGRRGGLGRRPKKWEKRENKKKK

SEQ ID NO: 164979 - protein, 98 aa, Oryza sativa
  Clone ID: PAT_MRT4530_63829C.1.pep
RQWMRGRQQAGPACQRHEAAGPPWTGTTRVVHRRSTGPTVRIGPRPIGRRDWRQGSARLGTKPVGWPWGEAAASGRRRRQAAAREAAATGAEAAAHGP

SEQ ID NO: 164980 - protein, 408 aa, Oryza sativa
  Clone ID: PAT_MRT4530_6382C.1.pep
MSLPRRFLNLIVENGADPGIRSLSCIDLTRYPLFHPPLPTATTMEACSSSSIISQQQQTADAFNTKNKHADGAAFMVQEKFQLPDPIFSFKAQAADPDYGWNIDCFPLADRKVVCVDQSGRAFLFDADTDQVVTMPSLNKPKWRPFSLFVPGTDNDGGDGEGNSLYIMEKSPKSEAGCSARCIDQFEAFVYRKPTVTASFMSWYCQLLPPPPYVRDYAYSQRRHRITSYAVVAGDDDGSWRILVSAEDAGTYCLDVASNMWSRVGEWTLPFLGKVEYVPELKLWFGLSAEDQLLAAADLSAMDSQPELVSSWKELEQNRVWQVTQDPQLVNLGSGRFCIARFIEKLELGGDFDNKLTWQDFVILTGVEVSEPFDLPAEAPRNQRTSMEQSKERISKAKRSEPEQGNDG

SEQ ID NO: 164981 - protein, 66 aa, Oryza sativa
  Clone ID: PAT_MRT4530_63830C.1.pep
WFTYRRRQTTKDCRLADQPVLLIETTQLETKGRFISYYQFASHIQHKLAQQCHSSKKLSTTFGFVA

SEQ ID NO: 164982 - protein, 122 aa, Oryza sativa
  unsure (1)..(122): unsure at all Xaa locations
  Clone ID: PAT_MRT4530_63831C.1.pep
AHWPPCGPCLVVCVCGGPAHLHGRPLTLLPGNYVRPEXERPRLADVLSDXSIPVVDLXNPDRVKXVSQVXXXCRSHGFFQVLNXWGAXGAXHLSVLXVXHXFFXFXVGXEGXKXYXDDXXKK

SEQ ID NO: 164983 - protein, 555 aa, Oryza sativa
  Clone ID: PAT_MRT4530_63832C.1.pep
MSSSQSLLLLAAPLSPPTLPRLVPPPPTSAPRLPRLAANLSRPPPLAISSPGCDGGGGGGGGGGGGGWWRQGGSGPPDPGDGWWRWLQSLHPELLLLFVLLHSGAFAAIPAALAEAIGGSGGREGASVWEVRGGARTLLVPDPTGTSYVVAGDGRRKQAEGEDAEKAGAGRAELAALRRQLELSWRRCATVAVQLLLPDGYPDSVSSDYLQYSLWRGVQGIASQISGVLSTQALLYAVGLGKGAIPTAAAVNWVLKDGLGYLSKILLSKFGRHFDVNPKGWRLFADLLENTAYGLEILTPVFPHLFVPIGAAAGAGRSAAALIQAATRSCFYAGFAVQRNFAEVIAKGEAQGMVSKFLGIMLGIALANRIGSSVSLALISFAGVTAVHMYCNLKSYQSIQLRTLNPYRASLVFSEYLLSGQVPSVKEVNDEEPLFLNLSIGTSRKLLKGFGLLDPALKAWSAGRDWRWTGGGWRYGRQSAGTGWPTTWEPQGRGGGVWLGAAAVEEGGGWEVMCHRVGVGEGARVPCQGGDWEGELESYLSANRFGAEVPNLSAK

SEQ ID NO: 164984 - protein, 62 aa, Oryza sativa
  Clone ID: PAT_MRT4530_63833C.1.pep
QHERLYDTSRDPMETPTLTTLLKPPLPTVPLARPSLPQVNLSTALNAFVPRPLEIQLRTRHP

SEQ ID NO: 164985 - protein, 65 aa, Oryza sativa
  unsure (1)..(65): unsure at all Xaa locations
  Clone ID: PAT_MRT4530_63834C.1.pep
FXLLPPNWXXGGFSSXXXNXXXXQXFSPIHRXXLKXTXPMKRRRXXDXXIRXKLGPGAPXSKVEP

SEQ ID NO: 164986 - protein, 618 aa, Oryza sativa
  Clone ID: PAT_MRT4530_63835C.1.pep
MPPTPPPELDLLDTEPEFAEVDPTARYGRYTEVLGKGAFKTVYKAFDQLEGLEVAWNQIKVGDILRNNDDLERLRSEVRLLKTLKHKNIIKFYNSWLDKKNNNINFITEVFTSGTLRQYRIKHKKVDVRALKKWSRQILSGLVYLHSHDPPVIHRDLKCDNIFVNGNQGEVKIGDLGLATILDNARSAHSIIGTPEFMAPELYDEEYNELVDIYAFGMCLLELVTFEYPYCECSNAAQIYKKGEKPSSLAKIEDPEVRFFIEKCIAKASQRLSAQELLMDPFLRDDGEKIFYPLQSNTKASDGAGSSNSSMGYKYDRDASSMAIREHTGSFAEEHPSDRYIHSTMDPQAAAGRIITVESQMKDLNTIFLKLRIADSTGHAQNIHFPFDIEADTSISVATEMVVQLDLTDQDVTAIAEMIDAEIRAHIPDWALEESVENQGDERAHSETDSSEADDETSELRNEPNATHNGFVQEHLPSGHKYWSDSPRRNIEMSHSAVEPHIGGNMPNGILKKNDTDDTVSNLGTSVDLPNPSMIDRKSGVASVSTSPQSFDDEHIEADVSERLVNLLAQQQEELNVLRRKHKADIEVILKGVPEEHREETLTRCRLKADERNRSDKP

SEQ ID NO: 164987 - protein, 49 aa, Oryza sativa
  Clone ID: PAT_MRT4530_63836C.1.pep
MAAGRLEVEEDPTCGPHMSVSWRDNAGTHLRASGWLASGLRHGRRLDPG

SEQ ID NO: 164988 - protein, 124 aa, Oryza sativa
  Clone ID: PAT_MRT4530_63837C.1.pep
MAQIGKEADRTARRAAARLGSASKPAGQPWRAAAARAVTGGGQRERRRHMARRAVARIGARREWKGKRRGGGASPWDSAGVGEDDRGRWRQAADGKARGMDETALDLASPTTATERLDGGPSSS

SEQ ID NO: 164989 - protein, 170 aa, Oryza sativa
  unsure (1)..(170): unsure at all Xaa locations
  Clone ID: PAT_MRT4530_63838C.1.pep
APHVILFLHSYLYTLRPPVLRADRVGSTAARRCSGADSILINAGADSTEELDAIHSDKAKALHHTYRIGELITTGARRSSPAMSGRLFRFALPRPXDQVIGLPAGKHIFVXGLVLPVGAYIDVKGPLGHVEYTGRGEFVINGKPRNSRAPAAGGEEPRAEVEGGDNGGLH

SEQ ID NO: 164990 - protein, 79 aa, Oryza sativa
  Clone ID: PAT_MRT4530_63839C.1.pep
MAPTSKLSQGIKKASRSHTYHRRGLWAIKDKHGGAFPKAEKPADAGGGDGPKFYPGDDVKPRQPSTRKPKPTKLRSSIT

SEQ ID NO: 164991 - protein, 284 aa, Oryza sativa
  Clone ID: PAT_MRT4530_6383C.1.pep
MAPKKEQPVKEPPASDEFDLVLNDLPESYKKLMEDAIPTRLEQIIIQEAPSNSKGKKLFSKVAERLYTPKGGTFLVKLKPTKSSPDEEIVTLLFRWKDLYFEAFHAKGKWYRMSDAEESLPPRSQLHYSKKEKEGVFNMNNISTSYNDVGGHNIEVGRRAFKNCHQSLLMAEELVRQKRLKEELGSGPLSLPVVTISESIRFPLLQRWVLGTFSAPPTAKSEKKVPKKFSCEFNEWGKYSRALFTQELPVGCELTFAQIAEKLRVLKYRAAWVPQPAQKHVKDV

SEQ ID NO: 164992 - protein, 431 aa, Oryza sativa
  Clone ID: PAT_MRT4530_63840C.1.pep
MKNVVITKSSPELVGLSTKPAPPPPGDISLSSFDEALAFAAFTSFHIFTNGIVEPAMAIKRALSQALVYYYPIAGRANFAAGERRLRISCTGEGVGFVAATASCALDDVKLFDPPFAAVLKELAVDYPAEGCGEDDPLLLMQVTEFACGGFVVGVTWNHVVADGLGIAQFLQAVGDLARGLPRPSVFPVSCGDGSLPALPPLVAAIEKTMLSLETKRFAYLDITIPSTMIERVKAEYAAAAGNVDSGEPCTVFEAVTAALWRSRTRAVISSDDPDAPAPLVFAANARKHVGAKEGYYGNCVTSQVAVPTSDEVANGDLKHVVRLIRRAKEEIPLQFKNAGGGGMNGKRVKQLAGVLFGYSAFYVASWRNIGFEAPDFGGGRAARVMCHFEPTGVPSCVACLPRDGGGASVLSLCVRDEHVDAFLAELATLG

SEQ ID NO: 164993 - protein, 48 aa, Oryza sativa
  Clone ID: PAT_MRT4530_63841C.1.pep
LLHLNNYWGKQYLVGVPYTLIIVNNTRSGICLFQCLNQDVNSIRWHDL

SEQ ID NO: 164994 - protein, 108 aa, Oryza sativa
  Clone ID: PAT_MRT4530_63842C.1.pep
MTSCGELARVWAAIRSGGDPVANDGMQKSTMMWKESKVGGEARRWSLGSRNKDGREWRGWCAVSSLSSGASIDGVIELEDATTTMDLELEVAGAADGVGLIELTGERG

SEQ ID NO: 164995 - protein, 83 aa, Oryza sativa
  Clone ID: PAT_MRT4530_63843C.1.pep
MELQTSPGHHSLNPAKPSRHCLHYPTVTKNPHGIGTKWSRLEDSFLLPHLRLPTPSISLSLSGELRHDSFCLETCHATFNQCV

SEQ ID NO: 164996 - protein, 896 aa, Oryza sativa
  Clone ID: PAT_MRT4530_63844C.1.pep
MESSPATPWTPAQGKDVLPHQSGFDDLMNSEINPIVAVDGEPVVAVDSAYVEATAMDHAVITVEAVDAGVVAHLEQPSTPQPTSSPSIAESCKEHLKPMVGMIFDTLTDVEKFYKSYAHEAGFSVRVGQHKKQNEEILFKRYYCSREGYIKERVKDVSDESGKKKRKTPYMMETRCGCEAHIVVKLGSDKKYRISSMIGEHSHGFVSPDKRHLLRSNRTVSERAKSTLFSCHKASIGTSQAFRLLQVSDGGFQNVGCTLRNLQNYYHDLRCKIKDADAQMFVGQLERKKEVNPAFFYEFMVDKQGRLVRVFWADAICRKNYSVFGDVLSVDSTYSTNQYNMKFVPFTGVNHHLQSVFLGASFLADEKIESFVWLFQTFLKATGGVAPRLIITDEDASMKAAIAQILPNTVHRLCMWHIMEKVPEKVGPSIREDGEFWDRLHKCVWGSEDSDDFESEWNSIMAKYGLIGNEWFSTKFDIRQSWILAYFMDIPLAGILSTTSRSESANSFFNRFIHRKLTFVEFWLRFDTALECQRQEELKADNISLHTNPKLMTPWDMEKQCSGIYTHEVFSKFQEQLIVARDHCIIQGISKSGDMKIVTISSLFEKERVVQMNKSNMFGTCSCKLYESYGIPCRHIIQVLRGEKQNEIPSIYIMKRWEKICKRFDQIFNFTEKCSLMTKNSEQGMEFLYSSLSDLVEPLQKIIPAAIVNKQDEFESFLGSKIPDEVEIHPPNIKSKGPCKRIKKSKEKKAPRKRKCGKCKQSLLFRHYSPRRGCLLFRHNCHHSISDPVLTEVMAGLPLGACCTCVTLPLTAHGVLVIVGSEAPSQFLPVMRSFQLSAAADDAPRCCPWLQPYPTELGSDATIEDISLAAASKATSDDHRMAGEAQRGAHEAARRI

SEQ ID NO: 164997 - protein, 86 aa, Oryza sativa
  Clone ID: PAT_MRT4530_63845C.1.pep
MIHHVSPRETANEQTPLPSSRRAPRYGHTDTGGQHKVGPTNAHTAQSQWPLTRRCNPGGPSEEKRTVPRGRETAYVCAGQVGPIAQ

SEQ ID NO: 164998 - protein, 124 aa, Oryza sativa
  Clone ID: PAT_MRT4530_63846C.1.pep
MPMEGIGAGAARRTTRGGVGSSSLASRSTVGRWRVPSGLGEQDRRREDDERELVPPATTRRLQTHHASSSRKFRIRAMAGDGERGAVMPYFVPVSRLLAPQCPQRKKLAVARRADRDVFSAIDL

SEQ ID NO: 164999 - protein, 80 aa, Oryza sativa
  unsure (1)..(80): unsure at all Xaa locations
  Clone ID: PAT_MRT4530_63847C.1.pep
ERIISDVGNSAESVRKXIKFIGYYIEXLHVLINSNYPANGQSDNPIEMSDNLHPPDFRDTISSSASALYYPHPHSYPPDF

SEQ ID NO: 165000 - protein, 106 aa, Oryza sativa
  Clone ID: PAT_MRT4530_63848C.1.pep
MTSHPNIAKARPLLPQAPLRLAKVPPWAYLATFYSIPRQCNAGLAPSPPTSSHDNAVLGPSHHLFGGLDEASLPSLPLAPADEDNIDGVEMPNRGGGLELSPMHRD

SEQ ID NO: 165001 - protein, 72 aa, Oryza sativa
  Clone ID: PAT_MRT4530_63849C.1.pep
AFSYQRSWQAVRVGYAFRVPPGGRGHNPSLLPERLPGFCKKVYWVNGPLGENPFLGNVGKNMWKRNPSDWML

SEQ ID NO: 165002 - protein, 41 aa, Oryza sativa
  unsure (1)..(41): unsure at all Xaa locations
  Clone ID: PAT_MRT4530_6384C.1.pep
SPTRFTRGEHFSTDTGSPDAYTRCRLKTRTXRGFSYRVPSI

SEQ ID NO: 165003 - protein, 181 aa, Oryza sativa
  Clone ID: PAT_MRT4530_63850C.1.pep
MELSVIWGMADREEYILLLHKVTKLHRINQIISSVAAAANSSSGVGDTYVPGTDAAVGHRHGDSTGCSRCPAPAIAASIQSNYLPVLLTPHHPLNNSKNLFSISSMRSAQQAQPKKQLSAMIQQPYSSEKGVTRSMIQTSGNMNRHNETTALPSEYLISSGYFSGALSEGMMSWLLLQNNT

SEQ ID NO: 165004 - protein, 531 aa, Oryza sativa
  Clone ID: PAT_MRT4530_63851C.1.pep
MAAPPLPLVLAAAAIASLVILVLVVFACRRWRRAVVAAAPQPPPRAAADVVAASPVRSQNEDLNKPLLEILDDHSSQSNTFPGNVVGESSKVQTSRSDTSPRSHGISDSGRTYPADSCTPQGSNLDVEVIAGPSHGISCSRQSTSPTIPITLGRVPPSDLVLKDSEVSGKHARINWNAKTLKWEIVDMGSLNGTFVNSRAVHHPNVGSRHWGEPAELADGDIITLGTSSKLSVQISLQNQRVPAGIGMASDPMVGRRSGKKLAMEDISFCQCPLQGVEQFGLFGIFDGHGGDGAARAVSKIFPENVATLLSHHETKEKVLSYSDASDVLRYAFTMTEAAIDHEYEGCTATVLLIWFDQKKDCFAQCANLGDSACVMSVNGKMIEMTEDHRVASVTERARIARAGQALKAGEVRINGLNLARMFGDKFLKEQDSRFSSEPYVSQAVHITKACTAFAVIASDGLWDVISTKRAVQLVVEGRERNSGDSASADKVRLQKPPVVSLTEMEYCGICQGLESSGVTLKFSVLIQQDA

SEQ ID NO: 165005 - protein, 1142 aa, Oryza sativa
  unsure (1)..(1142): unsure at all Xaa locations
  Clone ID: PAT_MRT4530_63852C.1.pep
MAMDLDEPLDAEKGEAALRRLRDADPALYLSPSADLAAAAREASKHLYASLVPFSPAQPPPLSNLLAGPAFDAEQIWSQIELLSRPLIPHLRRQLRRLEKQPPSQPPPRTESKSADAEEKSEEEDEEDGEGDEELEELDDVDDEEESEEEEEEEEEDKEGLEDKAGNQVEDEFFKIKDLDKFMVKGEEAEYGGGAKQGKKKKKTENWMEEDSDEEEEEDLDEDEDNEDEEDDDEHLDLEDFDDEEEEEEGAVGDIMYKDFFEEADDQKVRKKGGSKKVQFKDEPDEPEVDDKNDDGNVSQDEQGLSTHEKARLKMHAKIEEMEKANLEPSMWTMQGEVNASSRPKNSALEVDLDFEHNVRPAPVITEEVTASLEEMIKKRIIEGHFDDVEKPSPLQFKSPKEQKDLDESKSKKGLAELYEDDYAQKAGLAPAPLSISDELKNEAKTLFKRICLRLDALSHFHFAPKPVIEDMSIQANVPALAMEEIAPVAVSDAAMLAPEEIFEGKGDVKEEAELTQAERRRRRANKKRRYAELAVEQCCAVLLLETGLAVAILANVICNNDTLEYAQWCTVNQQGRANAHSPPSPILLLLVEGVRVPLPRTIRSLALVAMITVVDLYHVLTAVVPLYVAMTLAYASVRWWRIFSPDQCSGINRFVALFAVPLLSFHFISTNNPFAMNLRFLAADTLQKLIVLALLALWCRLSARGSLDWLITLFSLSTLPNTLVMGIPLLKGMYAAAGAAAGADSGSLMVQIVVLQCIIWYTLMLFLFEYRGARLLVMEQFPDTAASIVSFRVDSDVVSLAGGGGGAAELQAEAEVGDDGKMRVTVRKSTSSRSEAACSHGTQSHSQSMQPRVSNLSGVEIYSLQSSRNPTPRGSSFNHAEFFNIVGNGKHGDEEKGAAGGGGHSPQPVVGKRKDLHMFVWSSSASPVSERAAAAAAAGAVHVFGGGGADHGDAKGAQAYDEYSFGNKNEKDGPTLSKLGSNSTAQLRPKDDGEGRAAAMPPASVMTRLILIMVWRKLIRNPNTYSSLLGVIWSLVSYRWGIEMPAIIARSISILSDAGLGMAMFSLGLFMALQPRIIACGNSLASYAMAVRFLVGPAVMAAASIAVGLRGVLLHIAIVQXIFGMLIALPITLVYYILLGL

SEQ ID NO: 165006 - protein, 1014 aa, Oryza sativa
  Clone ID: PAT_MRT4530_63853C.1.pep
MAMDLDEPLDAEKGEAALRRLRDADPALYLSPSADLAAAAREASKHLYASLVPFSPAQPPPLSNLLAGPAFDAEQIWSQIELLSRPLIPHLRRQLRRLEQQPPSQPPPRTESKSADAEEKSEEEEDGEGDEELEELDDVDDEEESEEEEKEELGLEGEAGNEVEDEFFKIKDLDKFMVKGEEAEYGGGAKQGKKKKKTENWMEEDSDSEDEEYLDEDEEDDDEHLDEADDQKVRKKGGSKKVQFKDEPDKPEVDDKNDDGNDEQGLSTHEKARLKMHAKIEEMEKANLEPIITEEVTASLEEMIKKRIIEGHFDDVEKPSPLQFKSPKEQKDLDESKSKKGLAELYEDDYAQKAGLAPAPLSISDELKNEAKTLFKRICLKLDALSHFHFAPKPVIEDMSIQANVPALAMEEIAPVAVSDAAMLAPEEIFEGKGDVKEEAELTQAERKRRRANKKRRYAAMITVVDLYHVLTAVVPLYVAMTLAYASVRWWRIFSPDQCSGINRFVALFAVPLLSFHFISTNNPFAMNLRFLAADTLQKLIVLALLALWCRLSARGSLDWLITLFSLSTLPNTLVMGIPLLKGMYAAAADVDSGSLMVQIVVLQCIIWYTLMLFLFEYRGARLLVMEQFPDTAASIVSFRVDSDVVSLAGGGGGAAELQAEAEVGDDGRMRVTVRKSTSSRSEAACSHGTQSHSQSMQARVSNLSGVEIYSLQSSRNPTPRGSSFNHAEFFNIVGNGKQGDEEKGAAGGGGHSPQPVVGKRKDLHMFVWSSSASPVSERAAAAAAGAVHVFGGGGADHGDAKGAQAYDEYSFGNKNEKDGPTLSKLGSNSTAQLRPKDDGEGMAAAMPPASVMTRLILIMVWRKLIRNPNTYSSLLGVIWSLVSYRWGIEMPAIIARSISILSDAGLGMAMFSLGLFMALQPRIIACGNSLASYAMAVRFLVGPAVMAAASIAVGLRGVLLHIAIVQAALPQGIVPFVFAKEYNVHPNILSTAVIFGMLIALPITLVYYILLGL

SEQ ID NO: 165007 - protein, 129 aa, Oryza sativa
  Clone ID: PAT_MRT4530_63854C.1.pep
TRPRAEHGGRSLQTLGLAMAKNRNKKSKKCGGGGVAAMDTSEGAPAASTAVGAPEPMDTSEGKQTSSVSVALTSINKKIKKGVQIKRSQNVRKMKAVARAISKNEKAEEKVLKAKSKKSRVQSAKSLYD

SEQ ID NO: 165008 - protein, 102 aa, Oryza sativa
  Clone ID: PAT_MRT4530_63855C.1.pep
ANTLFKRICLKLDALSHFHFAPKPVIEDMSIQANVPALAMEEIAPVAVSDAAMLAPEEIFEGKGDVKEEAELTQAERRRRRANKKRRYAGSHKERPAKMQKD

SEQ ID NO: 165009 - protein, 212 aa, Oryza sativa
  Clone ID: PAT_MRT4530_63856C.1.pep
MAKNRNKKSKKCGGGGVAAMDTSEGAPAASTAVGAPERNLALPFLPFPRVFSGFWVSHLSFLVIAAMDTSEGKQTSSVSVALTSINKKTEDIPVLKRLDPKQTAQFFVSSRQALPKTCHLFWDKWVEVKAAVKLRRKVKLPMLHANGMVSQKRKEELFIMKIKKGVQIKRSQNVRKMKAVARAISKNEKAEEKVLKAKSKKSRVQSAKSLYD

SEQ ID NO: 165010 - protein, 191 aa, Oryza sativa
  Clone ID: PAT_MRT4530_63857C.1.pep
MITVVDLYHVLTAVVPLYVAMTLAYASVRWWRIFSPDQCSGINRFVALFAVPLLSFHFISTNNPFAMNLRFLAADTLQKLIVLALLALWCRLSARGSLDWLITLFSLSTLPNTLVMGIPLLKGMYAAAGAAAGADSGSLMVQIVVLQCIIWYTLMLFLFEYRGARLLVMEQFPDTDDSIVCLRVDYDVYSL

SEQ ID NO: 165011 - protein, 71 aa, Oryza sativa
  Clone ID: PAT_MRT4530_63858C.1.pep
FFFREKSTLLSYFIGKTRIRALAWPNFLFFLKKKIMVCQFTVFIHLNAWHFATIILAVIHGIRVVAKQRPH

SEQ ID NO: 165012 - protein, 192 aa, Oryza sativa
  unsure (1)..(192): unsure at all Xaa locations
  Clone ID: PAT_MRT4530_63859C.1.pep
GSRRKRKRNEEQRPRTLHXERENPPDGXRGASGNPEPHPPRQGLHSHSRPTIEGTDFKATRQLTRVLLHHRHALNWRIPEGNLCPTVPNRSNYTHRLQHLLSSDIIPNTTSREGKFRGFDSGTGASRTYPLLGASLHGRKPVGSDATNVAIEWAERNVNRNPHNSQPTETRKVQDNASDPCVEAEEAAKGDN

SEQ ID NO: 165013 - protein, 79 aa, Oryza sativa
  Clone ID: PAT_MRT4530_6385C.1.pep
KKKKKKKKKKKKKKKKKKKKKEKKKKKKKKKKKKKKKKNKKKKKKKKKKKKKKRGGPFNLSTFSTPFFPLKLFFFVAPK

SEQ ID NO: 165014 - protein, 3975 aa, Oryza sativa
  Clone ID: PAT_MRT4530_63860C.1.pep
MASSQQVELEAAKLLQKLIQESKDEPAKLATKLYVICQHMKLSGKEQSLPYQVISRAMETVVSQHGIDMDALRSSRIPLAGGPQAGDSSGAMPKDKEIIGSQPPMVGTDASQNMARHSASISGRVPAGPNRSDVAGADIHQGSMSQKSGRSSGMESPASLQIEDTRSMNSHDSLKSDEKTSKKSSSKRKRVDPKAAGDLHSEDNSKSDAMSTGQNIRKGKQPGKAANLLNASFGWNQNAQGPVMKNTQGSVPNLMRPGVNVEGKVNLGSQGTFNSIIPFKEQQLKQLRAQCLVFLAFRNNLQPRKVHLEIALGVGPPASEGGSAGQRGSESRMADGSGKENGNSQENPAIFGRQSDISRLQSTSTGSVADVDSASKDPEIVKKKIKIAEHEKSFEAENIQQTVPIQGTDSEMHSQETISPMPSGQLHYFQGDTRKTTPEIYKADAENLNRNLGWRSADEGDEDLSEQDDLPLSPPKYTMTDKWILDHQKRRYEENKRKALELQKAHRRISASYEKLKENVSSSEDLSAKTKSVIELKKLQLLQLQRRVRSEFLQDFFKPNTTDLDRIKSVKKHRHGRRVKQLEKIEQKMKEERQKRIRERQKEFFADIEAHREKLEDSFKVKRERLKGFNRYVKEFHKRKERIHREKLDRIQREKINLLKNNDVEGYLRMVQDAKSDRVKQLLRETEKYLQKLGAKLQGSKSMDGRVSYASDSTANDIEDESYQPQHYLESNEKYYQLAHRYQMNGLRWLVSLYNNNLNGILADEMGLGKTVQVISLLCYLMETKNDRGPFLVVVPSSVLPGWESELNFWAPSINKIAYAGPPEERRKLFKEMIVHQKFNVLLTTYEYLMNKHDRPKLSKIQWHYIIIDEGHRIKNASCKLNADLKHYRSSHRLLLTGTPLQNNLEELWALLNFLLPNIFNSSEDFSQWFNKPFESNGDSSTEEVENELPEKIERLVRCWPSAYQKLLIKRVEENLGGIGAVKIEGYLPRHYLPSILRLCGKLEMLDRLLPKLKATGHRVLLFSTMTRLLDVMEDYLVWKKYKYLRLDGHTSGQERGALIDKFNNPNSQAFIFLLSIRAGGVGVNLQAADTVIIFDTDWNPQVDLQAQARAHRIGQKKEVLVLRLETVQTVEEQVRASAEHKLGVANQSITAGFFDNNTSAEDRREYLESLLRGGKKEEAAPVLDDDALNDLLARSEDEIDIFESIDKQRREEEMIYESSNIKSVKVVRRKGELGGLDTQHYGRGKRAREVRSYEDQWTEEEFEKLCQVDSPDSPQPGGISRDADVPKVVKLEVPPESSKEPEQAKKEPASSVGDSPPAKRRRGRPRRSDASLSPVTAPPNTGKQEAGTIIDGSSSAPTTTIHSVAPDVTIDSTALSATGNPDVGTEIKGTTPDGTIKPVICTDNKGTASIAVLEGSNAKEVGIPAHSVHEPVSSSAPHPPTPATSRGRKTQAGETPRRRGRKPKSLAASAGDVILSPVVAVGSGEAYASSVVSSYPQGNVSSSHANAMAGLQKDTIIYKPAALLPEGVKGTLTPSGGDKDEMVKTPLAEDIYAGTVTTSGNANSQLPMIAHNENAGLVQGGTDQNLSVATPTIPVVSEGSTKISEVVVADKPAEKQGARRRRKKTSGTGSEDTGVSTRQRAASRRLYGIGTADIAGTDMSTGEKIGIVKEIDGSCQDTSKGLPNIISPSYEKSGYDSQPSTPIAVPINEAALPSGFSEAHATHSELHPARESISSVGHEKLAGAHLEAPPSVSFQAPVQHETRKDYVGVHSEVATTHPETITTHSSVNPVIDHKLANVQFESHASLHTSGKDITTMPSEVDSGAPSKAPGRRRKGSAREPRTRSNSATAASERRARLAGSKQPDDIKMAEMSGNPSTAVCSSTQQQEDNTLKAAHATGSVGEEQNNAENRVREVSMPAGILEAKLELTKQTDQAGHNSEQEQEMVSAAKSASANDEEHKVHEVHQIIADHNALPSSAQYTLQDKIDSSADAGLVPCDKIASVVIAVDDQDPSNASDKDAPASTEDDGNGLQSECVHVDLVLAKQDNTKVEDTQKSNQPAEQGESLEMTGSKFRSETRLEKTEETVDKSGGDNLPTIEKNDDSPIERSSPSADKIAQVAYGGEAGTETTTVEAVSAMNSDGLQDVRNALSTHGLSTNDITVASEEHRDPESHLSGEVSMSGGSSELKLESLNQSESACQSGEVTLEDTHATLDIQIPALIESEEKKSPGGDVHGSEEQHMHEVLHNTVDGSISPSNREQDKLQVHIDTNTDVDIPSSDKDHSTDIVLAGCQAPCDASGKDKLSTCDASGKDMAAPTDDDLNCLQSEDTVIPVADAKDETMLVKAIQNDEMSMGSSHGLPATIQSTDSDRLAEEGESAEITGSKFSCGMEQEKMEEPLDKSVTDNQTSSQINDGSNNMDSQKVDSSLQAADGGDLLVSRGTSVETTTAINTDASDESISVSTQSVKEASTVEIGASTNDIAPACELRKDFESHVSGCVSKPVGLSELRLEELSQTKSVSQSIVANAEETSTRSDIETPAMDASESKSPESDVHELSERVEFMGPTPSANEKSNELHSQELVKMISAAETASTEGHREKDTCEVDHKIDCTIFSPIGDQDTRNRIDGDTDCGVPSCQRNAAFDSENEVSAEINLTGSQAPCDAPNKATPAPTEDDHNGQESEDTVIGAEQGTVEVEAMQIDGISKSYSSDSHATLQSSDSNQLVNSDSKFESSKKHDKTDETSNESRGDNPTHSCTNDDSHDKNLVGCSPSEDLNEDNSAQLADGDDLVGSKDTTAAHASGLKELTSGNYVASSSSHVVQDVTSISKMESVQAGSEEIYHGYSDETIHSARIKPVVGTEITENASVASAPVITIQPDIETEAGVTASLTVLEGSIAEEVDTQVESGHDLVTSTAPLSPAPLPGESHACTDVSCPVAVEVSETKLESANHTASQLGAACTETPNALLNTLIPALPESEETKLSGSDTDGKTIMAELASSSDEHDKVHEVGNETGDDNKLPSSVAEDAVQGEIDGSADMDSQIIAGSSEAEINNSTVATIADSQIPFDPSDKDTLAEDGNGLQREGTTVDVTGSKEDDMEAEEKQMDDSHLPAALQSTESSQPTEHAAPTQDDGNGLQCEGTTVDVSGSKEDIMEVEEKLIDDISGSPSSHLPVALKSTESNQPAEHAVPAEDDGDGLQSEGTAVDVVDSKKDDMEVEEKQIDISRGSSSFLPGALESAELNQPAEHTAPTEDHGNCLQSEGTAVDVPCSKEDNMEVEDQFDGISRGPSSFSPDTLESAELNQAAEHAAPTEDDGNGPQSEGTSVDVAGSKEDNIEVEEKIDDISRGSSSHLPDVLQSTPNQRAEQECLDNSDDVNTSVVSSHAPLSGPKFTCVKELEKADETLETSDAQVADEVCLQTNDGAHNMASGSCSTLEDKNEDSSAQIADCEDLLLRKGTTVDDLDGCVEGHSGLSTHSNDEVRNLVEIVKGMNDTTAGSEVHVDPESHVSDEVSMPVAPSELKVELKNQSEPACQFGAVIVEESNVSLGIQTPALAESEEMTSGGFMHGKEVCASEQTNIGAAAEPASTKDDHDMHEVDKEIVHCTISSPIGDQENLQGNIDGKMDVGLAACQTESDFVSGNDHSRETDLAGSQAPYDASDKEDTAADLIGPKQATLEIEKMQIDGIPEGPSSVPAVLQLTDSNQPAEQERLENSDSKFASTKDQGRVDGTSNLSGGDNAKCSLTNDDSQTVNLVGYSPSEDSNDDDSVQAADSDGVLGNKEGTDDVISAACTDDVSMLKTESIDRHGSDEVDHSTAPSAAIKQESGTEVTCDASVPVSESSISKEIGTSPECDDDQVATAAPHPPTPLSDATDVSADVQIPAGISEAKLEQPNETTSPSGAATEENNTVVSTQIPTLAESEDRTPADTAIQGTEVDSAEPASVSDDENKVTAADDSALPSTGPEDTADDKIDSSADASEK

SEQ ID NO: 165015 - protein, 625 aa, Oryza sativa
  unsure (1)..(625): unsure at all Xaa locations
  Clone ID: PAT_MRT4530_63861C.1.pep
QAGPEPEVRPAKTKPEEETDPRNKEEVKTPPPLPSPPLPSPPHGRPLPRRLQRGRRRGGARRPAAWGGGGGSPPPXPPRSGRREGGGPPPPRPPRERPRRRRRRPRSRPSSPVAAMPXPPPRLSSAAAMPPPRPPRERPRRRRLRPRPPPVPPNPVRPGXTAPGCPPPPSPSEAIPTPTGLPRRRSSTAPPPLPPPLASPPLLRSTPPCRPGAPLSSSPSPXARTAAAGRTGPAAPPAPRAVDPXPPAPSSPRASSAPSSPGPSSAPSSPRPPPRRRLRGPPPXPSSPGPSSAPSSPGTASAPSSPGPSSAPSSPRPPPRRRLRGPPPXPSSPGPSSAPSSPRPPPHGRLRGPPPXPSSPGTAPTPSSPWTASRRRRGPPPHHRRRGPPPRRRRRGPPCCRRSIWEDITGSRVIDSRPPPGDSPPATARHPARPPIARRAMPPSTVERRPLRRRPSPXSAHRAVAPPVDLAXGRFAAGERPASRPPAAHRGAAIDARPSPVAPPRCLHPPAHGLTRPEPTTPPPNPPPPSPLSSPPSPPHGRPLPRRLQRGRRRGGARRPAAWGGGGGSPPPXPPRSGRREGGGVPHTSPDADGRRAPGNRKLATPPWFPPCTKPFNQFPGSPTP

SEQ ID NO: 165016 - protein, 74 aa, Oryza sativa
  unsure (1)..(74): unsure at all Xaa locations
  Clone ID: PAT_MRT4530_63862C.1.pep
ARITQSPRANCAACCGGRWNSEAPTAIRIEAWGARSSTSTLGLVXPGFTTNGSTSGIENXNVPMEGAKFQPAAF

SEQ ID NO: 165017 - protein, 58 aa, Oryza sativa
  Clone ID: PAT_MRT4530_63863C.1.pep
MDKTPSLPAVGENPSFSSSRHSPATAGAFSLPGDMMMAASTRSGAASSLSSSQHQACV

SEQ ID NO: 165018 - protein, 105 aa, Oryza sativa
  Clone ID: PAT_MRT4530_63864C.1.pep
MKSDLESLIENTLAELHLLLVHTPRHRLRVPSRPRALFLQEPLRAASDPKRCAAPAPKSVVTARRPPHRVMGTRQGHLRPAAAAGDLTSYMPLSVYTLADLRALG

SEQ ID NO: 165019 - protein, 85 aa, Oryza sativa
  Clone ID: PAT_MRT4530_63865C.1.pep
FPFFQRVGGPLGAKGPLVEPGVSPWVPYGGPGPFPFYPPHEEQKFCFLAPSFGGPPFFPKIFRGPPLWQIFARPIGGPLLFSPKN

SEQ ID NO: 165020 - protein, 96 aa, Oryza sativa
  Clone ID: PAT_MRT4530_63866C.1.pep
MDLVRKRFLSMLLPDEGVVTGDTTCGGGLCAWVWRPPAYLSSGRATCVAPKGNIGGPKLNEVAMFEYDDSDNDKSYFLRFSGQMSRCCSVVTASMS

SEQ ID NO: 165021 - protein, 69 aa, Oryza sativa
  Clone ID: PAT_MRT4530_63867C.1.pep
RQQRGGGVVVAATGGSGWLCGPCRFDQINWHAHTSKGEFWTCTGVKQISQASCFLSTHGRSLLVGEATI

SEQ ID NO: 165022 - protein, 110 aa, Oryza sativa
  Clone ID: PAT_MRT4530_63868C.1.pep
MVMGSDGGLGGLLTSSVSWIKGATRRRAPRGFRCGVVEVIVDVFSVYPNGDVDVGKLGRSSFLSALVLWPSEFEETLGCGCGHGVWGPHHVAGARPPHRSFDPLFHACVT

SEQ ID NO: 165023 - protein, 122 aa, Oryza sativa
  Clone ID: PAT_MRT4530_63869C.1.pep
MASSTGWWWWHRPGGRRGGHPARRGDAAAAAADDEEEKAPAGSGAAIAAARPLLPSSPRSRIEMAMVNSPSGVTAASPSPRFKNFTIPAPVNHDGGAAPDCAWTEAPGGAWTEAPADGGSRR

SEQ ID NO: 165024 - protein, 311 aa, Oryza sativa
  Clone ID: PAT_MRT4530_6386C.1.pep
MGIGCGRRGCGRACVGSQGEDGDELSSDAIVGDVVMYRVERVDGEKKVPTPAPVGPNPNPNPSPPAGPIRLALALASRRPIPQRARARAETTAAAATATGMAPLADPAAEGFRIPFLPSDSDLLDCLLRPKIASGRVDPRFAPLVHDVADAFALPPAQLAAAHAPAPGAGGAEAWYLFSVRPRARARARAGSKRAASRAVGGGGGKRWCSMGAKKAVEGGGYCQRFRYKERTAAGVVAPRWMMVEYGVAQEHDGEGVAQEHGGEGVAELVLCKIFRSPEPSRRSESGSPSSSSSASASPSCSGGRKRKAAE

SEQ ID NO: 165025 - protein, 216 aa, Oryza sativa
  Clone ID: PAT_MRT4530_63870C.1.pep
MESPHLEPDKELSLEPKNIQAAKGEPKNSEAAREQPKNSEAARVIAKVVARYVCGMASMLPFEREPPAADGNKKLCYICGDDDGSHEELSCPFNYMYYHMSDEDASEGTTCEGSCSAGKHPMAVVSGSGRHREFLRCVVRVNNFPTKLRPWDLSWLCKPFGPLRMYHLVMRNSKFSRGFGYAIFSSRQHAESAIDQLNGRIIHGRKLRVDWAYPCI

SEQ ID NO: 165026 - protein, 206 aa, Oryza sativa
  Clone ID: PAT_MRT4530_63871C.1.pep
MKGLEFDLYAPNRGDANGSPVPVKVEVQLNSLHQNPVEVGIGMPHARALGRDEGVGVGMGVGEARPTNPRSHDSLRNSASTFFLLIDKEAASPIQFHCFFPGVFGECLPHDCSSPCLELPPPPLLEEMAEVVRRRQELDPEPELVRQEAYCAVGGVDSFQGDWEKLYDKVNNAAYTCNADSDGFKIDASTATGDSPVFTATIKIHF

SEQ ID NO: 165027 - protein, 845 aa, Oryza sativa
  Clone ID: PAT_MRT4530_63872C.1.pep
MRRKKHSDRGGGGGGGGTELFICFTSRPSTASASSGAPATLRPSSSSKLLSPGRTGGGAGAVAGADSAPVPPLHPSLSRRLRNSGSLKGGQSPMFPSGSSGGRRGRGGFEPAEPSSPKVTCIGQVRVKGGKRKPKHASAAALRSRSRRGGVGGGGSAEASFRRAGDDRDGPAGKNQGWVYQIPVNICEALKTFGSCGGRSLCSPSRAAGAGERGSLSAADKKRRRPPASGSWLCGAAVARCLLAIQEEEDDEIGKGAAVVPAEDVKASEVGLVMQGWDVEEEESTVVVGEVEVEKKDEILVVGKEEEGRVSVCIPPRNALLLMRCRSDPVRMAALATRFWGSPAAANVSQVDNVKDENENDDDEEEEEDEEDEDGADTDKECKEQARDSAVSTKEAGCRECDGSLHDGCEAGQVDPLETEAVETSECGDLGEEASEYGDCREDEEKIEPEEAPIVRKDSVLEVALSGEATGRDIQLPLLEMVETVAEAQEEVSVPGPEKEEQEMKGRRSSNCCSPSTALKEDRKLRRLSSRRRVGSSSRASSGSDRVGRRHSFSAETEARRSSFSSLKDSRRASFSIDRDGRRWSFSIEQEHLVAEPKVLMGSRKGQKISSEPESEKDCAVHAAPNSAEETLESHDDGKEEATLDGQEEGTTQETQVDEKGEKVEVGGVEAQDVVEEQKQRRKKSGELPDCLLLMMYEPKLSMEVSKETWVCSTDFVHWKSYQGQNRRNRRQQKAGCNAAPAEELKDTDNAEGTSDAKNTEESVAPASANLVSMPPPVVQKSPLKEAAEQKFKIELPLVTGAATYAPFVLKRCKSEPMRSSARLAPDACFWKDRHRPLNATGVGF

SEQ ID NO: 165028 - protein, 92 aa, Oryza sativa
  Clone ID: PAT_MRT4530_63873C.1.pep
MNVSKPADDQQHGSSTGKHTTAAATTDRWAVTMAVWHGPVMPSRYYCLCWAMWAGMGHGPVPFFRLQAFHACDAWMRAYFLLPFTPSRPKML

SEQ ID NO: 165029 - protein, 94 aa, Oryza sativa
  unsure (1)..(94): unsure at all Xaa locations
  Clone ID: PAT_MRT4530_63874C.1.pep
SCSSSSVFLQRKKEGTRRKGDVEMVVLVVATTSDAASATPXAXFLXMPXXTPGPSIPDGVESFANGAGVRLLRHXRXIXEEDDXDLRWEAATGX

SEQ ID NO: 165030 - protein, 204 aa, Oryza sativa
  Clone ID: PAT_MRT4530_63875C.1.pep
MRLGRWGSVAGSAAWPVRGRRRHGEDGVTWWSHVARVGSETGAARTDGEVGGDKRGVTSVVVCARRYGDSGQGVAGISGRSCGVVGNGDRAGRRMMPAALRVLAMLRRSDQWIYDGGGVRYLWRYSVEQLAGVQLGEAKSGWASWAAARVEKEEGKARGRGREKKGGTTSFPSRLSPTEGDGKGDGWAGWDWRKRRGNRLSARI

SEQ ID NO: 165031 - protein, 95 aa, Oryza sativa
  Clone ID: PAT_MRT4530_63876C.1.pep
ASSAGQPLRLLGMEFEDGTVLAALTGVTVIALLFTNVGWNVIGSVMIGAALVAAHATLRSTDDLFLTEQEAAGDGLVAAGMSAAGPILPTYVRIA

SEQ ID NO: 165032 - protein, 94 aa, Oryza sativa
  Clone ID: PAT_MRT4530_63877C.1.pep
MAGKGERRPRRDGNKEYFIRGGGRRWPTRGRATALGSPPLVPRKPNAAAKLPFVSRAASGPILLKPRNLLFSFSSGDAFFSNSGDPAEGIGTRV

SEQ ID NO: 165033 - protein, 105 aa, Oryza sativa
  Clone ID: PAT_MRT4530_63878C.1.pep
AHLHLVLTITRARLNEDACGQSTRRCAVLNTSPTLHAARSPPLLEGGHERMDLSRDLPSPIICAAPTASVCAKARILRCAGGRRRAIPMEFLGALKSSLGKTVKI

SEQ ID NO: 165034 - protein, 235 aa, Oryza sativa
  Clone ID: PAT_MRT4530_63879C.1.pep
MASFPLKYLGLPLVLGRLRKTNLQPVFDKILGKVASWRGKNMGAAGRATLVKSVLSAQPIYLLTALKVTKESLEQLDKQRRRFLWAGTGDITGGKCKITVGDGNMTRFWDSAWIDGRRPKDLMPLVYAISKNRKKSLHQGKEDDAWVHDLIFDAGSTITVNLVEQLVRLWEAVQNVQLVSEEPDQIVWKFTGNGHYTASSAYHAQCLGAPSTNLNSLIWKAWAPGKCKFHAWLII

SEQ ID NO: 165035 - protein, 51 aa, Oryza sativa
  Clone ID: PAT_MRT4530_6387C.1.pep
SLDCAMKTFKSGGPFKFYTGFPVYCVRIAPHVMMTWIFLNQIQKFEKQIGI

SEQ ID NO: 165036 - protein, 117 aa, Oryza sativa
  Clone ID: PAT_MRT4530_63880C.1.pep
IMSSQKVKESTVFSICPIRSYGTRYPSYQCMACIQLRASPFQVSHSPRVTQETCVAHMWLLPPLSIFPILSHQSTDCIVHSPGSFSHQFLTANSLFKTNLNQFINFSMFWVPKKKKQ

SEQ ID NO: 165037 - protein, 400 aa, Oryza sativa
  unsure (1)..(400): unsure at all Xaa locations
  Clone ID: PAT_MRT4530_63881C.1.pep
MYADDVVIFIDPTRDDVTAFADILHRFGTATGLVTNLQKSQVAAIRCDNIDLTDVLQGVPAMMASFPLKYLGLPLVLGGLRKMDLQLVFDKISGXGDITGGKCKVNWTKTCLPTSQGGLGXVLNLKKFTRAFRLRWLWHEWKDPNKPWVGLDTPCDEIDKDLFAASTKITVGDGNMTCFWDSAWIDGRRPKDLMPLVYAISKNRKKSLRQGKEDDAWVHDLIFDASSTITVNLVEQLVRLWEAVRNVQLVSEEPDQIVWKFTGNGHYTASSAYHAQCLGAPSTNLNSLIWKAWALGKCKFHAWLIIQNRVWTSDRLAIRGWQNNGHCPLCRCEAKTGLHPVATCRYTKRIWHHVAGWVGYHQLEPSQWEEARSVRQWWESLANTPNIPKKGLRSLILLVV

SEQ ID NO: 165038 - protein, 542 aa, Oryza sativa
  Clone ID: PAT_MRT4530_63882C.1.pep
MDRIFARFFCFLLIAAVSHAADLSPEQYWRSILPNTPMPSSISQLLNYPYLPAVRLPRRTDAGQRNYKSSVSHVAERSHRVDDGQRNYKLSALPATNELPHRTDAGQRNYKSSVSPVAELPHRVDDGQRNYKLSALPATNELPHRTDAGQRNYKSSVSPMAELSHRVDDGQRNYKLSALPATNELPHHTDAGQRNYKSSVSPVAELPHRVDDGQRNYKLSALPATNELPHRIDAGQRNYKSSVSPMAELPHRADDGQRNYKLSVSPAAELPHRVDDGQRNYKLSVLPATELVHYTDGQRNYKSSVLETPELLKDPDMALFFLEKNLQQGKKINNALHFANLLATTNSKFLPRGKADSIPFSSKELPEILDRFGVRPGSDDAAEMSATLQDCELPANKGEKKACATSLESIVDFVTSSFGASDVDAASTVVLSKAVESSSLAQDYTVSGVRRMAGTGQLIACHPESYPYAVFMCHLTEATTRAYKASLVGKDGTAVEAVAVCHTDTSDWNPEHAAFHVLGVKPGTVPVCHFMQPDAVVWTRRG

SEQ ID NO: 165039 - protein, 591 aa, Oryza sativa
  Clone ID: PAT_MRT4530_63883C.1.pep
MPSSISQLLNYPYLPAVRLPRRTDAGQRNYKSSVSHVAERSHRVDDGQRNYKLSALPATNELPHRTDAGQRNYKSSVSPVAELPHRVDDGQRNYKLSALPATNELPHRTDAGQRNYKSSVSPMAELSHRVDDGQRNYKLSALPATNELPHHTDAGQRNYKSSVSPVAELPHRVDDGQRNYKLSALPATNELPHRTDAGQRNYKSSVSPVAELPHRVDDGQRNYKLSALPATNELPHRTDAGQRNYKSSVSPVAELPHRVDDGQRNYKLSALPATNELPHRIDAGQRNYKSSVSPMAELPHRADDGQRNYKLSVSPAAELPHRVDDGQRNYKLSVLPATELVHYTDGQRNYKSSVLETPELLKDPDMALFFLEKNLQQGKKINNALHFANLLATTNSKFLPRGKADSIPFSSKELPEILDRFGVRPGSDDAAEMSATLQDCELPANKGEKKACATSLESIVDFVTSSFGASDVDAASTVVLSKAVESSSLAQDYTVSGVRRMAGTGQLIACHPESYPYAVFMCHLTEATTRAYKASLVGKDGTAVEAVAVCHTDTSDWNPEHAAFHVLGVKPGTVPVCHFMQPDAVVWTRRG

SEQ ID NO: 165040 - protein, 561 aa, Oryza sativa
  Clone ID: PAT_MRT4530_63884C.1.pep
MAPPAPAALLLPSNHSYRPLLPRPILHHATGFACASASPSPPPRLRLRLRHAAPLRAAALPAIAIAPGDHWGNWAFLLSAAAFGTWSEESTSWGAALSGSLVSIMAGLAATATGLVTAGAPAQDAVMDYLLPATVPLLLLGADLRRVVSTTGDLLKAFLIGSVATTIGTTIALLLVPMKSLGQDSWKIAAALMGSYIGGAVNYVAISEALGVSPSVLAAGVAADNIISALYFMTLFSLAAKIPAEPKTAQEGSNGGESEGGRRMSVLHGGAAVALSFVICKAGSAISSQLGIQGGTLPCVTALVVALATAFPRLLGKLAPSGETIALILMQVFFTVVGANGNLVDAVTKAPSVFAFALVQVTIHLGIVLAAGKLMGFERKPLLIASNANVGGPTTAAAMATAKGWSSLIVPGILVGMFGISIATFVGIGGTEGTGGGGSWQWQGASVDEAGGVEEVGRKAELGEEEVLVGGVFDAASDEVEVEVEEASEADGAGGDGRRVRQQLAVLHWVEHQVVVINSLALAMAAPSWRVVMGEGFLDVLRTALLLRHWRSVLGAGPHHK

SEQ ID NO: 165041 - protein, 245 aa, Oryza sativa
  Clone ID: PAT_MRT4530_63885C.1.pep
MDRIFARFFCFLLIAAVSHAADLSPEQYWRSILPNTPMPSSISQLLNYPYLPAVRLPRRTDAGQRNYKSSVSHVAERSHRVDDGQRNYKLSALPATNELPHRTDAGQRNYKSSVSPVAELPHRVDDGQRNYKLSALPATNELPHRIDAGQRNYKSSVSPMAELPHRADDGQRNYKLSVSPAAELPHRVDDGQRNYKLSVLPATELVHYTDGQRNYKSSVLETPELLDPDMALFFLEKIFHKVKNY

SEQ ID NO: 165042 - protein, 55 aa, Oryza sativa
  unsure (1)..(55): unsure at all Xaa locations
  Clone ID: PAT_MRT4530_63886C.1.pep
THHKHWHQXVHVPSGTTKEKFMTTKFIPDNHCSVDKVTATLRETGLQSSNLISWY

SEQ ID NO: 165043 - protein, 343 aa, Oryza sativa
  Clone ID: PAT_MRT4530_63887C.1.pep
MEINQWGRGRRRRRRSCGGSRRGGAVGGEVVGGEAEEEDEVEPLLEHLEGGGELDGLELTGGVGGSQARAHGRRSHSFIDDISYSGGAAAAFEESGTTGRAATLSPQSPSTSPPSSMGTWEGAGVLFAELRFTPYLLDAPSFVHACTLQLTTTTYDVDDCAFCPPIRLLHPTNFHCGNQQHKDELDFSVQNLDSRRRRSSWAQTCRTRCQEKWQWRSRTCPPGSQVRSASSTPRLGRRHRPRLRLDAMSSGFLSKPISFPAASTMPRWTVTCTSANANTLGALVTASTRLPLAPTTRKNTCIRINAMVSPPDGASFPSTRGSAVASTTTSAVTHGRVPPWIPS

SEQ ID NO: 165044 - protein, 191 aa, Oryza sativa
  Clone ID: PAT_MRT4530_63888C.1.pep
MVEGGAVLDDPKRPPYLEEQEQARRQLLVMGSCTEHRTPMTEQERRAEYIQEALAHYNSPRWRRHCKSQGVDDDYLVFDPVEDSKLLPDPPPIAACSIRFRGLFYLHLNFVARSIKNPTHKHLLFAELRFTPYLLDAPSFVHACTLPLPTTTTTCAFCPPARLLHPTNFPHCGNQQHKDELDFSVQNLNLL

SEQ ID NO: 165045 - protein, 839 aa, Oryza sativa
  Clone ID: PAT_MRT4530_63889C.1.pep
MPFGMMNKVTGKAITNEVGEFIQMEAEEDGTAVGQFLHIKIRLDIRKPLMRGVTLCVGEGKKEIWCPLVYEFLPDFCYTCGIIGHTDKVCGVKLKEGEEQQFSKKLRFIPEKKKWEDGHNVGSRGSKGFYQCKVEDGSSMGSDGPSWRKEKSVSKDGGDAKRVDEEEDLGFEGDMFTWRNHSHTEEGYIRERLGRAVANQEWRMRFPTTRVVNGDPRHSDDRLVIITTCGGRKEDNRRERRRRNKIGRLKNDEGVWVENEEEKRGMIAQYFKTLFSSNRGNNSDQLLDVVERKVTEDMNELLTSAYISEEIKEALDSIGDLKAPGPDGMPAVFYKNFWDLMGEKITSEVQEILNGGQIPQEWNETTIVLIPKVKTFELIKDLRPISVCNVLYKIVSKVLANRLKKILPEVISQSQSAFFPGRLISDNILVAYELTHYMRQKRNGETGYAALKLDMSKAYDRVEWGFLKDMMLKLGFNQEWTQLIMKCITFVTYRIRVNGELIEVIQPERGLQQRDPLSPYLFLLCAEGFSALIRKAEEEGSLQGVRCSGNGRDKDDEGEMQAHQTEFVKHVLREINMESLRAELEERVSGREVMERIWAQCTRNGTIAIILLWLWWGERNRVREGEQRRTAAELAFMATTQTEEFLKIHQKEKKQKLGAPGKWSKPDMGVMKINSDGAFDPNNRKGGWGFIIRDHLGMVIKAGAGRTHVLLDAFHAEVLACAAGIKAANECGLQRVEAETDSLMLKMAMEDNSYALSALGGIICEMKNFVNTNFRSFSVKYCPRGCNKVAHALAALGCNDHLQNTLSWDDVPSEVAELVTSDITESISYWKMFSMSKKI

SEQ ID NO: 165046 - protein, 605 aa, Oryza sativa
  Clone ID: PAT_MRT4530_6388C.1.pep
MVWRTLLGMRLCFVVDDQRMIKFMVDEKNLFPRAGAPTLLTVARGLAAADDPVPSASTVLAFLRRLPHDASPHLFPHLVAALSRSRGGGGGGGGPLLALRLFLAPLHPAAVTHHSFNSALLRFPLPPHLLPPFFSRSLRRFPGRLAPTLLSFNLLLKCVCSSLVPRDPGRYLDVALRILHEIIPGWDLAPDKFTYSTVVSALADAGRVDDAVALVHEMVADGVVAAEAFNPVLRAMLRAGDVKGAAKLFGFMQLKGCVPTTATYNVLVHGLLVCGRAGAAMGVMRRMEREGVVPGVMTYGAVVDGLVRCGRVKDAWKVAEEMERNGLAWNEFVYSTVITGFCKSGEIDCALKVWEAMVASPVRPNVVLYSAMIGGLANFGKMTEAEFILINGLCNVGRLKDAMMVWKHMLDRGCAPDTIAYTSMIKGLCVSGMVDGGLRLFYDMLASGHADPDVISYNVLLDGLLLAKDLPRAMDLLNRMLDQGCDPDTVTCNIFLREFGAGERKGREFLEGLVVRLCDRRRNMAAGEVLMVMLAKYIVPEAPIWEMVELHFGSMGFIIFWISSYKSIAMASPAFLVSEITIQCLFFIDMGLHTFVFGYQRHGSS

SEQ ID NO: 165047 - protein, 101 aa, Oryza sativa
  Clone ID: PAT_MRT4530_63890C.1.pep
MEEFQAMSGWFEAAARDEVQSLRDLVSQLKSTLQEHHGGVMYLNNAEITAAEARKSDLMAKKAKLDESLASARQFRALLQQQLQKSFASQIGDQKTTQTTI

SEQ ID NO: 165048 - protein, 42 aa, Oryza sativa
  Clone ID: PAT_MRT4530_63891C.1.pep
IGGGGAPPPTGAGSGAGAPGGGAVNDFLDTGGPIPLDSKIVY

SEQ ID NO: 165049 - protein, 48 aa, Oryza sativa
  Clone ID: PAT_MRT4530_63892C.1.pep
APHLSRYPRGHSAEHLSRMAMVSHHLAQPSTRAVLFLRPTYPFFSHYH

SEQ ID NO: 165050 - protein, 303 aa, Oryza sativa
  unsure (1)..(303): unsure at all Xaa locations
  Clone ID: PAT_MRT4530_63893C.1.pep
MSLGIKAPPLSNLLSQGSIPRGPKWDPLVNDSAHRERASRLTVDHAHGEGRGERRTGVGSTRSRPRWHRNGVFVAATWAGERKTKAPAANGRWAAAVSPGRRATTRGDGVYTGMTRGDERERANGLDSSEDAQRRRIAVAATGGVKRGKRRRGHEGLIPGGEKREKGGEKGGLPPCHFGEKEEGERATRQREEELCLCPLEASARXWRGRVDDDGDDGRAVWSGAATRAXQARQRLTAAATRRSATTACARGKQRAARLRHACWLAGPSGCAAVSAATIGGGGGGAHDPTLTVRRLALASVVA

SEQ ID NO: 165051 - protein, 58 aa, Oryza sativa
  unsure (1)..(58): unsure at all Xaa locations
  Clone ID: PAT_MRT4530_63894C.1.pep
PYFSRSSGSGDPAAEXVALTXDGRSSLXRPPPXWXREYPRWRQLRXDXXASSLLQXXX

SEQ ID NO: 165052 - protein, 322 aa, Oryza sativa
  Clone ID: PAT_MRT4530_63895C.1.pep
MTTDGRFASSLTRFALLSILNSWRRQPSNCAADGRLELSAQVAPWPAPELVYRRPETRCGWPPSSSFAASIRAFGEPCFVLRPASELVPPPPRFTPPSPAVARSSATGHPFMPPLAHVRENKRTREKMQRRKKRKEIGIDSYSFYNISLTRAAATKSTTSSGVAWVWMTEDAVTGDELRRGRPRRAPGIADSGDELQRGHRGLRRRASAWREARTAEDVAAATSPAWGATTEDAADNDVVAGLLPGAPAPPSPSTAPPLTPTSGSIRVASRRALRQRPNSITGPLQSPPSSLAVDPAANPGLHPIHLPLRGAKRQDGVQRAC

SEQ ID NO: 165053 - protein, 67 aa, Oryza sativa
  Clone ID: PAT_MRT4530_63896C.1.pep
LTNFHGLLLFVVGGVQNQHMVHLYHLQSDSTVFPNHSYKYFFMKKNPISNIPQYLNLHMTSVNDLLY

SEQ ID NO: 165054 - protein, 489 aa, Oryza sativa
  unsure (1)..(489): unsure at all Xaa locations
  Clone ID: PAT_MRT4530_63897C.1.pep
MGLRATEAATGNGGGMRSLPDFLGRKSKYVRMDDVLPDEQGDGGGGGGVVRVRGGGGSGRYVFACSVFASLNHVLLGYDVGVMSGCIIFIQKDLHISEVQQEVLVGCLSFISLLGSLAAGRTSDAVGRKWTIGLAAAVFQAGAAVMTLAPSFAVLMMGRLLAGIGIGIGIMVAPVYISEITPATLRGSYASFPEIFISLGILLGYVSNLAFSGLPDHINWRVMLAAGIVPSISVAFVLLVIPESPRWLVMQGRAAKARAVLLKVTDGEDEAQERLAEIEEAARVTATGNGKAVWRELLRPSPVIRRMLVTGIGVQLFQQITGIDALVYYSPTIFRDAGITTESQLLAATVGVGLSKRTAGITACLAALAASLSLLAHGALPRAAAIGRPILTVCGFVAFFSVGIGPIXWLTSGPVPMSFLSFCGPGVRPGXFAAFAAFSALSVVFVHVFVPEMSGKSLEQIESLFGAGAGPGEVKLGNAEHLVQGKEMS

SEQ ID NO: 165055 - protein, 79 aa, Oryza sativa
  Clone ID: PAT_MRT4530_63898C.1.pep
GQHSPSGHSSRAFINSKTTHPPFTTNHTTHRLASSSLIQFLPTCTTVHPLLTPVIQFKDDSCASLPARTHASHPKFKII

SEQ ID NO: 165056 - protein, 535 aa, Oryza sativa
  Clone ID: PAT_MRT4530_63899C.1.pep
MGLRATEAATGNGGGMRSLPDFLGRKSKYVRMDDVLPDEQGDGGGGGGVVRVRGGGGSGRYVFACSVFASLNHVLLGYDVGVMSGCIIFIQKDLHISEVQQEVLVGCLSFISLLGSLAAGRTSDAVGRKWTIGLAAAVFQAGAAVMTLAPSFAVLMMGRLLAGIGIGIGIMVAPVYISEITPATLRGSYASFPEIFISLGILLGYVSNLAFSGLPDHINWRVMLAAGIVPSISVAFVLLVIPESPRWLVMQGRAAEARAVLLKVTDGEDEAQERLAEIEEAARVTATGNGKAVWRELLRPSPVIRRMLVTGIGVQLFQQITGIDALVYYSPTIFRDAGITTESQLLAATVGVGLSKTVFIVIAIVLVDRVGRKPLLYVSTAGITACLAALAASLSLLAHGALPRAAAIGAAILTVCGFVAFFSVGIGPINMVLSSEIYPLRLRAQAVALGFAVNRLTSGAVAMSFLSICGAVSVAGAFAAFAAISALSVVFVHVFVPETSGKSLEQIESLFGAGAGAGEVELGDAEHLVQGKEMS

SEQ ID NO: 165057 - protein, 79 aa, Oryza sativa
  unsure (1)..(79): unsure at all Xaa locations
  Clone ID: PAT_MRT4530_6389C.1.pep
MAIAPPPHFLALPRHAVQTLLCRHAAVPHHFPRHHFCATLKNEYMGLQSPITLWTALKKRFEKLKYTILPXAEQDWARL

SEQ ID NO: 165058 - protein, 75 aa, Oryza sativa
  Clone ID: PAT_MRT4530_638C.1.pep
MVEIYLDLKSMQPLSSKKENDEVFIKLGSDKDALKKKENAERDERAKKSVSINEFLKPAEGERLYGGRGRGRGRG

SEQ ID NO: 165059 - protein, 185 aa, Oryza sativa
  Clone ID: PAT_MRT4530_63900C.1.pep
MEAKGVVVITLVVTLAAVARAARPEETRPGLARRGSASSPTTHLHFYFHDKVSKPSPTAVRVVDPVDPSSRSFFGMINVMDDPLTEGPEPESKPMGRAQGLYMGSDQAKLGFLQAMNLVFTDGTYNGSVVTVLGRNCPFDDVREMPVIGGTGAFRFARGYAQARTHTLDLKTGDAIVEYNVYVMH

SEQ ID NO: 165060 - protein, 216 aa, Oryza sativa
  Clone ID: PAT_MRT4530_63901C.1.pep
MAVAIAGAATRRLLLAPARRRAFWSSPWAEESPHSPGPSADENKKKKPSSHHRLAAVMDAVADRKLPPELRGRANAVRSETDIINVVEQRIWHSMEEGHFENLPGKGKPLNLNSNPHADPAEDTLYRILSRNGCAPEWVELNKEIRGMIARWRSALRKAWANRSEDDRSTWHDDHRLLQEQIRQINDKVFRYNLIVPFGRQMFGLNWDKELDKLKQ

SEQ ID NO: 165061 - protein, 49 aa, Oryza sativa
  unsure (1)..(49): unsure at all Xaa locations
  Clone ID: PAT_MRT4530_63902C.1.pep
HLKEGVNTALFPVMMDICKAMWSLATQNSTLPLLSXTHGQCGLATTLEK

SEQ ID NO: 165062 - protein, 293 aa, Oryza sativa
  Clone ID: PAT_MRT4530_63903C.1.pep
MDGYRALIAAGATAVCCLVCAVWAFSSSSSSSASKKHQRQRQQRPLSPGCCGCARCGCRAAAVNGEMAVGGEQKKAPGPSPAAAAAAAAAGASMMEQLVPEITTHALSYLDYTSLCRLSMTNSAMRRAANDDGAWKALYHKDFTVEQHNITPPNGWKAYYAATKAIMNVNTEFYNIIREGSLPAMSHFWLNADYVKCIHATGELFTGYNAVMDSWGLLFNWGQDGGQGIAFQLRDVRARVLGEVAWVNMKAHVDVDPGHFHVTNVYEFRNGRWYMVHHHSSLMADPAPHNLFA

SEQ ID NO: 165063 - protein, 79 aa, Oryza sativa
  Clone ID: PAT_MRT4530_63904C.1.pep
MALRMAAPEPPVVNSVQDGVVSRALPRRMGRGWWRRRLPRPPTTEVVDDGGCDGGGERGEGKEKRREGGIDGSDSLLYK

SEQ ID NO: 165064 - protein, 71 aa, Oryza sativa
  Clone ID: PAT_MRT4530_63905C.1.pep
MQIIVVKYSITDLRLQGRTLIVETQLWRCFGCSQTVDLLICQLSILPKKKPGHIRDIYLQTQFITLIKKSC

SEQ ID NO: 165065 - protein, 153 aa, Oryza sativa
  unsure (1)..(153): unsure at all Xaa locations
  Clone ID: PAT_MRT4530_63906C.1.pep
VPRFGVALRPPRPEWQPDASKVDAPSSSRENNGSADGRRRQDRTPEKGLAPPINGWMGSLSRMGSPGSGSVPSPXQPPLYKLSLPRLCKCAGAALTPSSFSRSNCQSPMGIANFSPREKTTNQLHGFRCSRAAKKKKKKKKKKKKKKKKKKPK

SEQ ID NO: 165066 - protein, 322 aa, Oryza sativa
  Clone ID: PAT_MRT4530_63907C.1.pep
MASVASFPVINMENLETEERGAAMEVIRDACENWGFFEMLNHGIAHELMDEVERVSKAHYANCREEKFKEFARRMLEAGEKGADVKGIDWESTFFVRHRPVSNLADLPDVDDHYRQVMKQFASEIEKLSERVLDLLCENLGLEKGYLKKAFAGSNGPTFGTKVSSYPPCPRPDLVDGLRAHTDAGGIILLFQDDQVSGLQLLKDGEWVDVPPMRHAIVANIGDQLEVITNGRYKSVMHRVLTRPDGNRMSIASFYNPGADAVIFPAPALAAADAAAACYRRLMFRGYMNLYVRHKFAAKEPRFEAIKSAPEVVHTAPIPTAG

SEQ ID NO: 165067 - protein, 87 aa, Oryza sativa
  Clone ID: PAT_MRT4530_63908C.1.pep
GWVKLIDFNPWGGYTLPLLFTWEELEQEEREEVEVRVVMQHGAVRPGLMTAVPYDMLDWGEGSGWDVFLKKADDELNKQMASLGADS

SEQ ID NO: 165068 - protein, 148 aa, Oryza sativa
  Clone ID: PAT_MRT4530_63909C.1.pep
MAASSSKEIVDAVEKWMAFPISTAAGLEIVAEEGSSGSSAQQQQAWRPVAAAWCDNGGTSGTGAACKSSVDGGARRRPRVVRLAAAWVSLEVKDALSSLQQTFVVSDATRPDCPIIYATEGFFTMTGYSLKGDKAQGHFGPTTLKKGS

SEQ ID NO: 165069 - protein, 101 aa, Oryza sativa
  unsure (1)..(101): unsure at all Xaa locations
  Clone ID: PAT_MRT4530_6390C.1.pep
PAPPRXSPHRSRXHARXTSRLSHARPPLFAPTTSXRICCTARPRIPXRDSPSSLSSPTTAQAVHHPSSPPTPTGTDREAXWPRAPSDSDRGATPSPFRPVA

SEQ ID NO: 165070 - protein, 79 aa, Oryza sativa
  Clone ID: PAT_MRT4530_63910C.1.pep
LLMVFTNNSNMLSNLFYEYDTPLILGKNTKTSMDFSECENLGKDYLNMLEINTKGLQSMFCQVCGQNQPFFQTKKDYFQ

SEQ ID NO: 165071 - protein, 236 aa, Oryza sativa
  unsure (1)..(236): unsure at all Xaa locations
  Clone ID: PAT_MRT4530_63911C.1.pep
MEKNTTAMGQLMSSSATTAATATGPASPKRPAGRTKFQETRHPVFRGVRRRGRAGRWVCEVRVPGSRGDRLWVGTFDTAEEAARAHDAAMLALCGASASLNFADSAWLLHVPRAPVASGHXPAARRAARRQRGRRRVPAPGKXAATATATSGDAASTAPPSSSPVLSPNDDNASSASTPAVAAALDHGDMFGGMRTDLYFASLAQGLLIEPPPPPTTAEGFCDDEGCGGAEMELWS

SEQ ID NO: 165072 - protein, 879 aa, Oryza sativa
  Clone ID: PAT_MRT4530_63912C.1.pep
MAEGVVGSLIVKLGDALASEAVEVAKSLLGLEGSALKRLFSEIREVKGELESIHAFLQAAERFKDADETTSAFVKQVRSLALSIEDVVDEFTYELGEGDGRMGMAVALKRMCKMGTWSRLAGNLQDIKVNLKNAAERRIRYDLKGVERGAKSMAGRRSSNWRSDSVLFKREDELVGIEKKRDLLMKWVKDEEQRRMVVSVWGMSGIGKTALVANVYNAIKADFDTCAWITVSQSYEADDLLRRTAQEFRKNDRKKDFPIDVDITNYRGLVETTRSYLENKRYVLVLDDVWNANVWFDSKDAFEDGNIGRIILTSRNYDVALLAHETHIINLQPLEKHHAWDLFCKEAFWKNEIRNCPPELQPWANNFVDKCNGLPIAIVCIGRLLSFQGSTYSDWEKVYKNLEMQLTNNSIMDMMNIILKISLEDLPHNIKNCFLYCSMFPENYVMKRKSLVRLWVAEGFIEETEHRTLEEVAEERLREVVNRCLLLLVKRNEAGHVHEVQMHDILRVLALSKAHEQNFCIVVNHSRSTHLIGEARRLSIQRGDFAQLADHAPHLRSLLLFQSSPNVSSLQSLPKSMKLLSVLDLTDSSVDRLPKEVFGLFNLRFLGLRRTKISKLPSSIGRLKILLVLDAWKCKIVKLPLAITKLQKLTHLIVTSKAVVVSKQFVPSFDVPAPLRICSMTTLQTLLLMEASSQMVHHLGSLVELRTFRISKKLFLQGTLSHESLPHFVSVSNLNNLTFLRLAGSRIDENAFLNLEGLQQLVKLQLYDAYDGMNIYFHENSFPKLRILKIWGAPHLNEIKMTKGAVASLTDLKFLLCPNLKQLPCGIEHVRTLEELTLDHTAEELVDRIRQKKERMICDVQRVYVGFIRNGVLAAERIQ

SEQ ID NO: 165073 - protein, 367 aa, Oryza sativa
  unsure (1)..(367): unsure at all Xaa locations
  Clone ID: PAT_MRT4530_63913C.1.pep
MRQLEKSYTTSPAVAHAGLWADVIKGGSADRRGPHVSGARAAGPPWTGXTWVVHRRSTGPTAQIDPGPIGRXGGGLARLGSAQGRPTGHGKGGXRARARVAGDGNRRRMRRRKGGAKAAALKRRLGRRGRGIEGRGXASPRVAGAEEDDVERRRRATGGRRQPADELRDALRKEKRXIRGREMNHGGRNPWPKAAVGVELTGVRGDAGSGDGPRRRRGGRGGGRGRXGGISPANVGSGGGERGGIRKSNPGHLARGRGRERXGSGRGRCGACAGVADVARRRRRRGRGGGCRRGGAGARWETGPTGGPHLSATPGERREAAGPRGLAGPWXRPAQREGRGGRRMGRRPIQKKRERKIRKRKKNFPGI

SEQ ID NO: 165074 - protein, 59 aa, Oryza sativa
  Clone ID: PAT_MRT4530_63914C.1.pep
HGPRRGVHLRLLSPPGPPIRWGWIPAREGEVEAVELSSVYADSSNKVATCQIDISICAA

SEQ ID NO: 165075 - protein, 175 aa, Oryza sativa
  unsure (1)..(175): unsure at all Xaa locations
  Clone ID: PAT_MRT4530_63915C.1.pep
MGRRPIPPFSPPPPAGPAEGQGPAKPHGPATRLLSPGSXQVGPTCRTRLPPRAAPPRPQPRPRPRLRLLWATSATPAHAPHLPCPLPSFSRPRPRPRWPGFDFRIPPLSPPPLPALAGGIPPLPATSGIPLPYLSSTATPSLFFPIXSPNSPELSIAPAPCTHPPPPFPPLRPPL

SEQ ID NO: 165076 - protein, 152 aa, Oryza sativa
  unsure (1)..(152): unsure at all Xaa locations
  Clone ID: PAT_MRT4530_63916C.1.pep
CQWRKGREGRRQVGPXGSAALGXGPPWTGTTRVVHRWSTGPTAQIDPGXDRTGGGDLARLGSXKAGRPATARASARAHARVAGDGNRRRRRRRRKGGAKAAALKRRLGRRGRGIEGRGCLTEGGRRGGRRHRTATASHGRTTATGGRASGCP

SEQ ID NO: 165077 - protein, 75 aa, Oryza sativa
  Clone ID: PAT_MRT4530_63917C.1.pep
KKRKKNFFFFFFPQGFTWQIGGIRAFFLFSEPLFGENLLKNPPKGGKGTGGPIIPGGKPIFKGPVKSQQSLGLTQ

SEQ ID NO: 165078 - protein, 528 aa, Oryza sativa
  Clone ID: PAT_MRT4530_63918C.1.pep
MAAAARLPAVGLGRVCVWAPPHIKIATRTRDEILLSFASSSLLPPLPPPPPPPRFSPPRRAMDAAGYPKMQGGGASSSSSSSASCRAADAAVWDAVQQQKRQRCQGSSSNDQVGLSTENNSFQAPEPELQNSDCVEDEEEDYYLYDEDDVCYDDDGDYEFDETDFNQQLADKFDGLDLPPGVEATVPWLQKKDIADGPSTFKSMAELDADITKKYEFFKQFDVVENFSDHHYADKPVGKTGKDWTKRIQYDWKLLEKDLPASIYVRVSENRMDLLRAVIIGPQGTPYHDGLFFFDAQFTSTYPSTPPVVYYHSGGLRLNPNLYACGKVCLSLLGTWSGSGCEKWNSAHSTMLQVLVSIQALVLNENPYFNEPGYETYANSATGQKSAMDYNDTTFQYSCRTMLYSLRRSPQHFDALVAGHFRHRGHAILAACKYYMEGHKVGSVVPNEDEEDAKQQDDTDAGGSGSSSGAKPQPEKPDLCKGRAASFKTNMAVLFEELLMEFNVKGADTKKFCDEKLKKNQQAAAAAR

SEQ ID NO: 165079 - protein, 67 aa, Oryza sativa
  Clone ID: PAT_MRT4530_63919C.1.pep
RQKVLLKAIFLSGKTGRPCLSVYTIQTTHTSITYLLYVCLHAVCSIYNLFNLILRLSNAPKAIESVI

SEQ ID NO: 165080 - protein, 70 aa, Oryza sativa
  unsure (1)..(70): unsure at all Xaa locations
  Clone ID: PAT_MRT4530_6391C.1.pep
LHGVVXAEGPCEEGAVGXGGGEAVXHGLGPEEEEXGGRKRVEGEQREXGXSGGXGEAELXRGGGGIVVYP

SEQ ID NO: 165081 - protein, 550 aa, Oryza sativa
  Clone ID: PAT_MRT4530_63920C.1.pep
MEEEGRFEAEVAEVEAWWGTDRFRLTKRPYTARDVALLRGTLRQSYASGDMAKKLWRTLRAHQANGTASRTFGALDPVQVAMMAKHLDTVYVSGWQCSSTHTSTNEPGPDLADYPYDTVPNKVEHLFFAQLYHDRKQREARMSMSRAERAHEPYVDYLKPIIADGDTGFGGATATVKLCKLFVERGAAGVHLEDQSSVTKKCGHMAGKVLVAVSEHVNRLVAARLQFDIMGVETVLVARTDAVAATLIQTNVDARDHQFILGATNPRLRNRSLAAVLSDAMSAGKNGRELQAIEDEWLATAQLKTFSDCVRDAIASLNATDADKQRKLQEWSAATSHDKCVPLEQARDIAAGLGVTSLFWDWDLPRTREGFYRFRGSVAAAVVRGRAFAPHADVLWMETSSPNIAECTAFAEGVRAASPGAMLAYNLSPSFNWDASGMTDADMSEFIPRVARLGYVWQFITLAGFHADALVTDTFARDFARRGMLAYVERIQREERSNGVETLQHQKWSGANFYDRVLKTVQGVTEEQFKGSWTGPGSESSSHVLAKSRM

SEQ ID NO: 165082 - protein, 175 aa, Oryza sativa
  Clone ID: PAT_MRT4530_63921C.1.pep
AFAPHADVLWMETSSPNIAECTAFAEGVRAASPGAMLAYNLSPSFNWDASGMTDADMSEFIPRVARLGYVWQFITLAGFHADALVTDTFARDFARRGMLAYVERIQREERSNGVETLQHQKWSGANFYDRVLKTVQGGISSTAAMGKGVTEEQFKGSWTGPGSESSSHVLAKSRM

SEQ ID NO: 165083 - protein, 53 aa, Oryza sativa
  Clone ID: PAT_MRT4530_63922C.1.pep
VNPLHWLQPSPYVLPCVGHGVDPVGYCGSSVIVNVVQSVPPSSFSARASCFPS

SEQ ID NO: 165084 - protein, 318 aa, Oryza sativa
  unsure (1)..(318): unsure at all Xaa locations
  Clone ID: PAT_MRT4530_63923C.1.pep
LSAAPPRRRRRRMEAVGVAPAPAGVPEKKLLEVKESRKAAPAAPSTSMAAKWAMKKKLVGGDAGYVLXDVPPGTDYLRELSTYPNPLQDNPAYSVVKQYFVNTDDTVTQKIVVHKTSARGTHFRRAGPRQRVYFQSDEVNAAIVTCGGLCPGLNTVIRELVCGLYDMYGVTSVVGIEGGYKGFYSRNTVALTPKSVNDIHKRGGTVLGTSRGGHDTGKIVDSIKDRGINQVYIIGGDGTQKGASVIYEEVRRRGLKCSVVGVPKTIDNDIAVIDKSFWFXDLRVEEAQRAINAAHVEAESAENGIVVVKLMGRNSGFH

SEQ ID NO: 165085 - protein, 88 aa, Oryza sativa
  Clone ID: PAT_MRT4530_63924C.1.pep
AAWQRRVRAAARPWLFSFAGGPRKGNGTIRADIIRQCGASSRCNLFHCHGAAASGCNAPGAVMRVFESSRFCLEPRGDTMTRRSTFDA

SEQ ID NO: 165086 - protein, 791 aa, Oryza sativa
  unsure (1)..(791): unsure at all Xaa locations
  Clone ID: PAT_MRT4530_63925C.1.pep
MAVKWDYTFDLAEIACDAIQYVGKNDSFALSQGRTVAGESWRRWHRETNLVLISIMPSGDEAGREEGVVVIVSGGRGGRRRRHCVSEVGQPSAGSPLSSPPLVVPLWLTALVGQXVRRGVVAPGRAEAGAPLVLALGLSVTVVPAAACCFCASGMDADSPRRPTTVPSNTPQVSGLIPWYQGLIPRYHPVSWVPSIRYRSIPNWYQSAAPPRRRRRRMEAVGVAPAPAGVPEKKLLEVKESRKAAPAAPSTSMAAKWAMKKKLVGGDAGYVLEDVPHLTDYLPELPTYPNPLQDNPAYSVVKIPLFHSPTTLGTKRLTFLHTTCAHYPNPLQDNPAYSVVKQYFVNTDDTVTQKIVVHKTSARGTHFRRAGPRQRVYFQSDEVNAAIVTCGGXCPGLNTVIRELVCGLYDMYGVTSVVGTSVVGIEGGYKGFYSDNTVALTPNSVNDIHKRGGTVLGTSRGGHDTGNIVDSINERGINHVXIMGGEGTQKGASVIYAEVRRRGLKCSVVGVPKTIDNDIAVIDKSFGFDTAVEEAQRAINAAHVXSGQSXNGFCVVKLMRRNSCFITNATLASRDVDCCLIPESPFYLEGKGGLLEFIEKRLKDNGHMVIVVAEGAGQDLIAKSMNFVXTQDASGNKLLLDVGLWLSQKIKDHFKKKRNFPITLKYIDPTYMIRAVRSNASDNVYCTLLAHSALHGAMAGYTGFTVAPVNGRHAYIPFYRITEKQNKVVITDRMWARVLCSTNQPCFLSHEDVEHLKHDDDEHHLHNTQLLEGESSPVKDSSKCNGTAAPV

SEQ ID NO: 165087 - protein, 195 aa, Oryza sativa
  Clone ID: PAT_MRT4530_63926C.1.pep
MSVIPLWKQVDYFREYKRRLAAHLGAAEAEAVVSDAVYAISMGTNDFIENYFAGTTRRYLQFGVGEYTDFLVGLARGLLVELYGLGARKVAFTGLGPPRAASRWFREGGGGMLRDGDVRDGVHVQRVGREDVQGRGQTSQGTYTDVQPGSKLATLPQHCYNSAHLHPPGSFLPGGWIDGSHHPRPRPHLPTGVLN

SEQ ID NO: 165088 - protein, 249 aa, Oryza sativa
  Clone ID: PAT_MRT4530_63927C.1.pep
MEAEALPVLEAEDGGRGGAGTGGGGGAQGGGDLRKAKERLREAIRELHHRDRHHQHGGGGDRDGKGPVDGEEDDGGSGLDKVVEWISVASRRGAQTRPRATAPARGGKEEAASHRGTHGRRWPVAAALHGLSSRQRHARTGLGGRRHADADKTRPPSSSTAGFCRCEDVGKFLVEGILYSCKLVPFDSGISSLRTLAGSKANDAVRLCGVQGTQSDSGGDSWGRGGGGGCGHDEQPPLGAGTDGDGCGR

SEQ ID NO: 165089 - protein, 73 aa, Oryza sativa
  Clone ID: PAT_MRT4530_63928C.1.pep
MRGDGDGERGCADTGQDEGRRDNDGGGDGEADEPPLLLTLPHSLLQYTILPVDDLTCRSTRYIWPVNTRKLDR

SEQ ID NO: 165090 - protein, 69 aa, Oryza sativa
  Clone ID: PAT_MRT4530_63929C.1.pep
KMSALNALTTCMERERKTCSEVFRERNTCSEVFLCVSFLLRLVFPPQFQKNSFGQLVWLWSSQSVIFSW

SEQ ID NO: 165091 - protein, 116 aa, Oryza sativa
  Clone ID: PAT_MRT4530_63930C.1.pep
MSWRTEQLGGGRIYLGRPRDGRAAGGTVDGEDGGSLALARESPEVALSDDDDEEAVGSGAAGPARMPAISAPAEDDYDDDDVTGSGTADPAHACWPGPCGPLRRRRGSQRRQSAGF

SEQ ID NO: 165092 - protein, 203 aa, Oryza sativa
  Clone ID: PAT_MRT4530_63931C.1.pep
FFFFFFLRSGTPVKNRIFIQLDNDLSLLDLQHIRPPTSPCSTSNVLADQTRTSPCATSVEFYLVKGACALTVSFHCHTELRNWKIARFVCLRVLFKYNVENRVIFLQRRSCRRTAADRTQADRQRRPAQRSRRQAAPSQAEAQPQQEPGQPKRRNANKRRAAPQRGRGGRPGKTGRGPAGDPGDRKGEASSGSGRDHGARRRL

SEQ ID NO: 165093 - protein, 904 aa, Oryza sativa
  Clone ID: PAT_MRT4530_63932C.1.pep
MYIKSAISNVIIGGIEDSDDVKTYLENIDRNFRSSSKSYASSIIKRLTSMRYNYKDGVRKHIMQMGAMNGELKSMDMGINDDLLVHFILSSLPSDFESFIINYNNQRDKCKKKFYQGESSNSQNKKKKPNTPSTQASNGAHKGKSQVPAGQNSAGKFLCKFCEAEGHAQRDCEGFWAWLAKKGTNVDIVSNVDELLYVEFSHKSWWIESGATVHVANSLQGFRSHNAKIKVVRSYRGGEFYGRHTPYGQSSGPFAQYLHIHGIIAQYSMPREPQQNGVAERRNRTLMDMRHLKQLHTYSIEFQTVVAPDENSGDTDSVENNNELNNDTQQTSEAQNEEIIEEPSQPSVIENEPLRRSQRERRSAIPNYYDVYLGENIGKVDDPTSFKEAITSEHSSKWLEVMDDELKSMSHNGVWDLVEIPKGSKTVGCKWVYKTKLDSKGKIERFKARLVAKGFSQREGIDYNETFSPVSKKDSFRIVMALVAHYDLELHQMDVKTAFLNGELHEDVYMAEPEGFVMEGKDHLACKLKKSIYELKQASRQWYLKFDEIIKRFGFKENEVDNCIYIKTKGGKFIILVLYVDDILLASSDINMLHQTKEFLSSNFDMKDLGEASYVLGIEIHRDRSKGVLGLSQKSYISRVLKRYNMSKCSATPAPIVKGDKFGLFQSPKNKLESDQMKMVPYASAVGSLMYAEVCTRPDLAFVTGMLSRFQSNPGLDHWKAVKKVLRYFQGTKDYMLTYKKSEELEVLGYSDADFAGCVDTKKSTSGYVFTLANGAISWKSSKQTLTTSSTMQAEFLACYEATGQAVWLKNLIPGLRVVDSISKPITLYYDNKAAVFYSSNNKSSGAAKHIDIKYHVVKDRIQDQTIKIEHISTKSMLADPLTKGLPPNLFKDHVAGMGITDCL

SEQ ID NO: 165094 - protein, 2056 aa, Oryza sativa
  Clone ID: PAT_MRT4530_63933C.1.pep
MEANAESRLIRQASDKLNEMLYREEMLWLQRSRINWLKEGDRNTRFFHSKAVWRAKKNIIVRLRDSGGTVQNSTTVMEDMATKYFQEMYTADSTLDHTQIIHLIQEKVTPEMNESLCREFSEEEIATAVFQIGPLKAPGPDGFPARFYERNWGVLKEDIVRVVKTFFLTGVMPSGVNNTAIVLIPKIEQPMEVKDFRPISLCNVLYKFVSKCLVNRLRPILDELVSQSQSAFVPGRLITDNAILAFECFHSIQKNKNPNSSSCAYKLDLSKAYNRVDWTFLEQSMYKLGFSHRWVSWIMECITSVRFSVKFNGTLLDTFAPSRGLRQGDPLSPFLLLFVADGLSLLLEYKVSQGAITPVHICRRALGISHLFADDTLLFFKSDNQQAKVIKETLSTYAAATGQLINPAKCSILFGSSSTSAVCDAIKHTLQIVNSSFEDKYLGFPTPEGRMNKGKFQTLQEKIWKRIISWGENLLSSGGKEVLIKSVIQAIPVYVMGMFKLPESVCEDLNRLTRNFWWGADNGEERDVSLMIMWRNWFVRNELTHGKSPPPVEVSKRFLESYLQSLFMIRQHPTAELTKGKQVVYMYPRDREKSKRQRVASDLLWSCPETGWMKVNVDGSFDAQQESGGIGVVMRNSEGRVIFAAFKSLNGCKSALEAELEACREGIVLASQWTMCPFYIESDCQVALQMIQGKEEERSELAYLIREIVSAAFGNREIRLRKIHRSQNSVSHYLANKGRCESLSKGFVLLFRDRVGGDRKAAVTPQVIAGDLFRIKPVYSLLRPLLLHRQFARWFEVLHPLHPPRTKREQLQWLQTTIQLIEPFDGSNYAKWKADVLLNLGILDYDYAIREDRPEEPFSVEHDYEEKLKLYREKTNEWEKSNRISLMYIKSAISTVIIGGIEDSDDVKTYLENIDRNFRSSSKSYASSIIKRLTSMRYNYKDGGSKKKFYQGESSNSQNKKKKPNTPSTQASNGAHKGKTQIPAGQNSAGKFLCKFCKAEGHAQRDCEGFRAWLAKKGTNVDIVSNVDELHYVEFSHKSWWIDSGATVHVANSLQGFRSVRTLRKGERILRVADGAEIKVMAVGELHLRLPSGNNLLLHDVLYAPSVKRNLISVMVLTNSGYDCNFSKDKCFIKYNNIDIGLASVQDKLYLLSLDDHIMNILNACNDNETSSKLWHCRLGHISKGRMERLIKEEILQPLDFSNADHCLNCIKGKFTKKIKKGATRSTCPLEIIHTDICGPFPVTSVDGYDSFITFTDDFSRYGYVFPIKDRSESLDKFKIFKAEVENQHNAKIKIHGIIAQYSMPGEPQQNGVAERRNRTLIDMVRSMLSHSTLSVNLWIEALKTAAHILNRVPSKSVPKTPYELWTGRKPTLNYLRVWGCRAEARIFNPQLKKLDPKTVSCHFIGYPETSKGHRFYCPDRVTKFVETRHAVFLENNEVWGSSQEREINLEEIRANVTPEILENNIPINLVTRVVPVTQTVVAPDENSGDTDSVENNNELNNDTQQTSEAQNEGIQEELSQPPVIESEDIGKVDDPISFKEAITSEHSSKWLEAMEDELKSMSHNGVWDLVEIPKGAKTVGYKWVYKTKLDSKGKIERFKAMLVAKGFSQRDGIDYNETFSPVSKKDSFRIVMALVAHYDLELHQMDVKTAFLNGDLHEDVYMAQPEGFVVEDKDHLACKLKKSIYGLKRASRQWYLKFDEIIKRFGFKENEVDNCFYIKTKGGKFIILVLYVDDILLASSDINMLHQTKEFLSSNFDMKDLGEASYVLGIEIHRDRSKGVLGLSQKSYISRVSERYNMSKCSATPAPIVKGDKFGLFQSLKNKLESDQMKMVPYASAVGSLMYAQVCTRPDLAFVTGMLGRFQSNPGLDHWKAIKKVLRYLQGTKDYMLTYKKSEELEVLGYSDADFAGCVDTKKSTSGYVFTLAKAAISWNSSKQTLTASSTMQEFVACYEAMGQAVWLKNFIPGLRVVDSISRPITLYCDNKAAVFYSSNNKSSGAAKHIDIKYHVVKNRIQDQTIKIEHISTKSMLADPLTKGLPPNLFKDHVAGMGITDCL

SEQ ID NO: 165095 - protein, 90 aa, Oryza sativa
  unsure (1)..(90): unsure at all Xaa locations
  Clone ID: PAT_MRT4530_63934C.1.pep
KSYQEHMPMPLAQGWSSSSSGYYCGEGSSSXQEYYGEGSSXGGGWGEQQQHPGMTPVRLTNARQFAAQLPSMCQVEPQQCSIFAYGQYYA

SEQ ID NO: 165096 - protein, 853 aa, Oryza sativa
  Clone ID: PAT_MRT4530_63935C.1.pep
MAWRRLTSAAAAAATVKIAAAAVLFGREKHNGEIFRVRIPSFPESPFSQKKSLKSSKAARQWYTSGQSKTIRIAVPAVMGGNSGRDIRPIEPLEGSNYAKWKADVLLNLGILDYDYAIREDRPEEPFSVQHDYEEKLKLYREKTNEWEKSNRISLMYIKSAISNVIIGGIEDSDDVKTYLENIDRNFRSSSMSYASSIIKRLTSTRYNYKGGVRKHIMQMGAMNGELKSMDMGINDDFESFIINYNNHRDKWSIEELISHSIEEEDRQKADKQKHKDQLNLLHSAKGGKKKFYQGESSNSQNKKKKPNTPSTQASNGAHKGKAQVPAGQNSAGKFFCKFCKAEGHAQRNCEGFRASLAKKGWIDSGATVHVANSLQGFPFREDAKKGGADPKSADGAEIKVMAVGELHLRLLSGNNLLLHDVLYAPSVKRNLISVMVLTNSGYDYDFSHYGYVFPIKDRSESLDKFKIFKAEIENQHNAKIKVVRSNRGGEYYGRHTPYGQSPGPFAQYLQIHGIIAEYSMPGEPQQNGVAEHRNRTLMDMRHFKQLHTYSIEFQAKIFNPQLKKLDPKTVSCHFIGYPETSKGYRFYCPDRVTKFLETRHAVFLENNEVCGSSQEREINLEEIRANVTPEIQENNIPINLVPHVVPVTQTVVAPDKNSGNTDSVENNKELNNDTQHTSEAQNEEILEEPSQPSVMENEPLRRSQRERRSAIPNYYEVYLGEDIGKDVYMAEPEGFIMEGKDHLACKLKKSIYGLKQASRQWYLKFDEIIKRFGFKENEVDNCIYINTKGGKFIILVLYVDDILLASSDINMLHQTKEFLSSNFDMKDLGEVSYVLGLEEYWDYLRNHTLAEY

SEQ ID NO: 165097 - protein, 1778 aa, Oryza sativa
  Clone ID: PAT_MRT4530_63936C.1.pep
MAEQAKAHNLSPSVSGDDGEPNPRRRARTPPPPPRQSPRREEVLERVERSATSTSTGDGEGRRDGERRLLVYGDGSTPQGALQAAGALLRHPPVVPDPESPAQRWLDDVANLVMTARQRLDAGGRSSATKTSGTATTGSASSRRRARRAAAAVRHSAATPSSAPPTREDLRGGPDARISIERRRNGRRAPHATEGASSSGVSPQHGRGDQPSVPPVGGVGCRAFVASLRNVRWPPRFRPTIAEKYDGSVNPAEFLQVYTTGIEAAGGDDRVMANFFPMALKGQARGWLMNLPPASVHSWEDLCQQFTMNFQGTYPRPGEEADLHAVQRRDDESLRSYIQRFCQVRNTIPCIPAHAVIYAFRGGVRHNRMLEKIASKEPQTTVELFQLADRVARKEESWTWNPSGSGVAASAAPGSAARTGRRDRRRKKRSAHSDDEGHVLAVEGASRATRKGRPASDKKKEASAPSRERPTGKWCTVHNTSLHDLADCRAVKSLAERTRKWEEERRQERREGKSPAVPSGNRRSEAKQKAPAEDIDDGDDDLGFQEPGATIATVDGGACAHVSRRSLKAMKRELLVAAPTHEATRRARWSEVALTFDQTDHPPCVARGGQIAMVVSPTVCNVKLGRVLIDGGAALNILSPAAFDAIKAPGMVLRPSQPIIGVTPGHTWPLGHIDLPVTFGGSANFRTERLNFDVADLSLPYNAVLGRPALVKFMAAVHYAYLQMKMPGPGGPISVHGDLKVALACMEQRVDHLAAASKPEGGDERLGTSVSAAPRQRIVTCDEVPEDALVSFLRANADVFAWRPADMPGVPREVIEHRLAVRPGAKPVRQKVRRQAPERQAFIREEVARLLEAGFIREVIHPEWLANPVVVPKANDKLRMCIDYTDLNKACPKDPYPLPRIDQIVDSTAGCDLLCFLDAYSGYHQIRMAREDEEKTAFITPIGTYCYTTMPFGLKNTGPTFQRTTRISLGSQIGRNVEAYVDDLVVKTRDRETLLSDLAETFESLRSARIKLNPDKCVFGVPAGKLLGFLVSARGIEANPEKIRAIERMRPPSKLRDVQCVTGCMAALSRFISRLGEKALPLFKLLKRSEPFTWTEEAERALTQLKAYLSSPPVLVAPEPGEPLLLYLAVTPQVVSAALVVERDEDNPHSAHPHPVLAWPGREQGGEAPEPNGGPRLPTTGVGPLPACQTVPGAPDPQDGPGATAGRPHLSPSDPEGAGAGVTLTSPSGDVLRYLVRLDFRATNNMAEYEGLLAGLRLAAGLGIRRLLVLGDSQLVVNQVCKEYRCSDPQMDAYVRQVRRMERHFDGIELRHVPRRDNTIADELSRLASSRAQTPPGAFEERLAQPSARPDPLGETDAPDRPPRPVGVQASGPEGSAPSSLRLIAWIAEIQAYLIDKTLPEDREGSERVQRISKRYVLIEGTLYRRAANGILLKCIPREQGVELLADIHEGECGAHSASRTLVGKAFRQGFYWPTALNDAVDLVRRCRACQFHAKQIHQPAQALQIIPLSWPFEYLYVAIDKFTKWPEAYPVVKIDKHSALKFIKGITARFGVPNRIITDNGTQFTSELFDDYCEDMGIKLCFASPAHPRSNSQVERANAEILKGLKTKTFNILKKHGDSWIEELPAVLWANRTTPSRATGETPFFLVYGAEAVLPSELTLRSPRATMYCEADQDQLRRDDLDYLEERRRRAALRAARYQQSLRRYHQRHVRARSLCVDDLVLRRVQTRAGLSKLSPMWEGPYRVIGVPRPGSVRLATGDGTELPNPWNIEHLRRFYP

SEQ ID NO: 165098 - protein, 2112 aa, Oryza sativa
  Clone ID: PAT_MRT4530_63937C.1.pep
MATTDTTIAHIMDEQDDIKIKSSKCWNPIRPPATLLTSNGYRICIRPPFSAHEYLMESSRSPLSNRSGLISRLHLVWPQIQKQGAASPVMGQWACNFVWDPGPSGAHVGNRVDLHRQDQQPTESYHNSPKDRANNSLECREELRVHQVVSELSFLGLRKGIREHRLLHLRRDMTTSSCDAYEEVQKSLQNEKNDMFEMSLPSLANEEMADAATLSEEGIKGKLNGAEITQGIGLICTGKINNPRRGVSIAKAQHNVSLAPILQEMVSTNQSAFIRKRAIHDNFMYVQNPVKRLHRRKTPTLLLKLDISKAFDSLLLDFLGAVQGFPTSYLAYLFTLENYGRGMDSPATPMNFSPLLSLAPRNEPCYTKEENQDVTISSLSLKKLAPEFQDECPRGRVDAHHKFAATIGDGPENKDEEGASHSPRTKGTIQYFTRKVKQHTERLETDLQVTNEKIGQLESTQIFTNTKLTGLETAVARIDTSLAALVRHFDALNAGGNGGGNDDDIDGEYVEDNLEDEYIADTEQDDRDARDHRRLHNNRREETEDAAMARFLGGLNREIYDIVDYKDYTNMTRLFHLACKTSSWQTRTTPPAGRTASPSSTPATSRAAPPPSSDKSATKAAQPALSASSVASTGRTRDVQCHRCKGFGHVQRDCPSKRVLVVKNDGRPWQFDRDSMHHGRSNQYSFLYHDKKIVLHPMSPEDILRDDVAKAAKSKCESDKKAQSNGKKPETINLKPKCLLATKSDINELIASPSVVYALEYSDVFPKEVPPGLPPVRGIEHQIDLIPGASLPNRAPYRTNPEETKEIQRQVHELLDKRLDDMLDELSGSIVFSKVDLRSGYHQIRMKLGDEWKTAFKTKFGLYEWLVMPFGLTNAPSTFMRLMNEVLRPFIGKFVVVYFDDILIYSKSMGEHFNHLRAVFNALRDARLFGNLEKCTFCTDRVSFLGYVVTLQGIEVDQAKVEAIQSWPTPKTVSQVRSFLGLAGFYRRFVQDFSTIATPLNALTKKGVPFTWGTSQENAFHMLKDKLTHAPLLQLPDFNKTFELECDASGIGLGGILLQEGKPVAYFSEKLSGPVLNYSTYDKELYALVRTLETWQHYLWPKEFVIHSDHESLKHIRSQGKLNCRHAKWVEFIESFPYVIKHKKGKENIIADALSRRYTLLTQLDYKIFGLETIKDQYAHDADFNDVLLHCKDGRIWNKFVINGGFVFRANKLCIPASSVRLLLLQEAHGGGLMAHFGAKKTHDILASHFFWPQMRRDVGRAVLKKNIKMWEECLPHIEFAYNRSLHSTTKMCPFQIVYGLLPRPPIDLMPLPSSEKLNFDAKQHAELMLKLHETTKENIERMNAKYKFAGDKDFRVSPTFNIADLKLYLGEEDELESRTTQMQEGEDDEDINTIDTSTFPPCTPSIHPRRLHVQHDGPITRARARQLNYQDECPRGRVDAHHKFAATIGDAFGQIRLIKPLDGSNYAKWKADVLLNLGILDYDYAIREDRPEEPFSVEHDYEEKLNLYHEKTNEWEKSNRISLMYIKSAISNVIIGGIVDSDDVKTYLENIDRNFRSSSKSYASSIIKRLMSMCYNYKDGNNQRDKWSIEEIISHSVEEEDRQKADKQKHKDQLNLLHGAKGGKKKFYRGESSNSQNKKKKPNTPSTQASNGAHKGKAQVLAGQNSAGKFLCKFCKAEGHAQTDCEGFRAWLAKKGTNVDIVSNVDELLYVEFSHKSWWIDSGATVHVANSLQGFRSVRTLRKGEWILRVADGAEIKVMAIGELHHRLPSDDFSRYGYVFPIKDRSKSLDKFKIFKAEVENQHDAKIKIHGIIAQYSMPGEPQQNGVAERRNRTLMDMRHLKQLHTYSVEFQTVVAPDENSGDTDYVENNNELNNDTQQTSGAQNEEILEEPSQPLVIESEPLTILQRERRSAILNYYEVYLGEDIGNVDDPTSFKEAIMSEHLSKWLEAMKDELKSMSHNGVWDLVEIPKGAKTAGCKWVYKTKLDSKGKIKRFKARLVAKGFSQREEIDYNEIFSPVSKKDSFRIVMALVAHYDLELHQMDVKTAFLNGDLHEDVYMAQPEGFVMEGKDHLACKLKKSIYGLKQASRQWYLKFDEIIKRFGFKENEVDN

SEQ ID NO: 165099 - protein, 1900 aa, Oryza sativa
  unsure (1)..(1900): unsure at all Xaa locations
  Clone ID: PAT_MRT4530_63938C.1.pep
MTARQRLDAGGRSSATKTSGTAATGSASSRRRARRAAAAVRHSAATPSSAPPTREDLRGGPDARISIERRRNGRRAAHATEGASSSGVSPQHGRGDQPSVPPVGGVGCRGFVASLRNVRWPPRFRLTIAEKHDGSVNPAEFLQVYTTGIEAAGGDDRVMANFFPMALKGQARGWLMNLPPASVHSWEDLCQQFTMNFQGTYPRLGEEADLHAVQRRDDESLRSYIQRFCQVRNTIPCIPAHAVIYAFSGGVRHNRMLKKIASKEPQTTAELFQLADRVARKEEAWTWNPSGSGVAASAAPGSAARTGRRDRRRKKRSAHSDDEGHVLAVEGASRATRKGRPASDKKKEAGAPSRERPTGKWCTVHNTSLHDLADCRAVKSLAERTRKWEEERRQERREGKSPAVPSGNRRSEAKQKAPAEDIDDGDDDLGFQEPGATIATVDGGACAHVSRRSLKAMKRELLAAAPTHEATRRARWSEVALTFDQTDHPPCVARGGQIAMVVSPTVCNVKLGRVLIDGGAAINILSPAAFDAIKAPGMVLRPSQPIIGVTPGHTWPLGHIDLPVTFGGSANFRTERVNFDVADLSLPYNAVLGRPALVKFMAAVHYAYLQMKMPGPGGPISVHGDLKVALACMEQRVDHLAAASKPEGGDERLGTSVPAAPRQRIVTCDEVPEDALVSFLRANADVFAWRPADMPGVPREVIEHRLAVRPGAKPVRQKVRRQAPERQAFIREEVARLLEAGFIREVIHPEWLANPVVIPKANGKLRMCIDYTDLNKACPKDPYPLPRIDQIVDSTAGCDLLCFLDAYSGYHQIRMAREDEEKTAFVTPIGTYCYTTMPFGLKNAGPTFQRTTQISLGSQIGRNVEAYVDDLVVKTRNQETLLSDLAETFESLRSARIKLNPDKCVFGVPAGKLLGFLVSARGIEANPEKIRAIERMRPPSKLRDVQCVTGCMAALSRFISRLGEKALPLFKLLKRSGPFTWTEEAERALTQLKAYLSSPPVLVAPKPXAALVVERDEDNPHSAHPHPVLAWPRXREQGGEAPEPNGGPRPPTTGAGPLPACQTVPSAPDPQDGPGATVERPHLSPSDPEVNPVPTRPGRVQGEEAPEPNGGLRLPTTGVGPLPACPTTPGAPDPQDGPEATVGRPHLSSSDPEVVGTEDKCAPRGRLDEERPRNAAPGEEDRPHRKVQRPVYFVSEALRDAKTRYPQAQKMLYAILMASRKLRHYFQAHRVTVVTSYPLAQILHNREGTGRVVKWAIELSEFDLHFEPRHAIKSQALADFVVEWTPAPEPVSVPEASSGPSQLLHTAHWVMQFDGSLSLQGAGAGVTLTSPSGDVLRYLVRLDFRATNNMAEYEGLLAGLRLAAGLGIRRLLVLGDSQLVVNQVCKEYRCSDPQMDAYVRQVRRMERHFDGIELRHVPRRDNSIADELSRLASLRAQTPPGAFEERLTQPSARPDPLGETDAPDRPPRPVGVLASGPEGSAPNSLRLIAWIAEVQAYLTDKTLPEDREGSERVQRISKRYVLIEGTLYRRAANGVLLKCIPREQGVELLADIHEGECGAHSASRTLVGKAFRQGFYWPTALNDAVDLVRRCKACQFHAKQIHQPAQALQIIPLSWPFAVWGLDILGPFRRAPGGFEYLYVAIDKFTKWPEAYPVVKIDKHSALKFIKGITARFGVPNRIITDNGTQFTSELFGDYCEDMGIKLCFASPAHPRSNGQVERANAEILKGLKTKTFNILKKHGDSWIEELPAVLWANRTTPSRATGETPFFLVYGAEAVLPSELTLRSPRATMYCEVDQDQLRRDDLDYLEERRRRAALRATRYQQSLRRYHQRHVRARSLCVDDLVLRRVQTRAGLSKLSPMWEGPYRVIGVPRPGSVRLATSDGTELPNPWNIEHLRRFYP

SEQ ID NO: 165100 - protein, 1176 aa, Oryza sativa
  Clone ID: PAT_MRT4530_63939C.1.pep
MAEVANVGTKSSINNNEDTSRRRRRRSTVKAKMPTNGGIIGQPCKRKHQSTAAKVSQRLSFPLTDLDQVREEELEEVVDGKEVKTPKAKTKSATHEIDSIALVDRKLDATPTWRANCRNMISAIIKGGSARDLKVDGCGDKGFRQVQALSMRENELASRFSYGLWDYPLTFLNDCCSEASQPSLYDLRRGASAGAVLYAFGQIRLIEPLDGSNYAKWKADVLLNLGILDYDYAIREDCPEEPFSVEHDYEEKLKLYREKTNEWEKSNRISLMYIKSAISNVIMVRDKWSIEELISHSVEEEDRQKADKQKHKDQLNLLHGAKGGKKKFYQGESSNSQNKKKKPNTPSTQASNGAHKGKAQVPTGQNSAGKFLFKFCKAEGHAQRDCEGFRAWLAKKGAIVHVANSLQGFRSMRTLRKGERILRVADGAEIKVMAVGELHLRLPSGNNLLLHDVLYAPSVKRNLITVMVLTNSGYDCNFSKDKCFIKYNNIDIGLASVQDKLYLLSLDDHIMNILNACNDNETSSKLWHCRLGHISKGRMERLIKKEILQPLDFSNADHCLDCIKGKFTKKIEKGATRSTCLLEIIHTDICGPFPVTSVDGYDSFITFTDDFSRYGYVFPIKDRSESLDKFKIFKAEVENQHNAKIKVVRSDRGGEYYGRHTPYGQSPGPFAQYLQIHGIIAQYSMPEEPQQNGVAERRNRTLMDMRHLKQLHTYSIEFQTVVAPDENSGDADSVENNNELNNDTQQTSEAQNEEIIEEHSQPSVIKNEPLRRSQQERRSAIPNYYEVYLGEDIGKVDDPTSFKEAITSEHSSKWLEAMEDELKSMSHNGVWDLVEIPKGAKTVGCKWVYKTKLDSKGKIERFKARLVAKGFSQREGIDYNETFSPVSKKDSFRIVMALVAHYDLELHQMDVKTAFLNGDFHEDVYMAQPEGFVMEGKDHLACKLKKSIYGLKQASRQWYLKFDEIIKRFGFKENEVDNCIYIKTKGGKFIILVLNVDDILLASSDINMLHQTKDFLSSNFDVKDLGEASYVLGIEIHRDRSKGVLGLSQKSYISRVLERYNMSKCSATPAPIVKGDKFGLFQSPKNKLESDQMKMVPYASAVGSLMYAQVCTRPDLAFVTGMLGRFQSNPGLDHWKAVKKVLRYLQGTKDYMLTYKKSEELEVLGYSDADFAGCRH

SEQ ID NO: 165101 - protein, 194 aa, Oryza sativa
  Clone ID: PAT_MRT4530_6393C.1.pep
MALSSFSMSLPFAKLPSTSKSTRFLPIRASSAAAAASPSFDLRLYWTSLIADVEAELDAAMPIRTPERIHSAMRYAVLPGAGNEGTAKRAPPVLCVAACELLGAPREAALPAAVALEMLHAASLVHDDLPCFDAAPTRRGRPSTHAAYGTDMAVLAGDALFPLAYTHVIAHTPSPDPVPHAVLLRVLGELARAV

SEQ ID NO: 165102 - protein, 316 aa, Oryza sativa
  unsure (1)..(316): unsure at all Xaa locations
  Clone ID: PAT_MRT4530_63940C.1.pep
WVMQFDGSLXLQGAGAGVTLTSRSGDVLRYLVRLDFRATNNMAEYEGLLAGLRVAAGLGIRRLLVLGDSQLVVNQVCKEYRCSDPQMDTYVRKVRRMKRHFDGIELRHVPRRDNTIADELSRLASSRAQTPPGAFEERLTQPSARPDPLGKTDAPDRPPRPIGVQASGPEGSAPSSLRLIAWIAEIQAYLTDKTLPEDREGSERVXRISKRYVLIEGTLYRRTANGVLLKCIPREQGVELLADIHEGECGAHSASRTLVGKAFRQGFYWPTAPNDAVDLVRRCRACQFHAKQIHQPAQALQIIPLSWPFGXSVSNA

SEQ ID NO: 165103 - protein, 149 aa, Oryza sativa
  unsure (1)..(149): unsure at all Xaa locations
  Clone ID: PAT_MRT4530_63941C.1.pep
RGCVDTKXSTSGYVFTLANGAIHGKSSKQTLTTSSTMQAEFLACYEATGQAVWLKNLIPGLRVVDSISKPITLYYDNKAAVFYSSNNKSSGAAKHIDIKYHVVKDRIQDQTIKIEHISTKSMLADPLTKGLPPNLFKDHVAGMGITDCL

SEQ ID NO: 165104 - protein, 1947 aa, Oryza sativa
  unsure (1)..(1947): unsure at all Xaa locations
  Clone ID: PAT_MRT4530_63942C.1.pep
MAEQAKAHDLSPSVSGDDGEPNPRRRARTPPPPPRQSPKQGEALERAEGSATSTSTGGGKGRRDGDRRLLVYGDGSTPQGALQAAGALLCHPPVAHDPESPAQRWLDDVAKLVMTARQRLDTGGRSSATKASGAATTGSASSRRRARRAAAAVRHSAATPSSTPSTREDLRGGPDARASIERRRNDRRAAHATEGASSSRVSPQHGRGDQPSVPPVGGVGCRAFVASLRNVRWPPRFRPTIAEKYDGSVNPAEFLQVYTTGIEAAGGDDRVMANFFPMALKGQARGWLMNLPPASVHSWEDLCQQFTMNFQGSYPRPGEEADLHAVQRRDDESLRSYIQRFCQVRNTIPCIPAHAVIYAFRGGVRHNRMLEKIASKEPQTTAEFFQLADRVARKEEAWTWNPSGSGVAASAAPGSAAQTGRRDRRRKKRSVHSDDEGHVLAVEGAPRATRKGRPAGDKKKEAGAPSRERPTGKWCTVHNTSLHDLADCRAVKSLAERTRKWEEERRQERREGKSPAVPSGNRRSEAKQKAPAEDIDDGDDDLGFQEPGATIATVDGGACAHVSRRSLKAMKRELLAAAPTHEATRRARWSEVALTFDQTDHPPCVARGGQIAMVVSPTVCNVKLGRVLIDGGAALNILSPAAFDAIKAPGMMLRPSQPIIGVTPGHTWPLGHIDLPVTFGGPANFRTERVNFDVADLSLPYNAVLERPALVKFMAAVHYAYLQMKMPGPDGPISVHGDLKVALACMEQRADRLAVVSKPEGGDERLGTSAPAAPRQRIVTCDEVPEGALVSFLRANADVFTWRPADMPGVPREVIEHRLAVRPGARPVRQKVRRQAPERQAFIREEVARLLEAGFIREVIHPEWLANPVVVPKANGKLRMCIDYTDLNKACPKDPYPLPRIDQIVDSTAGCDLLCFLDAYSGYHQIRMAREDEEKTAFITPIGTYCYTTMPFGLKNSGPTFQRTTRISLGSQLGRNVEAYVDDLVVKTRNQETLLSDLAETFESLRSARIKLNPDKCVFGVPAGKLLGFLVSARGIEANPEKIRAIERMRPPSKLRDVQCVTGCMAALSRFISRLGEKALPLFKLLKRSGPFTWTEEAERALTQLKAYLSSXPPVLVAPEPNEPLLLYLAATPQVVSAALVVERDEDNPHSAHPHLVQTWPGREQGEEAPEPDGGLRPPTTGAGPLPACQTVSGAPDSQDSPEATAGRPHLSPSDPEANPVPIRPRREQGEEAPEPNGMPLRSVIPYSCVLGDLCMKELQSISQPLPCSGFLIWKGPVQEKALPLSQWARSSFYILRGYHMHHPPFSLGTYPTXFINGRRFAWLPSESPSDGTAHXTSTFARSRRVVELWPPADDMTGVRPVTSVILGAGAGVTLTSPSGDVLRYLVRLDFRATNNMAEYEGLLAGLRVAAGLGIRRLLVLGDSQLVVNQVGKEYRCSDPQMDAYVRQVRRMERHFDGIELRHVPRRDNVMADELSRLASSRAQTPPGAFEERLTQPSARPDPLGETDAPDRPPRPVGVQASGPEGSAPSSLRLIAWIAEIQAYLRNKTLPEDREGSERVHRISKRYVLVEGTLYRRAANGILLKCIPREQGVVLLADIHEGECGAHSASRTLVGKAFRQGFYWPTALNDAVDLVRRCRACQFHAKQIHQPAQALQTIPLSWPFAVWGLDILGPFRRAPGGFEYLYVAIDKFTKWPEAYPVVKIDKHSALKFIKGITARFGVPNRIITDNGTQFTSELFGDYCEDMGIKLCFASPAHPRSNGQVERANAEILKGLKTKTFNILKKHGDSWIEELPAVLWANRTTPSRATGETPFFLVYGAEVVLPSELTLKSPRATMYCEADQDQLRRDDLDYLEERRRRAALRAARYQQSLRRYHQCHVRARSLCVDDLVLRRVQTRAGLSKLSPMWEGPYRVVGVPRPGSIRLATGDGTELPNPWNIEHLRRFYP

SEQ ID NO: 165105 - protein, 1039 aa, Oryza sativa
  Clone ID: PAT_MRT4530_63943C.1.pep
SGPGTVGTGTASDRAASACHTGRRRPQPSPLRVVTAPLRHLSPAPPPSFGQIRLIKPLDGSNYAKWKADVLLNLGILDYDYAIREDRPEEPFSVEHDYEEKLNLYHEKTNEWEKSNRISLMYIKSAISNVIIGGIVDSDDVKTYLENIDRNFRSSSKSYASSIIKRLMSMCYNYKDGNNQRDKWSIEEIISHSVEEEDRQKADKQKHKDQLNLLHGAKGGKKKFYRGESSNSQNKKKKPNTPSTQASNGAHKGKAQVLAGQNSAGKFLCKFCKAEGHAQTDCEGFRAWLAKKGTNVDIVSNVDELLYVEFSHKSWWIDSGATVHVANSLQGFRSVRTLRKGEWILRVADGAEIKVMAIGELHHRLPSDDFSRYGYVFPIKDRSKSLDKFKIFKAEVENQHDAKIKVVRSDRGGEYYGRPTPYGQSPGPFAQYLQIHGIIAQYSMPREPQQNGVAERRNRTLMDMIEALKTAAHILNRVPSKSVPKTPYELWTGRKPTLNYLRVWGCRAEARIFNPQLKKLDPKTTSEAQNEEIIEEPSQPSVIENEPLRRSQRERRSAIPNYYEVYLGEDIGKLEAMEDELKSMSHNGVWDLIEIPKGAKTGGCKWVYKTKLDSKGKIERFKARLVAKGFSQREGIDYNETFSPVSKKDSFRIVMALVAHYDLELHQMDVKTAFLNGDLHEDVYMAQPEGFVMEGKDHLACKLKKSIYGLKQASRQCYLKFDEIIKRFGFKENEVDNCIYIKTKGGKFIILVLYVDDILLASSDINMLHQTKEFLSSNFDMKDLGEASYVLGIELHRDRSKGVLGLSQKSYISRVLERYNMSKCSATPAPIVKGDKFGLFQSPKNKLESDQMKMGRPVSWIGDDLSTIIFSPKIPKTLSDQVECWRDNVWWFRDSVGGDRKAAATPQRCSRDEVIRLDRNQGLIGPIREKFSSQDFESLAHHVQKVLAHEQRFQEAKKFKKVNYVYSCVSDSDDDQDLEISLAEWSKVKKTTMCQWVKDTNKEEKYDFDINKADKIFDLLLQKKQIQLPVGCDILAQLG

SEQ ID NO: 165106 - protein, 1720 aa, Oryza sativa
  unsure (1)..(1720): unsure at all Xaa locations
  Clone ID: PAT_MRT4530_63944C.1.pep
MAEQAKAHXLSPSVSGDDGKPNPRRRAGTPPPPPRQSPRRKKALERVEGSATSTSTGDEEGRRDGERRLFVYGDGSTPQGALQAAGALLRHPPVVPDPESPAQRWLDDVANLVMTARQRLDAGGRSSATKTSGTATTGSASSRRRARRAAAAVRHSAATPSSAPPTREDLRGGPDARISIERRRNGRRAPHATEGASSSGVSPQHGRGDQPSVPPVGGVGCRAFVASLRNVRWPPRFRPTIAEKYDGSVNPAEFLQVYTTGIEAAGGDDRVMANFFPMALKGQARGWLMNLPPASVHSWEDLCQQFTMNFQGTYPRPGEEADLHAVQRRDDESLRSYIQRFCQVRNTIPCIPAHAVIYAFRGGVRHNRMLEKIASKEPQTTVELFQLADRVARKEESWTWNPSGSGVAASAAPGSAARTGRRDRRRKKRSAHSDDEGHVLAVEGASRATRKGRPASDKKKEASAPSRERPTGKWCTVHNTSLHDLADCRAVKSLAERTRKWEEERRQERREGKSPAVPSGNRRSEAKQKAPAEDIDDGDDDLGFQEPGATIATVDGGACAHVSRRSLKAMKRELLVAAPTHEATRRARWSEVALTFDQTDHPPCVARGGQIAMVVSPTVCNVKLGRVLIDGGAALNILSPAAFDAIKAPGMVLRPSQPIIGVTPGHTWPLGHIDLPVTFGGSANFRTERLNFDVADLSLPYNAVLGRPALVKFMAAVHYAYLQMKMPGPGGPISVHGDLKVALACMEQRVDHLAAASKPEGGDERLGTSVSAAPRQRIVTCDEVPEDALVSFLRANADVFAWRPADMPGVPREVIEHRLAVRPGAKPVRQKVRRQAPERQAFIREEVARLLEAGFIREVIHPEWLANPVVVPKANDKLRMCIDYTDLNKACPKDPYPLPRIDQIVDSTAGCDLLCFLDAYSGYHQIRMAREDEEKTAFITPIGTYCYTTMPFGLKNTGPTFQRTTRISLGSQIGRNVEAYVDDLVVKTRDRETLLSDLAETFESLRSARIKLNPDKCVFGVPAGKLLGFLVSARGIEANPEKIRAIERMRPPSKLRDVQCVTGCMAALSRFISRLGEKALPLFKLLKRSEPFTWTEEAERALTQLKAYLSSPPVLVAPEPEWTPASEPVSVPEASSGPSQLPHTAHWVMQFDGSLSLQGAGAGVTLTSPSGDVLRYLVRLDFRATNNMAEYEGLLAGLRLAAGLGIRRLLVLGDSQLVVNQVCKEYRCSDPQMDAYVRQVRRMERHFDGIELRHVPRRDNTIADELSRLASSRAQTPPGAFEERLAQPSARPDPLGETDAPDRPPRPVGVQASGPEGSAPSSLRLIAWIAEIQAYLIDKTLPEDREGSERVQRISKRYVLIEGTLYRRAANGILLKCIPREQGVELLADIHEGECGAHSASRTLVGKAFRQGFYWPTALNDAVDLVRRCRACQFHAKQIHQPAQALQIIPLSWPFEYLYVAIDKFTKWPEAYPVVKIDKHSALKFIKGITARFGVPNRIITDNGTQFTSELFDDYCEDMGIKLCFASPAHPRSNSQVERANAEILKGLKTKTFNILKKHGDSWIEELPAVLWANRTTPSRATGETPFFLVYGAEAVLPSELTLRSPRATMYCEADQDQLRRDDLDYLEERRRRAALRAARYQQSLRRYHQRHVRARSLCVDDLVLRRVQTRAGLSKLSPMWEGPYRVIGVPRPGSVRLATGDGTELPNPWNIEHLRRFYP

SEQ ID NO: 165107 - protein, 1415 aa, Oryza sativa
  Clone ID: PAT_MRT4530_63945C.1.pep
MDVVGAASWLVQVVLEKLVGDGIDAAWAAARAGGDPGRAHGGDVRRLGSRLQSLHALLSEAQEHAPMARRRSEALLRSLRSLESLATDADNLLDEMLYHQIHRRLHPDEPSTSSNSCSSLFAVQLVEPNNRVAKRVRHSGDGDTTGRIKDILERMCEAGDDVREAIKMEKLDVSAAGGGQDDRIIQRRPTTSYSTEPKVFGRDTVKDRIVVMLISSETCGADLAVLPIVGNGGVGKTTLAQLVYSDTRVQAQFSKRIWISVSVDFDEVRLTRELLDCVSNGVNKHGGITNLNKLQEILEEDLKSERLLLVLDDMWEDNDKSRWNKLLAPLRCSSLRGNAILVTTRNHSVVKMIATMDPIHLDGLEDGDFWLLFKACAFGDEKYEGHPSLQVIGKCIANKLKGYPLAAKSVGALLNRDLDGGHWMSILQSDEWKLQRGPDDIIPALMLSYIHLPFHLQRCFSYCALFPKGHRFDGLDLVRVWISQGFVSSNNKKMEDIGHQYLNDLVDCGFFQRSTYYSMHDLIHDLAHIVSADECHMIDGFNSSGIAQSTIQHLSINTRYAYKWDVYSQKFYSKDDFQRKLTYVGETVQTRNLSTLMLFGKYDADFSETFSHIFKEVQYLRVLRLPTLTYSIDYLLSNFSKLIHLRYLELISSGPGGPLPEVICQLYHLQVLDVEYWVHLSTLPRAMNDLVNLRHFVARGELHALIAGVGRLKFLQELKEFRVGKTTDFQIGQLNGLRELGGSLAIYNLENICSKEESKNAGLRDKIYLKDLLLSWCSNRFEVSSVIEEEVLESLQPHSGLKCLSINGYGGISCPTWLSSINPLISLETICLDSCTKWEVLPPLGQFPLLRTLHLIQLPSSRVVPTVSSDDWTGSEKHIIFPCLEELVIRDCPELRTLGLSPCSFETEGSHTFGRLHHATIYNCPQLMNLPQFGQTKYLSTISIEGVGSFPYIRLFVRALYIKGCASPSKLDQILMLIEGNLCLLEKLTIESCLDLTYLPWKTLSKLVSLEMLVIVDCPRLSLTLYPYNQDGGNFSFMSLLNKLVIRACSITGKQLSHLILQLPFLHYLTIGKCPKITSLLLGDVINGSDSSSTSDYLQLTTDGMLQIPSHLLIQLQYLSIDDFPDLVLLWKEGFHGFTSLRTLHITGCTQLLSPMITENKRSNKNSSLLPPLLHDLMVTHVHNELLPFLLSNLTSLSIFAISNSPELTSLVLHSCTSLETLIIEKCVGLSALEGLHSLPKLKHLRIFQCPSLAKTWGPSSVDRPGFSLYLDKLEIDTTVLFNTEVCKKLPSLRHLVFFMLSIKACPGIKSLPENGLPASLHELYVSSCSAELKEQCKKTKNVRCVYVDRNASKFIVICKLLRLYFRITKLGAWQRSLWLQSRTGGSNELMVLTKVLFTIATTVVFRTGLVISEL

SEQ ID NO: 165108 - protein, 56 aa, Oryza sativa
  Clone ID: PAT_MRT4530_63946C.1.pep
FFFFLKSKGFSPGSTRIPHTHTTVHRAHTTSQHSQTAISHKVFHTVAQFSTHHTTA

SEQ ID NO: 165109 - protein, 100 aa, Oryza sativa
  unsure (1)..(100): unsure at all Xaa locations
  Clone ID: PAT_MRT4530_63947C.1.pep
MAYTIMGPTCRVLATKTPLLSHPKTFNASRRDIADADTSRITMSKELXYSPDRVNYLWPFSTHTPSYLRGEFPGDYWWDTVGFSEYPEAYTRNMTLDGST

SEQ ID NO: 165110 - protein, 66 aa, Oryza sativa
  Clone ID: PAT_MRT4530_63948C.1.pep
SKVREGKKLNPYPQKPFGQLNVIAFLTRLVNIVGPKELPGKTLNLGGKRNKKRGGPPLLTFFKPQF

SEQ ID NO: 165111 - protein, 76 aa, Oryza sativa
  Clone ID: PAT_MRT4530_63949C.1.pep
MDGWMWSSDFMDALGWLLVLAWRVRADEADSLEVVGMLTQIGVNRSIYGTMIQDLKNMLKTYFLGNEGPMGAAIGE

SEQ ID NO: 165112 - protein, 627 aa, Oryza sativa
  Clone ID: PAT_MRT4530_6394C.1.pep
MAMEVALAVYSLVLLASFSFPCRLASALLSPKGVNYEVQALMMIKTSLKDPHGVLKNWDQDSVDPCSWTMVTCSPENLVTGLEAPSQNLSGLLSASIGNLTNLEIVLLQNNNINGPIPEEIGRLTKLKTLDLSSNHFSGGIPNSVGHLESLQYLRLNNNTLSGAYPSSSANLSQLVFLDLSYNNLSGPVPGSLARTFNIVGNPLICAAGTEHDCYGTLPMPMSYSLNNTQGTLMPAKSKSHKVAIAFGSTIGCISFLIPVMGLLFWWRHRRNHQILFDVDEQHTENVNLGNVKRFQFRELQVATENFSNKNILGKGGFGNVYRGKLPDGTVVAVKRLKDGNAAGGQAQFQTEVEMISLALHRNLLRLYGFCMTATERLLVYPYMSNGSVALRLKGKPPLDWITRQRIALGAARGLLYLHEQCDPKIIHRDVKAANILLDDYCEAIVGDFGLAKLLDHRDSHVTTAVRGTVGHIAPEYLSTGQSSEKTDVFGFGILLLELITGQTALEFGKSSNQKGAMLDWVKKMHQEKKLDVLVDKGLRSNYDRVELEEMVQVALLCTQYLPGHRPRMSEVVRMLEGDGLAERWEASQRADSHKFKVPEFTFGRCYSDLTDDSSLLVQAVELSGPR

SEQ ID NO: 165113 - protein, 80 aa, Oryza sativa
  Clone ID: PAT_MRT4530_63950C.1.pep
MVKVSKKSSYIGMSWLMQPIATVVDEIAEPQGKTLSIASCTGLPLVFQEDFDLQLYDVPERAGLQRMVINPEVGRKIRLK

SEQ ID NO: 165114 - protein, 626 aa, Oryza sativa
  Clone ID: PAT_MRT4530_63951C.1.pep
MANREEPYSTTGGTAAKAPPVAMDAKLLMAECPEDRKLLKELVHKEDASKMMVVLASTTNQPAAEKPAAARAVMNPLLLAAASFGACEVFYFLFCREDAREPLPTMTARAFHAMLAGDASGADGRWPSTHQQALDEVEEGGAGAAVAVGHQSTRRLPPPDAPLLEGITVEGDTALHVVATHGNAANFLECAEIICNRARRLLLATNDKGDTALHCAARARRLEMASRLIALAKAREDHEVERGQAASFGKVLLRTENERNETALHDAVRAGDGDMVRRLMDEDPDLALFPVQGTSPLYLAISLRNGTIAEILHEKSNGNISYSGPHGQNALHAAVLLRHTAVLELLLKWNSNLTKQGDENGSTPVHFAASFPLWHRKFHWRHPWIIRVPHSLSMLLNTGEVDPFYQSDKNGMFPVHVAAAVGAELTVAFLLDKFPNSAGLRDAKGRTFLYVAVEKQSLAVVRFACRTTSLQWILNMQDKDGNTALHLAIQANHHRLFCALLGNPQVNLDLTNHSGHTPLDLSRRMLPRGMKYTANTEELIYLTLKQVGSEHYHDRRDHIEEIYSRRVVSKEDLAEELDKMQESTQTLGIGSVLIVTVTFGAMFALPGGYRADDHPYGGTPTFSGRW

SEQ ID NO: 165115 - protein, 55 aa, Oryza sativa
  unsure (1)..(55): unsure at all Xaa locations
  Clone ID: PAT_MRT4530_63952C.1.pep
VKCSXVQIPDNSPPTLSINTGIPPSSHLTQPSHQSLSHYQHCFXSTGCLHTXFCP

SEQ ID NO: 165116 - protein, 269 aa, Oryza sativa
  Clone ID: PAT_MRT4530_63953C.1.pep
MKVQCDVCAAEAASVFCCADEAALCDACDHRVHRANKLAGKHRRFSLLNPSASGRSPTSTTAPLCDICQEKRGFLFCKEDRAILCRECDVPVHTASELTMRHSRYLLTGVRLSSEPAASPAPPSEEENSSSFCCSADDAVPAPAAPATSHGGSSGSSSISEYLTTLPGWHVEDFLVDDATAEAAAAAAATSSGISANGPCQGVTRIGGLQESAGYPAWMAQQQLCCDGLVAGDASPASRERWVPQMYADQLAAGSKRSRTSTASSYSYW

SEQ ID NO: 165117 - protein, 247 aa, Oryza sativa
  Clone ID: PAT_MRT4530_63954C.1.pep
MRRIQIHPSHGGGGGTGGRARRQAADQPVVYTVWKRSSIGFQGTDGFSVYDSAGKLAFRVDNYSRRRKAFAGDLLLMDGHGTPLLSLRPQILSLHNRWNCYRAQEVKFFHSSSSLSDSQQQVSSMMEELSSSMSRRRSRTSESTACFSMRSCKIRGSNGEEAARITRKNAGVMSRPVSLGDDVFTLVVRPGVDVAVVMAMVVVMDRICRRPYTPMACSSSGNSVVHSGEIIKSKEKYHLNRSSSSLL

SEQ ID NO: 165118 - protein, 249 aa, Oryza sativa
  Clone ID: PAT_MRT4530_63955C.1.pep
MDSSRSSNSLDSGSSLTLGELACAALIPVLALVDAVVFAAAQCFQKRPPGLLPATLAARARRRAGGRLTFRELADLADESRCFSVNEVEALYELYKKISCSIVDDGLIHKEELQLALFRTPAGKNLFLDRVFDLFDEKKNSVIEFEEFIHAISVFHPNTPLEDKIDFSFRLYDLRQTGFIEREEVKQMVVATLLESEVQLSDDLVEAILDKTFEDADTDKDNRISKEEWKAFVLKHPSVIKKMTLPTLK

SEQ ID NO: 165119 - protein, 100 aa, Oryza sativa
  unsure (1)..(100): unsure at all Xaa locations
  Clone ID: PAT_MRT4530_63956C.1.pep
INLRSFKYSWVVGFDKALRXRGLTIDIALWKFETTKYYCTVIDAPGHCDFIKNMITGTSQADCVVLIXIDSTIGGFEACFLHFCLDFLIPLRTIFISYIF

SEQ ID NO: 165120 - protein, 86 aa, Oryza sativa
  unsure (1)..(86): unsure at all Xaa locations
  Clone ID: PAT_MRT4530_63957C.1.pep
TRAPPPSPSSPCSQSTARPLPRPPPTAPPRTPSARSRPXNGSMMSTLTGSILPPPPPSVRPPPPPPFCCAFCFRPSMLVDIDMVAN

SEQ ID NO: 165121 - protein, 147 aa, Oryza sativa
  Clone ID: PAT_MRT4530_63958C.1.pep
PPPPPPPPPPPPPPPPPPPPPPPPPFFFLAPTTPFFFHPPLAPPPGFPLFSQIIKRGKKKKNWGSPFLKKTTFLLPISRVPHLKKGGPKTPPPQTPFDPKKKLAGNRGFSGGRPFSKRTRVSVLFFFFSQNTFFLHPPKWVFFNQQK

SEQ ID NO: 165122 - protein, 92 aa, Oryza sativa
  Clone ID: PAT_MRT4530_63959C.1.pep
TSRFGVPDPTLSVTATAQVVLQIPCPYSLLNSELPNDSDVQLSVLTIIFSMHLCILSFVPYVHTPMECTCGGQIVAQVVGTSTSNMNGVTIS

SEQ ID NO: 165123 - protein, 110 aa, Oryza sativa
  unsure (1)..(110): unsure at all Xaa locations
  Clone ID: PAT_MRT4530_6395C.1.pep
XTCGGGDXDNGGRSPPSLGAASWGHRAQPTPPAPGGGGRDDEDAEPRPSVVTWSCNGEGAAPRREPVAVAKGPTRSSREDSGSNRRQPEAPGSASTAAPMPLPLFSSTGI

SEQ ID NO: 165124 - protein, 398 aa, Oryza sativa
  Clone ID: PAT_MRT4530_63960C.1.pep
MSAAAEAEAAAVESLPDDVVAEILLCLPPHPSFVSGASLVCKRWLHLIRSPSFLRRVCAFHRTPPVLGFFHNYRDLPSFVPAEGVPGRNRMDGVDDGGDARMFIDCRHGRALLRRYDWAVLVVWDPMTGERRRIAGPNQKMQGGGAGTSRRSAALFCSCDVSGGGGDQDCHSSPFHVVVVFTGGCRAFACVYSSLTDAWGDLISTPAPLPCELCDTPPALVGEASYWLSYGGLILEFQFGSQSLTLMKRPLEMLADVRLVRLEEDGLGLAFIKDSTLHLWAREVADDGAPKWKWIPRRAIELDKFLPMPRVLTGKWCGEMFVSISGFSEDGNVVFIRTLAGVFLVWLEALKFKKMSDPLYMMTVHPYSSFYVPNGVKANRVYNRPNFSKSLSFYGLLS

SEQ ID NO: 165125 - protein, 62 aa, Oryza sativa
  Clone ID: PAT_MRT4530_63961C.1.pep
EGIRDMKPGGKRRIIIPPELGPPVGPSTFFSAKQFEVFDIELLAVQDCQRRTIAFYSDVVCS

SEQ ID NO: 165126 - protein, 67 aa, Oryza sativa
  Clone ID: PAT_MRT4530_63962C.1.pep
INSFSLGIIVGGLRIICIQERKIGGSVCYRLFSHTFCCSLCCLPPLHLLFLSVFGLGVYLLMFFPSL

SEQ ID NO: 165127 - protein, 43 aa, Oryza sativa
  Clone ID: PAT_MRT4530_63963C.1.pep
MGRLERMRIWRGNGAARAAWLGSAGRLLEGVPPWETLGLHFPC

SEQ ID NO: 165128 - protein, 59 aa, Oryza sativa
  Clone ID: PAT_MRT4530_63964C.1.pep
QKTFLSSREVTINIFPMILNINHTNILFSPCALTTLLGGSRYPLTPCSRMTFHAAALKR

SEQ ID NO: 165129 - protein, 92 aa, Oryza sativa
  Clone ID: PAT_MRT4530_63965C.1.pep
MAGGSRRCRGGGRRGAPGGGKAAGGAARGGGRRGAPGGGKAAGGAARGDGRRGRARRADVAAFVECEGVGAMLWDLALLSPVANRAVTGEGV

SEQ ID NO: 165130 - protein, 141 aa, Oryza sativa
  Clone ID: PAT_MRT4530_63966C.1.pep
MVVVGAVSCCRRGSWRRRAADLALAVVVVFAAAAGAAAARRPIRVLRRPAAAAAHVRRLDSSPSLMLARRTNAAAGGGDNGDVRRRRLIGPGSSPPTCRARCGRCAPCRPVHVAIQPGVGAQWEYYPEVWRCKCGDKLFMP

SEQ ID NO: 165131 - protein, 523 aa, Oryza sativa
  Clone ID: PAT_MRT4530_63967C.1.pep
MADVEACLLAHLNSGGEVPDSRSYASSLRVTHDELEAVIKSLSAFRIVDTTVLLLPSPPLSSPSPNLSPGLPNPNELSAPQDITKETWVLTDEAKGYVAGGSPEAQLVAAIPPEGASKDVLREKLGSVFDIGMKTAAKNKWIGFEKGNKDLVLRKVNTIKDDLQEQLKSLESGEVPKIVDWFLSVHRSPFTSTVPQNIVLSDKVIDDLKRRKLITKEKSIWYALKKGPQFVAKRKKLATDVTQEHLRSGDWKDLEFKDYNFGAQGQPIAIGYVQPLLEVREEIQNIFLQMGFTEMPTNNYVESSFWNFDALFQPQQHPARDSHDTFFLEAPAATKQLPEDYLEKVKEVHQRGGYGSKGYGYDWKRDEAEKNLLRTHTTAVSTRMLYKLAQEKPFAPKRYYSIDRVFRNEAVDRTHLAEFHQIEGMSKLRFKPAYNPYTEPSMEIFSYHEGLKKWVEVGNSGMFRPEMLLPMGLPEGVNVIAWGLSLERPTMILYGIDNIRDLFGPKVDFNLIKSNPLCRLGLQ

SEQ ID NO: 165132 - protein, 283 aa, Oryza sativa
  unsure (1)..(283): unsure at all Xaa locations
  Clone ID: PAT_MRT4530_63968C.1.pep
MADVEACLLAHLNSGGEVPDSRSYASSLRVTHDELEAVIKSLSAFRIVDTTDITKETWVLTDEAKGYVAGGSPEAQLVAAIPPEGASKDVLREKLGSVFDIGMKTAAKNKWIGFEKGNKDLVLRKVNTIKDDLQEQLKSLESGEVLSDKVIDDLKRRKLITKEKSIWYALKKGPQFVAKRKKLATDVTQEHLRSGDWKDLEFKDYNFGAQGQPIAIGYVQPLLEVREEIQNIFLQMGFTEMPTNNYVESSFWNFDALFQPQQHPARDXHDTFSLEAPAATNNC

SEQ ID NO: 165133 - protein, 169 aa, Oryza sativa
  Clone ID: PAT_MRT4530_63969C.1.pep
SYSTRMLYKLAQEKPFAPKRYYSIDRVFRNEAVDRTHLAEFHQIEGLICDYGLTLGDLIGVLEDFFSSLGMSKLRFKPAYNPYTEPSMEIFSYHEGLKKWVEVGNSGMFRPEMLLPMGLPEGVNVIAWGLSLERPTLILYGIDNIRDLFGPKVDFNLIKSNPLCRLGLQ

SEQ ID NO: 165134 - protein, 1372 aa, Oryza sativa
  unsure (1)..(1372): unsure at all Xaa locations
  Clone ID: PAT_MRT4530_6396C.1.pep
MDFPKFDGKSDPLAFINCCESYFHQQRIAEEEKVWIASYNLEDAAQLWYTQVQQDEGTPPWRRFTELLHLRFGPPLHTNPLGELMACKRTGSVVDYQDKLEALLPRAGKLTEEQRIQIFTAGLQLPLSLDVEIHNPQTLVFAMSLARKLELRNQCVAPAAPPRHNQRGLLPAPPQLLALPAPPPPTAPSPATVTVEGRTVKRLSQAEMEERRRLGLCFNCNDKFSRGHNRVCQRLFLLDLAAPDDDYDDDSTPEETGETDPHVSLHAIAGVRFSDTMQVHINMGGANLLALLDSGSTHKFVSMAAASRTKLKLLPRGQMQVTVANGERVPCPGLYRNTAFSIDGETFHADFFALPLAGXNVVLSTQWLATLGPILWDFGSLSMSFWRHDHRVCWHGVAGSATPSLKAVAGQDIMAALLDEFTAVFAEPKGMPTPRSRDHYINLFPGSSPVAVRPYRYPASHKDELERQCSDMLTQGLIRRSTSAFSSPVLLVKKADGSWRFCVDYRALNTITIKDAYPIPVVDELLDELHGARFFTKLDLRSGYHQVRMNAADIAKTAFRTHDGLYEFMVMPFGLCNAPATFQALMNDVLRPFLRHFVLVFFDDIFIYSDSWAAHLGHVRTVLDTLHQHRLFVKRSKCDFGVTSISYLGHVISDTSVAIDPAKVQAVSDWPQPHSARAVRGFLGLAGYYCKFVKDFSTIAAPLTALLRKEGFLWSDEAAAAFNVLKSAITSAPVLALPDFAKPFVVECDASTHGFGAVLLQDHHPVAFFSHPVAPRHSSLAAYERELIGLVLTIRHWRPYLWGCRFLVRTDHFSLKFLLDQRLATIPQLHWVGKLLGFDFTVEYKAGASNTVADALSRRDTDETMLLAISGPRFDFIDYLRQAHDSDPTLVALREELQANQRRAPWALIDDMVTFDGRLYISPASPLLQEILTAIHADGHEGIQRTLHRLRRDFHSPNHRSIVQDHVRAXITCQRYKSEHLHLAGLLLPLPVPTAVWADIGLDFIEALPRVSGKSVILTVVDRFSKYCHFIPLVHPYSAESVAQAFFTEIVRLHGVPQSMVSDRDLVFTSLFWKELMRLIGAKLHMTSAFHPQFDGQTDATNKVIIMFLRCLTGDRPRQWLRWLPWAEYIYNTPFQSALKDTPFKVVYGRDPPTIRSYEPGETRVVAIAKSMAQRDEFLADVRYRLEQAQAVYKRHYDKTHRDVSFQVNDXVWLRLHHRXPASLNVTTKGKLKPRFYGLYRILAVINDIAYRLELPPRARLHDVFHVGLLKKFVGTPPSVPPPLPNTHHGAVVPEPERAVRSRLARGVRQVLVQWKGEPAASATWEDVDGFLDRYPSFQLADELLVEGGRDVMWGRHYHRRSRPEAQLQQAA

SEQ ID NO: 165135 - protein, 70 aa, Oryza sativa
  Clone ID: PAT_MRT4530_63970C.1.pep
SPPPPPPLPVGCLPPLPPPPPPSAQASRRLASPPRGLTFVGSSHSGARGRRPPDLNALDCLESGSGPQSL

SEQ ID NO: 165136 - protein, 148 aa, Oryza sativa
  Clone ID: PAT_MRT4530_63971C.1.pep
NTIYMTLDQTHLKPKKGDEHIKHHSVMAHPQHVTHSLPHISQHPMSVTLPAQHSCNFPISHSTLSSFHFHHSKTKSINPHNHGMCYLRVGQPSSTHCTLSTRQPTLIRSSQGHPRFTSAHHSTHQPSHPSSWLSGTSFLIRRCTHIGA

SEQ ID NO: 165137 - protein, 415 aa, Oryza sativa
  unsure (1)..(415): unsure at all Xaa locations
  Clone ID: PAT_MRT4530_63972C.1.pep
MVATVGSSSRTTMERNELLTMVKKHSHLIGWTVVDAEDDASDVGMDDRFWXMKYLDLFFVAWVGFQKGREEDDLVFFVNNMKLNGYRSSDNMENPPPFFVRRWAPKLEKITNINLADVNWERSFYLNLIAHTSYSVTVAICSIMDLCNRAEKSKPLSPVYKVMYKXTKTVYASPSRVNFHLDRRKAVETVPAYPNICFSIDDFDDTFDAVVLSDPEHCYCVILNAHDGAAFPENTESKNPSSNVLSGVNTGSKQEKPPKRTLFSGYVSYQNVREAYDAGRSKFESLFSLGHDRTKLDKLYMRGPEGRGEVEVAVSGIADQSHERSKKDPGNSFRALVHSAASTASKLAKHAYEAASTNKRFDDELLPLKCCLMSVSLPWDYIAHDLLHKVNPDRSTGHQWIHGYGNYEQHQQEPP

SEQ ID NO: 165138 - protein, 317 aa, Oryza sativa
  Clone ID: PAT_MRT4530_63973C.1.pep
GSLLHCTTSGSTRTVTPGARHDPLSAWGSGVDYGAYPTYCGSPPSWPPSHVARDCPFCSGPTPGGLDYWRPWTAPRLCPPPSPGGGLPSPLHPPSEWYKSCSEVNCHPLSIKLDPISNSRININSASGRASNDSQAPSVQPQKCGPVDSTVVSMALKREQFSIPSMCSESFSSHCTKSQDSVVRMRPDDTLVRRALISDSVNGCDSVGPTVESHCHSLLSQNFDSEGHASHVVSMFGNSGARLHSSAPCMTTEAQVFVAPSRAYENSSSLNAEGSDAVISSIAPQVHAPSIPPQNCPRTSVAPHLCLPRSMAPHSVY

SEQ ID NO: 165139 - protein, 219 aa, Oryza sativa
  unsure (1)..(219): unsure at all Xaa locations
  Clone ID: PAT_MRT4530_63974C.1.pep
WPPAPTTSPRAPCAAPGRAPTSPSPPPPASRGEAAAGAGRGLTSRRRARRRRRRTSSRSTRSSSTTXPHELLPPRLPPPAPRRXATATPIPIPTPTAAHTTPVLAHPPPRRRRLHLPPPHPPRPRRPPRQAPQRRPRRERTTTRGASSCDVSRRRRGSCKTSCTGSTRPGGRTTTRGRRRSWSGRTRRRRRTACPPPGAPSRTATTATATATTTTAGSR

SEQ ID NO: 165140 - protein, 75 aa, Oryza sativa
  Clone ID: PAT_MRT4530_63975C.1.pep
GNPRKFAPVTLLLPRGRYGGPPPFLRGVFPWGPPVNLVFPPIMVFQAPRPKLGPFYGRPPVKNFFPRQKDRFFIF

SEQ ID NO: 165141 - protein, 113 aa, Oryza sativa
  unsure (1)..(113): unsure at all Xaa locations
  Clone ID: PAT_MRT4530_63976C.1.pep
VVRSVLSWEVAGSEPXASPPMESSPXGPRKPTVSPPARSSGGEAPXAAAASPPTKSGGGEGRPSPPMLPPVVPPXAPSPPAAATRRPPPPLLHRRLPPFTRLPPPPLEERRKR

SEQ ID NO: 165142 - protein, 97 aa, Oryza sativa
  Clone ID: PAT_MRT4530_63977C.1.pep
MGEGGGPHHGALARGGGQKGTAASGGSSGLLGEATWTAARRLPTKEEEGPRHGAAWEMKNHHYKVSHSPVPCLHGSSAGTSFNAMQTKMLQLGGQNA

SEQ ID NO: 165143 - protein, 212 aa, Oryza sativa
  unsure (1)..(212): unsure at all Xaa locations
  Clone ID: PAT_MRT4530_63978C.1.pep
WYMYTSKKGLMPLTVQTLAEAFIADERFLSLDFADLHAVYRREKMDMKEQELEEIAGYKKGLHKTKLLTVAQYIRRAFLKFQNKSHNGLYNFNDHYICFLIYPKYETITVLDPLXYNHWSYRKFLTILQYVYNYYKGGEQEIKLLVHTYWPCYKQPKGSVRYYTSESLRVQDQPKLSCMQLPRIEHHTSFDDEGIKNVQRDLCHFIHRRVLS

SEQ ID NO: 165144 - protein, 436 aa, Oryza sativa
  Clone ID: PAT_MRT4530_63979C.1.pep
MAYMSMEEGEGSSRAMVEEEPEIAFFDVETSMPWGPRERRTLLEFGSIFLCPRLVEVAEPFVTLVRPSDLGVVTEALERKGITRGALEDAPPFCDVADNIHNVLHGRIWAGHNIISFDSEIIREAFAEIGRSPPEPKGMIDTLPLLTQTFGRRAGNMKMANLADYFNLGPQIHRSLYDVRMNLDVLKCCSTVLFLEDNFPKLLSGGLRHFPELLSGGFLNPNDISLEFIQVSISFSSCLGKRSLNSGLRTNPLPYEFERSLCIKHNDDPLQLHCIGLRVHYEVSLNQNSEGRPKLSIVVDIPENLRQVLEFCDEIAKTTFREFGSTSEWRQVIKEYGNRPCVRLNIPIIGSGDDATYAIEIYLKEASGNIRKKDFSKADVAELEFMFFRGDMVDAFFSVELYNYKNNAGIRLVAKKLVVHCRLEVASNMIISNRVL

SEQ ID NO: 165145 - protein, 86 aa, Oryza sativa
  Clone ID: PAT_MRT4530_6397C.1.pep
MLKLRLKRCGRKQQAVYRIVAIDVRSRREGRDLRKVGFYDPIKNQTCLNVPAILYFLEKGAQPTRTVSDILRKAEFFKEKKKKRLK

SEQ ID NO: 165146 - protein, 418 aa, Oryza sativa
  Clone ID: PAT_MRT4530_63980C.1.pep
MLSKTMAYMSMEEGEGSSRALVEEEPEIAFFDVETSMPWGPRERRTLLEFGSIFLCPRQLVEVAEPFVTLVRPSDLGVVTEALERKGITRGALEHAPPFCDVANNIHNVLTSAHWAGHNIISFDSEIIREAFSEIGRSPPEPKGMIDTLPLLTQTFGRRAGNMKMANLADYFNLGPHIHRSLYDVRMNLDVLKCCSTVLFLEDNFPELLSGGFLNPNDISLEFIQVSISFSSCLGKRSLTSGLRTNSLPYQFEWSLCIEHNDNPLQLRCIGLRVRYEVYLYQDSEGRPNKLSIVVDIPENLRQVLEFCDEIAEITFRKFGSNSEWRQVIKEYGNRPSVRLNIPIVGSGDDATYATEIYLKEASGNIRKKDFSKADVAELEFMFFRGDMVDAFFSVELYDYKNNAGIRLVAKKLVVHCR

SEQ ID NO: 165147 - protein, 123 aa, Oryza sativa
  Clone ID: PAT_MRT4530_63981C.1.pep
MAPSAVQAMSSSHGAAAAMVAAGQRRRLTRLLLNVTVEQSLWPVHVVIGADCTVADLVRAAVDAYVREGRRPPLPSAGGGGDAAAGFELHFSKYSLESLRPEEKLVDLGSRNFFLCARRTPAA

SEQ ID NO: 165148 - protein, 39 aa, Oryza sativa
  Clone ID: PAT_MRT4530_63982C.1.pep
TMGELDYYRGGPNKTKHLAWPRQATTPTCPSIDHIHLLL

SEQ ID NO: 165149 - protein, 64 aa, Oryza sativa
  Clone ID: PAT_MRT4530_63983C.1.pep
MSLKRIEQSAGRTELPARGKCGGRHWVAGPTKWVPPVGLEMSGRSDRQTLGGSRFQVLLEAMGV

SEQ ID NO: 165150 - protein, 38 aa, Oryza sativa
  Clone ID: PAT_MRT4530_63984C.1.pep
TMKLVKEFTDDVVCVQPTAHGLRLLHMLDLPAMAFGPM

SEQ ID NO: 165151 - protein, 316 aa, Oryza sativa
  Clone ID: PAT_MRT4530_63985C.1.pep
KFKLSYNVLQLILLVEKVYITVQSVSSDGSLVRPKVVKSVHYCPAMEDENGNLLVTEYGMCEYKDHQTLSMQEVPENSAPGQLPRTVDIIVEDDLVDSCKPGDRVSIVGVYKALPGKSKGSVSGVFRTVLIANNVSLMNKEANAPVYTREDLKRMKEISRRNDTFDLLGNSLAPSIYGHLWIKKAVVLLMLGGVEKNLKNGTHLRGDINMMMVGDPSVAKSQLLRAVMNIAPLAISTTGRGSSGVGLTAAVTSDQETGLSDFLWLGERRLEAGAMVLADRGVVCIDEFDKMNDQDRVAIHEVMEQQTVTIAKAGIH

SEQ ID NO: 165152 - protein, 62 aa, Oryza sativa
  unsure (1)..(62): unsure at all Xaa locations
  Clone ID: PAT_MRT4530_63986C.1.pep
SLXDGSVTTMLDFVFTXGRTRAARWRRSASGCRCPAARRWSGRWSAARARSGWREGTRSAGR

SEQ ID NO: 165153 - protein, 495 aa, Oryza sativa
  Clone ID: PAT_MRT4530_63987C.1.pep
MEASASTSTARRLRAFRRWMRDHGVVCSNALRLDAAEDGGGGVYVRALAALREGDLVATIPRGACLTPRTSGAAEAIEAAELGGPLALAVAVMYERARGAESPWDAYLRLIPEREPVPLVWPADEAERLLAGTELDKIVKQDRQFICEDWKECIEPLILSGELEVDPDDFSLENYFSAKSLLSSRSFRIDSYHGSGMVPLADLFNHKTGGEHVHFTSVLEASDSDSEDGEDPNNASADEQSTIENSADIPSGDDDEDLEMIVVRDVNEGEEVFNTYGTMGNAALLHRYGFTEMDNSYDIVNIDLALVTKWCSSKYSRRYARARVSLWHNLGYSGCTSQDADYFEISYDGEPQLELLILLYIISLKSDAYDKLASVAHDLIGDDEVDSISSVLKVVRVTSSNQHPDISGLEKLPDVKKLLLNESVCSALVSLVDMRESLYGSNTLEDDRQKLQACSSVNERNLYHSLVLRVSERTILHKLKKHASSWSKTKKRKQL

SEQ ID NO: 165154 - protein, 360 aa, Oryza sativa
  Clone ID: PAT_MRT4530_63988C.1.pep
MGGEAAQLTPARIDFSGVDPAAPGTGRWAEVRAEVMGALTTHGWFDAHYPQLTPELRAGLFDAAVRPLFALPVDAKRRNYHGPEKPFHGYLGGLPGLDSYESLAIVDGLKPESVRAFADLVLPPAPTTTTASGLGVAEHHEAQGESFWHLFRMSEYRAPNSDEKVTGGSKSGSPHHQLLPLAAVSLSSIVNCSAALPSWSSAAAHPHPPAPDLVACLDGDGSGGRCHRARGWREHVDTNWLSIVCQNEVNGNEMQTRDGEWVLVEPSPTSLIVNVGNALRAWTNDRLHAPFHRIMVSGHATRYTCMLFSSPNFMIQVPNELVDECHPPRFKTHDNDDFIRFCVSEEGARHEDKLKAFCGL

SEQ ID NO: 165155 - protein, 318 aa, Oryza sativa
  Clone ID: PAT_MRT4530_63989C.1.pep
MTRRCSHCSHNGHNSRTCPNRGVKIFGVRLTDGSIRKSASMGNLSLLSSAAGSTSGGASPADGPDAAPTAADGYASDDFVQGSSSATRDRKKGVPWTEEEHRRFLLGLQKLGKGDWRGISRNFVVSRTPTQVASHAQKYFIRQSNMTRRKRRSSLFDMVPDESMDLPPLPGGQEPETQVLNQPALPPPREEEEVDSMESDTSAVAESSSASAIMPDNLQSTYPVIVPAYFSPFLQFSVPFWQNQKDEDGPVQETHEIVKPVPVHSKSPINVDELVGMSKLSIGESNQETVSTSLSLNLVGGQNRQSAFHANPPTRAQA

SEQ ID NO: 165156 - protein, 65 aa, Oryza sativa
  Clone ID: PAT_MRT4530_6398C.1.pep
MAVERAVAADLKMGRVTEVDLEVCHEGLRPTCRNRLNHQTSAKSQMDTKGETKGRSPWAKPDDED

SEQ ID NO: 165157 - protein, 384 aa, Oryza sativa
  Clone ID: PAT_MRT4530_63990C.1.pep
MGGEAAQLTPARIDFSGVDPAAPGTGRWAEVRAEVMGALTTHGWFDAHYPQLTPELRAGLFDAAVRPLFALPVDAKRRNYHGPEKPFHGYLGGLPGLDSYESLAIVDGLKPESVRAFADLVLPRGANDDDGFCEIVNGAAKRIADLEGMVRRMILEGLGVAEHHEAQGESFWHLFRMSEYRAPNSDEKVTGGSKSGSPHHQLLPLAAVSLSSIVNCSAALPSWSSAAAHPHPPAPDLVACLDGDGSGGRCHRARGWREHVDTNWLSIVCQNEVNGNEMQTRDGEWVLVEPSPTSLIVNVGNALRAWTNDRLHAPFHRIMVSGHATRYTCMLFSSPNFMIQVPNELVDECHPPRFKTHDNDDFIRFCVSEEGARHEDKLKAFCGL

SEQ ID NO: 165158 - protein, 65 aa, Oryza sativa
  Clone ID: PAT_MRT4530_63991C.1.pep
VVDLKIVEEITEWELRGGKEDGGTCIWHDEIVHQFVIFFKCIYWDTGRGSGGNICKWMWCFFSVI

SEQ ID NO: 165159 - protein, 84 aa, Oryza sativa
  unsure (1)..(84): unsure at all Xaa locations
  Clone ID: PAT_MRT4530_63992C.1.pep
RPTTRRGVEAIHPSSPSPPFRPDLRPHRPGDVKGGESSNRRCATAXTTATTLXRHRPSEQMRSGKVTGCSTPSRHAAPTGGRGC

SEQ ID NO: 165160 - protein, 74 aa, Oryza sativa
  unsure (1)..(74): unsure at all Xaa locations
  Clone ID: PAT_MRT4530_63993C.1.pep
PNPXQVAXAAARTASRLPSSSSSPEQLTTKEIFVARSISLARTIYLSIELEEKTMRSCTHTVCREIEIYSRDRR

SEQ ID NO: 165161 - protein, 409 aa, Oryza sativa
  Clone ID: PAT_MRT4530_63994C.1.pep
MFDRGAIISFAHLEVHVRPYLDFRPNPLSEPTFGQEEALVGAGLEPCRGEVGVAYLGYGCSQGLKPQAYPWLIQYSLIGNSNKNGGQRLTGHRHSNTALPRKTRAKKKAPDEQRQGICCCSRVPIRKKNHITEIGRRPSAASPASRRPPRAPPPPGERRRIGSTATRRLTARPRSAASRASPPACPAAYRLAGLAGLARPAARRLAGLARPAARRLAGLARLASSAARRLAGLACRLLGCPPPCRCRSASRGDRVKMVSPPVTMATTAPPPLLTVGEAWPDVSSDMLWLRFGVVPCMIIICCLGLVLPDPRFFLAVPWRLPLLISWAVYMSLVSSVQTYTTLFLPLTPAPLHEAIDNVGYAGIGGALGAIYSIVLPWGQPALVEKPFLIDRPKSIIVPVSLKTGTKNNF

SEQ ID NO: 165162 - protein, 53 aa, Oryza sativa
  Clone ID: PAT_MRT4530_63995C.1.pep
EDIDNSLGDCFNALAILLTLPEPDHRRIIDLNLRICSVYELVSKTSDAPPYRA

SEQ ID NO: 165163 - protein, 79 aa, Oryza sativa
  Clone ID: PAT_MRT4530_63996C.1.pep
MGWIGPTGGSAEPWLAPLAHSLLQDADMWAPLYATVNKYHLLLLEAMRQCRIDDLFRRPSACCCHGNMEEAVGSTEADC

SEQ ID NO: 165164 - protein, 682 aa, Oryza sativa
  Clone ID: PAT_MRT4530_63997C.1.pep
MDRWACPRHSPPTIHTYNILIDCYRRVHRPDLGLAIVGRLLKNGLGPDDFSYSLIYGFVKDGEVDKAHCLFLEMMEQGVLPKILICNSIIKELCKMKEMDKAESIVQKMVDSGIAPDLFTYSLIIDGLCKSKAMDKAERVLEQMVEAGTRPNSITYNSLIHGYSISGMWNESVRVFKQMSSCGVIPTVDNCNSFIHALFKHGRTNEAKCIFDSMVLKGPKPDIISYSTMLHGYATATDSCLADVHNIFNLMLTKGIAPNKHVFNILINAYARCGMMDKAMLIFEDMQNKGMIPDTVTFATVISSLCRIGRLDDALHKFNHMVDIGVPPSEAVYGCLIQGCCNHGELVKAKELISEMMNKDIPPPGVKYFSSIINNLCKEGRVAEGKDIMDMMVQTGQRPNVVTFNSLMEGYCLVGNMEEAFALLDAMASIGIEPNCYIYGTLVDGYCKNGRIDDALTVFRDMLHKGVKPTSVLYSIILHGLFQARRTTAAKKMFHEMIESGTTVSIHTYGVVLGGLCRNNCTDEANMLLEKLFAMNVKFDIITFNIVISAMFKVGRRQEAKELFDAISTYGLVPNIQTYSMMITNLIKEESYEEADNLFISVEKSGHASDSRLLNHIVRMLLNKAEVAKASNYLSIIGENNLTLEASTISLLASLFSREGKYREHIKLLPAKYQFFEGAWQD

SEQ ID NO: 165165 - protein, 455 aa, Oryza sativa
  Clone ID: PAT_MRT4530_63998C.1.pep
MANKGGYLSVLAPIETTPTIKQDHITSNADLQDRISQLPDDILLAILDGLNVRDAARTSLLSKRWRPLPTMISHLTIDVSDFDPKSMSSFSDDELGRINATVVKATKSILACRKSNEHTISLLSMRFYLRDDDCISFGHTVGHVMATQKVEMIEFTILTEKDDNQCIDDDFIVYGRRFALFFSYCPNTFGGLTGLQLENLRFGEPEIIDVLNTCKRLNYLRLYNCSSGISTFLEVEHLQLSELSIINCRFGIIKLSSLPKLTRMIFGGWIAFQDPLSFGHVPLLESVTLTNVGLSWHNAVKLSEFLSNISIRDLTLDFNSEKVWDHLCEIETDDERRKAYSYSENKNADWNASASDFKNHSLSTLVMFGFQSNDENLIRYIRLVMDAAVNLEDIFLYKRMACEKCKGKNPRPLRYPSTKKQRQALRNRIALGTHSLATIHFPTVLRANHYAKLLY

SEQ ID NO: 165166 - protein, 178 aa, Oryza sativa
  Clone ID: PAT_MRT4530_63999C.1.pep
MQAGVGSGVRSWWRLEKAGEGAAPGAGKRGRWRPFVLGGAMPYSDGRSSARPLQQGRRPVAAGRVACSRQATTAASRAGGHEARAVSPIRGGRGGARSRREEQRSVAVVLGTPTRRGSSRAHPVRGRGVELVFRPPWTISSRASSPTHSTAFEVQNPLNSPKIHAAWWEIGVIFPSSG

SEQ ID NO: 165167 - protein, 97 aa, Oryza sativa
  Clone ID: PAT_MRT4530_6399C.1.pep
VAVTVSEHVHYFSCCLWIERIVGQLGSFLPDLTRLSDDEWSQHVCLSRHAAVVLPHLAGILSRLTQFCNSLQPTTKFSCRVMDFGLHCKMGTTGYFS

SEQ ID NO: 165168 - protein, 160 aa, Oryza sativa
  Clone ID: PAT_MRT4530_639C.1.pep
GLQESARGCVLGARADGSDHRYKDGDYVPLYANKVGPFHNPSETYRYYDLPFCAPDHPKDKREALGEVLNGDRLVDAPYELNFKEDRNSKVLCQKSLSKVEVAKLRDAVAKDYYFQMYYDDLPLWGFLGKLDKDKEQGNAKYLLFKHIHFDIMYNGDRVI

SEQ ID NO: 165169 - protein, 131 aa, Oryza sativa
  Clone ID: PAT_MRT4530_63C.1.pep
MGELPETDLDFGRLVDEEEEHDEDGVAVGVAVHHAAPAADCHGLWRFLEMWYTGGLADTCEYKEVAEAKLTYKQNLCYKEIAWHDLGVFMLMYDANNGSIYSRHGHINLCKCPIFVVIVIAVVRLTISTSV

SEQ ID NO: 165170 - protein, 194 aa, Oryza sativa
  unsure (1)..(194): unsure at all Xaa locations
  Clone ID: PAT_MRT4530_64000C.1.pep
WARLAKPCTHSPPWLTSAREGRRRHAGPTGQRHRREGEGAAGRRDPPGSVTRGGEAARRPACGTRGSVTHGERGAAGKRAPPSGGSWGGGDARSARLGLKPADRLWRGRWRARTVAGDGNRRRGKRRRMTAARRRRHTAEAAARPGTALGGRERGKEGEGRLTASWPVWGEXTANGDGERPGNGDDRRTSSETS

SEQ ID NO: 165171 - protein, 139 aa, Oryza sativa
  Clone ID: PAT_MRT4530_64001C.1.pep
MSQRLKREREGRRHVGPTGSGTRREGRGSRGKEEGGLAQLGFKPAGRLWRGRRRARTVAGDGNRRRGKRRRMTAAHRRRHTAEAAARPGTALGGRGRGKEGEGRLTASWPAWGGGKTTANGDGERPGNGDDRRTSSETS

SEQ ID NO: 165172 - protein, 116 aa, Oryza sativa
  Clone ID: PAT_MRT4530_64002C.1.pep
MEAQANVAAMREQRQAWRRPLVSIGRCRWASLPCSSAPHTGAVPEPGKGHQLPQGDAYGPRPLTPTKSPAALKPHHRRVLPDQLVPFAEINAAALAHRLQRRAHLLARASRLLLLT

SEQ ID NO: 165173 - protein, 91 aa, Oryza sativa
  unsure (1)..(91): unsure at all Xaa locations
  Clone ID: PAT_MRT4530_64003C.1.pep
RRHLAPLRRRRGRGAVVVNDCCCCCHRWRQSKVHHRSLNLYRCVITVPKLANRPFRSSSLFDCIIPVPKLVDYXFSSSNLFSCVTPVPKQD

SEQ ID NO: 165174 - protein, 43 aa, Oryza sativa
  Clone ID: PAT_MRT4530_64004C.1.pep
MARAQLVLVGLVAAALLLAGPHTTMAAISCGQVNSAVSPCLSY

SEQ ID NO: 165175 - protein, 107 aa, Oryza sativa
  unsure (1)..(107): unsure at all Xaa locations
  Clone ID: PAT_MRT4530_64005C.1.pep
SXSKIXLXKELQQTGTXLGILXXKSYASTPMXKIDQAGTCFTAKTPVXCSSXAGAXWXGXXLVINRVXERPNXRQCXLGAPXTKNPNSXLRXPRIGPLSPFXSXSXF

SEQ ID NO: 165176 - protein, 75 aa, Oryza sativa
  Clone ID: PAT_MRT4530_64006C.1.pep
MSITTCAKEGIKSREEEETTTAAATAKGSKRDNVKPVKGLFGYRGYANKRGCNSHNNNRSLPSRLKIGLFRIHDI

SEQ ID NO: 165177 - protein, 56 aa, Oryza sativa
  Clone ID: PAT_MRT4530_64007C.1.pep
CQVSSLNSMKMHGNRSKIGLEQKCLHQTSSLKKADNLANLTFPPMILFTYIHVELS

SEQ ID NO: 165178 - protein, 345 aa, Oryza sativa
  Clone ID: PAT_MRT4530_64008C.1.pep
MDAARASLLLAGGLAVSTSTSAVATAAQTVSIPHLSPHTRRRRQRRFLRLASAAASSPPPLPAASAQPHCSRWVVVMERPPAPAGGGEVSRAEAVDHYVATLARVLGRLKGSCSQEEAQMRIYDASWDGSYEFSCEIDDEASRDLAKMPGVLAVKPDTDKVDMSEKDNHGSGLSAANLGNFSDAVSNHSSSSGENEFWLVRMEKPGVEVVTKAQMVDHYTQTLMKVLGNEKDAQVSIYHISWERDYGFCCHIDEECAKELAGDDSFKSSEATQAEVKTKRLFVTGLSFYTSEKTLRAAFEPFGELVEVKIIMDKISKRSKGYAFIEYTTEEAGGAALKAMNGQVT

SEQ ID NO: 165179 - protein, 100 aa, Oryza sativa
  Clone ID: PAT_MRT4530_64009C.1.pep
MDVAADKTIQINTRDAQVLPRPHGVVVVKREYDLVRHSATATIEFTFEFRKISLCIPMAPIDLARCHCHLLHALKGRRRAVPLKMTDKSTKRFGFTRNLT

SEQ ID NO: 165180 - protein, 261 aa, Oryza sativa
  Clone ID: PAT_MRT4530_6400C.1.pep
MTSTVPAAATATASRLILVHGAGHGGWCWYRVATMLRAAGHRVHAPDLAASGADARRLRDAPTFADYSRPLLDAVRALPGGERAVLVGHSLGGMSVALAAEELPERVAAAVFVAAFMPDCASPRPSVIDKLPWLDWMDSVRDEEHAPPSVKLGPELMRRKFYQLSPEEDFTLAQSLVRMGSSYVDDMRRRPPFSEARYGAARKVYVVCGEDLAIVEAYQRRMIADCPVEEVREIAGADHMAMFSAPAALAGHLADVANTYA

SEQ ID NO: 165181 - protein, 45 aa, Oryza sativa
  Clone ID: PAT_MRT4530_64010C.1.pep
DWIFSSSYGGALIDKYASLIVWSTVQRPPERRELHERRQHLRVVR

SEQ ID NO: 165182 - protein, 396 aa, Oryza sativa
  Clone ID: PAT_MRT4530_64011C.1.pep
MAALDTFLFTSESVNEGHPDKLCDQVSDAVLDACLAEDPDSKVACETCTKTNMVMVFGEITTKANVDYEKIVRETCRNIGFVSADVGLDADHCKVLVNIEQQSPDIAQGVHGHFTKRPEEIGAGDQGHMFGYATDETPELMPLSHVLATKLGARLTEVRKNGTCAWLRPDGKTQVTVEYRNESGARVPVRVHTVLISTQHDETVTNDEIAADLKEHVIKPVIPEQYLDEKTIFHLNPSGRFVIGGPHGDAGLTGRKIIIDTYGGWGAHGGGAFSGKDPTKVDRSGAYVARQAAKSIVASGLARRCIVQVSYAIGVPEPLSVFVDTYGTGRIPDKEILKIVKENFDFRPGMIIINLDLKKGGNGRYLKTAAYGHFGRDDPDFTWEVVKPLKWEKPSA

SEQ ID NO: 165183 - protein, 458 aa, Oryza sativa
  Clone ID: PAT_MRT4530_64012C.1.pep
MAVPDEVAADADAEVEEEEPEEVEWLSSSSDSEPEHPALKQWTPSSPDSEEAEAEQQPSAPQPASSVSAGKEDEGEVGLEEGEVGKPFRWPGWPGASVFRLVVATDKVGGLIGRRGDTIKRLCEDTRARVRVLEAAAAAAANRIVDSDSNDFIAKVTFEMVLISATEESQAELPPAMDAAIKIFMHINDIEKINCDDTLSGSAPEKCSAKLLVPSAQATHLIGKQGVRIKSIQETTGATVKIIDKVELLSYDVVDERIVDIHGAPLKVLHALKSVLGVLRKFLVDHGVLHLFERKNQAVGEAHDNSKENQVNQVASDYRLPVNKDILLPDHRTPLNPKITQTMQIPLPFAEEIIGARGQNISYIRSVSGAVVDLEESRDYPNEVLVMIKGSSSQEVLSGNKERPSGSSYINLDSGPKFLISGHINPVNRDHLASYRVHQPYIVRYGSSSLPRLRGYRL

SEQ ID NO: 165184 - protein, 90 aa, Oryza sativa
  unsure (1)..(90): unsure at all Xaa locations
  Clone ID: PAT_MRT4530_64013C.1.pep
NLPNLVVNSAAAGAGVAGVVGAAAGADIFLEETSGVVGXGDFRLAEAVASPPPVDRDLPVRTRRDGRRLXPDPASPPKAPLAKKGVFMHR

SEQ ID NO: 165185 - protein, 506 aa, Oryza sativa
  Clone ID: PAT_MRT4530_64014C.1.pep
MSSSSLAAAAAAAFLLAVAMSCHCHVARGWGGLGVNYGTVADDLPTAARSVELLRAAGAGAVRIYDANADILRALAGTGVPVSVTVPNDAIPSLAAAASPAAVDEWVARNLAPHIPAARVLCLLVGNEVLSDRATAGTAWPSLVPAMANLRRALSARGLGRVKVGTTLAMDALGTSYPPSAGAFRDDIAGAVVRPLLEFLNATGSYYFVDAYPYFAWAANHRSISLDYALFQGEASTHYVDPGTGLTYTNLFDQMLDAVVAAMARLGYGNVKLAVSETGWPTAGDADELGANVHNAATYNRNLAARMAKNPGTPARPGAEIPVFLFSLYNENRKPGPGTERHWGLYYPNATWVYEVDLAGRRPAASYPPLAPTPPAPDQDGTPVWCVLAGGGGEAANETAVAAAVEYACRQRSGTCAAIEAGGECNQPDTLAAHASYAFNAYWQLFRKAGGTCYFNGLAEKTTIDPTFALRSKHAKPFVNLQCDRAVPSLVEFRVSALNCAQKQNV

SEQ ID NO: 165186 - protein, 66 aa, Oryza sativa
  Clone ID: PAT_MRT4530_64015C.1.pep
SLHHWYTSLSLSLFAILLGSARSAVQSCSVHSLCERGSLQCVHDYTVKCSLCFLGKKYVPITCSLY

SEQ ID NO: 165187 - protein, 55 aa, Oryza sativa
  Clone ID: PAT_MRT4530_64016C.1.pep
METLEVIYLLCSHSGSPEIIPTSLCPIHLHPSSMTLNHCWWCIVANSLCQREVEE

SEQ ID NO: 165188 - protein, 107 aa, Oryza sativa
  unsure (1)..(107): unsure at all Xaa locations
  Clone ID: PAT_MRT4530_64017C.1.pep
MTLFTTIVDCTCIENEAVDTLMLVGKRVAETKLLAVSAALGXTLEILPRXGTTVILCGDAIAMLGSSCNAXTVKEQNCEVTPLELSLIVPYLAISEKISQVSEHFPL

SEQ ID NO: 165189 - protein, 78 aa, Oryza sativa
  Clone ID: PAT_MRT4530_64018C.1.pep
IQNPRFIRGGILRPQTGETPKGKKRERAQPKQPCASYAHARALEYPGREPTHARAPEGKRVEKDRSSSTGGCTGNRTS

SEQ ID NO: 165190 - protein, 68 aa, Oryza sativa
  Clone ID: PAT_MRT4530_64019C.1.pep
DVEQEYSLAANLLCETNVPEMEIDDGEILGVIDTANYKTILVLQVLSVQVEHVEELQHHNSSSSRIVG

SEQ ID NO: 165191 - protein, 85 aa, Oryza sativa
  Clone ID: PAT_MRT4530_6401C.1.pep
SFVRVICVLIFQLLDSCFSGSGEELLFFILRLFWKKKFPAHPPSVIEQTRGDQQGVIFLSGGVNKQRGYAQKIFFGGPNLREKLE

SEQ ID NO: 165192 - protein, 60 aa, Oryza sativa
  Clone ID: PAT_MRT4530_64020C.1.pep
TRQLPQLLPCRGKRERRPSDRNCRRAFHGIPWAVLCCTDRLRALPPQVSEFLSPEQLVPG

SEQ ID NO: 165193 - protein, 726 aa, Oryza sativa
  Clone ID: PAT_MRT4530_64021C.1.pep
MASLKSPVAAEEQAATAAAAAAKGEGERCPVEEVALVVPETDDPTTPVMTFRAWTLGLASCVVLIFLNTFFTYRTQPLTISGILAQILVLPAGQFMAAVLPSREVRLLGGRLGSFNLNPGPFNIKEHVIITIFANCGVSYGGGDAYSIGAITVMKAYYKQSLSFLCALLIVLTTQILGYGWAGMLRRYLVDPADMWWPSNLAQVSLFRALHEKEGGDGGKGSSSRGPTRMRFFLIFFFASFAYYALPGYLLPILTFFSWACWAWPHSITAQQVGSGYHGLGVGAFTLDWAGISAYHGSPLVAPWSSIANTAAGFVMFIYLIVPLCYWKFDTFDARKFPIFSNQLFTASGQKYDTTKVLTREFDLNVAAYESYGKLYLSPLFAISIGSGFLRFTATIVHVALFHGGDIWRQSRSAMSSAAAKMDVHAKLMRRYKQVPQWWFLVLLVGSVAVSLVMSFVYREEQPGYDIIAQFMIGYALPGKPIANLLFKIYGRISTVHALSFLADLKLGHYMKIPPRCMYTAQLVGTVVAGVVNLAVAWWMLGSIDNICDVEALHPDSPWTCPKYRVTFDASVIWGLIGPARLFGRHGLYRNLVWLFLAGAVLPVPVWLLSRAFPEKKWIALINVPVISYGFAGMPPATPTNIASWLVTGTIFNYFVFKYRKGWWQKYNYVLSAALDAGTAFMGVLIFFALQNAHHELKWWGTAVDHCPLASCPTAPGIAVKGCPVF

SEQ ID NO: 165194 - protein, 447 aa, Oryza sativa
  Clone ID: PAT_MRT4530_64022C.1.pep
MAASSLDAEAAAAGQQDKAGSGSYTTAATAHQIDTDSWQQVGVLLVVGFNCAYVLSFSNLMMAPLGWGWGIACLLFIGAASWYGNWLLAGLHVIDGQRFIRYRDLMGFVFGRKMYYITWFLQFITLILGNMGFILLGGRALKAIHAEFSSSHSPARLQWFIAATGFVYFAFAYFVPTISAMRNWLATSAALTVAYDVALIVILIKDGKSNKQKDYNVHGTQAEKVFGAFGAIAAILVCNTSGLLPEIQSTLRKPVVSNMRRALLLQYTAGAAVYYGISVAGYWAYGAAVSEYLPDQLSGPSWATVLINATAFLQSIVSQHLFTVPIHEALDTQMQRLDEGMFSRYNLGRRLLARGLVFGANAFVTALFPFMGDFVNLFGSFVLFPLTFMFPSMVVLKIKGKDEAGRWNRIWHWGIIVASSVLSVVTTAAAVRLIVHNASVYHFFADM

SEQ ID NO: 165195 - protein, 109 aa, Oryza sativa
  Clone ID: PAT_MRT4530_64023C.1.pep
MVYKKDYVCAWSDRQCSGGLTGEGLAVRLEACERFDRRPQDYVKTSINLKLGVKNARFCGSGGNSVDRDSSGGEVVDDVPVDSETPVVTSSILFAGPVFEEAQRGRVCV

SEQ ID NO: 165196 - protein, 70 aa, Oryza sativa
  Clone ID: PAT_MRT4530_64024C.1.pep
RKTAAFEKMIKRFDMTEDKLSLYKGLVEDKTRKAGMIGMANVTGAFGLVGLVAGGIIAAASSSSSSSRKK

SEQ ID NO: 165197 - protein, 73 aa, Oryza sativa
  Clone ID: PAT_MRT4530_64025C.1.pep
HLHFSHIVTHFSLRGDLPFFPNFKKPFKPINFFYLGPIKRSIQILYKNLGETIRLKKWVFLYFGKFLKNYCSK

SEQ ID NO: 165198 - protein, 137 aa, Oryza sativa
  unsure (1)..(137): unsure at all Xaa locations
  Clone ID: PAT_MRT4530_64026C.1.pep
GRGVPDVAGRSGIPPANVGSGGGERGGIXNPAHLGRGRERERGGSGCGGRGACAGVADVTRERRRRGRGGGCGRGCAGWRKGTGLTGGASRGEREGRLGPAHKEEGARGGRVDWADGPRRGKGGKRKRKGGKDFPWD

SEQ ID NO: 165199 - protein, 151 aa, Oryza sativa
  Clone ID: PAT_MRT4530_64027C.1.pep
MAGAATSTTPSPAAVPSFVLAASPAVVALAVAAGVGLATREVIATTLTIGEDLACAATTPTATIPTRRERGAGAGACNQHRRCEARDAQLLQQEGIACRCEARENGHAYDVISGVGEVIVEASEKVEHKLGVGDGVVDVAKGVGSGLHLLQ

SEQ ID NO: 165200 - protein, 242 aa, Oryza sativa
  unsure (1)..(242): unsure at all Xaa locations
  Clone ID: PAT_MRT4530_64028C.1.pep
MAEERELAQSQWALSDVKESTLLEMVEHCVLPSKEIIGWHLAFGEAFPTPDTDEIMPNKRNPCLVGGSGLQLRGSLSKKYFSLPFKSSNKGWHSIWFYIHNPSPSLPEYSCTPPVYNEIWSSLPMGDELSQAXTLLEKMLKIKEQGLQREQVTWHFIKCXLALIKERSKPAFEYKGQTXPNHEDPDSLDFKITKARMYTIFSTGIEVDYSQGLPVTPFNIFNLPPKENALYSSKPFSSLPND

SEQ ID NO: 165201 - protein, 134 aa, Oryza sativa
  Clone ID: PAT_MRT4530_64029C.1.pep
TFRVKGFAPGKFLNSNPNGYFLKIKLTPQTVLLIMQINLIAKGPLFILFWGRPNLNRPCWNNCLFWALNKLFLTPGNFFLTKGLFFGPFTPKRGREGFFFFLFNLKLGDTFQKKPLFFEQCPLDLHAHVKKQGA

SEQ ID NO: 165202 - protein, 33 aa, Oryza sativa
  Clone ID: PAT_MRT4530_6402C.1.pep
CLQYHSYSIHLELGKSTQRHESVGGAVAISPSC

SEQ ID NO: 165203 - protein, 153 aa, Oryza sativa
  unsure (1)..(153): unsure at all Xaa locations
  Clone ID: PAT_MRT4530_64030C.1.pep
EVRMQKSIFCMWLFKLQIEFYVTVMGTNKAYLLSNDLRNIRVRYTFAHTICFRMRXGNLLDIVENILTGKEISRVLLGVLLGEQGDPRYKRDTXEGFRSSNLTANTPTIVYKARAREVXNPCLLVCLMSYHXILIPTYPNILFIRSTGITHQQ

SEQ ID NO: 165204 - protein, 166 aa, Oryza sativa
  Clone ID: PAT_MRT4530_64031C.1.pep
MILRMGDRRRWLPLRARRAARPSTTTIGAAAIGNRFDFPPPFFTQNLLVLPKIPKSSGLREAAPTGCGGLREAEGDEQFVLNGFTAANLSFDDMATVTPNGLLMLTNGTNQLKGHAFFPVPLQFHRAPNSTAMQSFSTAFVIGIIGAFEDQGSGNLAAAGGSSRAA

SEQ ID NO: 165205 - protein, 59 aa, Oryza sativa
  Clone ID: PAT_MRT4530_64032C.1.pep
LGVDRDLPEHRRGPSASFAVPIGIPSATPLFLRLHRPPCAVARWRKSRQGQIYPFFSTL

SEQ ID NO: 165206 - protein, 360 aa, Oryza sativa
  Clone ID: PAT_MRT4530_64033C.1.pep
MATTRASLTDPLLPSPAARAPVKAKKLSWSMLHASSKDERRGQSGEAEAEASGGVHANPSSPARMQEQATSSRPSSSERSSSSGGHHMEIKEGKEAPLRSLLLPFLDFHFTVPLSGMESDEEIGRVPELGLEPGGASTSGRAAGGGGGGAERAQSSTAQASARRRGRSPADKEHKRLKRLLRNRVSAQQARERKKAYLNDLEVKVKDLEKKNSELEERFSTLQNENQMLRQILKNTTVSRRGPVLLKIPKSGLREAAPAGCGGLREAEGDEKFVLNGFTAANLSFDGMATVTPNGLLMLTNGTNQLKGHAFFPALLQFHRTPNSMAMQSFSTAFVIGIISAFEDQGSGSPAAAGGSGRAA

SEQ ID NO: 165207 - protein, 301 aa, Oryza sativa
  Clone ID: PAT_MRT4530_64034C.1.pep
MAGGRPLESVLVAPGVKGKKVLAFKRDGLKKNEAVTGLIHDIVASSSARSAFHVLDLAKVVDLYAGWRRALPGVRPFYAVKCNPDTALLGALAALGAGFDCASRAEIEAVLALGVPPAAIVYANPCKPGAHVAFAAEAGVNVTTYDSEEEVAKVKRCHPSCELLLRIKAPDCGGVQPGRYFAETAFTLAARVIGKRRRGDVREYWIDDGVYGSLNCILLDSYVPRPRPLAGARPGEETHASTVFGPTCDSIDTVVTGYQLPEMSVDDWLVFDDMGAYTTAAGSSFNGFATSAINTYLAYSS

SEQ ID NO: 165208 - protein, 36 aa, Oryza sativa
  Clone ID: PAT_MRT4530_64035C.1.pep
ARQGLFCRVPDRSAKASRGHGLIRDLGLKEPQMEQP

SEQ ID NO: 165209 - protein, 70 aa, Oryza sativa
  Clone ID: PAT_MRT4530_64036C.1.pep
IQPSESKKALNLDWHIFLSFFPCFIPYMFYKFLCIKSKYLWINSFGVTNFFLLRFCRGKKKKKTQKIKKQ

SEQ ID NO: 165210 - protein, 692 aa, Oryza sativa
  unsure (1)..(692): unsure at all Xaa locations
  Clone ID: PAT_MRT4530_64037C.1.pep
MKTNSRKRKNFIHSLETPSGTAITCDQKKAELQPFFNQRLGGDQNIDRLQDLNSANICLIPKKGDATRVGEYRPISLMHSFAKILAKILANRLXPPKLNLLISQNQSAFIRKRVIHDNFLYVQNMVKLLHRQKKSSLFIKVDISKAFDSVNWAYLLETLQNFGFGQKWRNWVANLLGTSSSRILLNGAPGDHIYHARGLRQGDPLSPMLFILAMEPLQQIMKEAEEANILSNLFQRQRRFQCSLYADDVAIFAKPXKNELSALRRILFFFADASGLHTNMCKIEIYPINCAEDALDVILPSFPGNRKTFPCKYLGIPLHTRKLRKVDLQPLVDKVASXIPGWKGRFFTSAGREVLVKSTLSAAPIYHLTVLHQNKWLXKRIDRLRXSFLWKAEDPDNVSWKDDTKPWANMETPCDNIDRELFRASTIITIGNGEKTKFWTDHWLEGKSLKELVPLIFSLAKRKSNTLKKELDNNHWMMGLRPITSMGEIDELVRLGSILNDISLNSNTADDISWKWTGNGQYTAKSAYLAQFQGGTTSSNFLPLWTTNAEPKQRFFGWLILHQKALTADNFLKRHWPCHWICCLCRSAFEDANHLAKECPFFVWVWNKICHWQGHNAFSLHNSYSTLTDWWVELCKIKPLATRKRILGDLLITWWNIWLERNQRIFCQSVQSESQVASLIKENINQINLSKG

SEQ ID NO: 165211 - protein, 119 aa, Oryza sativa
  unsure (1)..(119): unsure at all Xaa locations
  Clone ID: PAT_MRT4530_64038C.1.pep
FFFFFKERKXSXKPXTIAIHTATSEHIEIIQXQLQTIISHIHTHTGARMHHTVPVTYKPWHXTHTGASTSRSMIQYQYQANIGRQTVNKESSRYYYRPRSRSRWYGALVSGSQRPTSMK

SEQ ID NO: 165212 - protein, 125 aa, Oryza sativa
  Clone ID: PAT_MRT4530_64039C.1.pep
MSSFKSPAIPLAALVITVLHIAATHAQIPAATTTGAAVSATNPQNGGGGVSGGVGATAGGAHEPLELYMHDILGGSSPTARPITGLLGNIYNGQVPFARPIGFATPKNGVPIRNSNGAIPTYNGN

SEQ ID NO: 165213 - protein, 164 aa, Oryza sativa
  Clone ID: PAT_MRT4530_6403C.1.pep
MARRGRVQLRRIEDKASRQVRFSKRRAGLFKKAFELALLCDVEVALLVFSPVGKLYEYSSSSIEGTYDRYQQFAGARRDLNEGSTSINSDENASIHSRLRDITAWSLQNNADESDANQLEKLEKLLTNALRDTKSKKMLAKQNGEGSRSRANSSGSRGQEEGSA

SEQ ID NO: 165214 - protein, 413 aa, Oryza sativa
  Clone ID: PAT_MRT4530_64040C.1.pep
MGAIGEWRRGPVIGRGATATVSIATDRRTGGVFAVKSVDVARAGALRREQGMLSALASPFVVPCVGSGVSAAVDGSGGACYDLFLEYAPGGSLADEIKRCGGRCEEPLIRSRVGDVLRGLAYVHAAGIAHCDVKGRNVLVGADGRAMLADFGCARWMAAEDCNAGGVTIRGTPMFLAPEAARGEAQGTAADIWALGCTVIEMATGGAPWPRFADPVAALHHVAHSVDVPESPAWFSAEGKDFLARCLIRDPAKRWTAEQLLEHPFVASAASDSTSKAVQIEQRVSPKSILDQCLWESTSTDSDATVALAPADRLRALSAGASVAPDWTWSMDDWIAVCGGRADDHDTTPSPQPDTTTSFFRGDEASSDLVFPGGGETERGAVAVAATVPLMAKSSEITGVERSIESRVASGSG

SEQ ID NO: 165215 - protein, 127 aa, Oryza sativa
  Clone ID: PAT_MRT4530_64042C.1.pep
LSFRRFPKRGSRSSPKDRKANEGYTSCGPVVEMSYGRGRALGYGQAEQCTQVSEEEDIVSCLSKFQKAAGSASKVKEAVKILENPSQNLSHPLGEKGKNVSGADIAKPASSHQVKLACLQVDSRGSP

SEQ ID NO: 165216 - protein, 138 aa, Oryza sativa
  Clone ID: PAT_MRT4530_64043C.1.pep
NTPSIRFPRGHALASQTHQLQHSKGGASPCKLIHLMCSPNHFVRIPYLQTPIAPVVFVALHPFGQHLCTLWAVPRRFQPTFPIIRPRGTWHSSRIPIQPNSHTHTLNPAHSCSFAAQAAPIRHSTFQNPSFCNFNVDS

SEQ ID NO: 165217 - protein, 142 aa, Oryza sativa
  unsure (1)..(142): unsure at all Xaa locations
  Clone ID: PAT_MRT4530_64044C.1.pep
SYPYAIDQVHMKSVKHVVKMWATKEHNRKTHNXNPKPAWESGYFVLVHPMQPCSQSFLHAGRTAWVLSXNTETRAAMWPGLGRRQHQASERITXLTRQDNSHRESXGHPRPRTRITRVHXFSMSCVLVRVQLRRXPEAPRRG

SEQ ID NO: 165218 - protein, 52 aa, Oryza sativa
  Clone ID: PAT_MRT4530_64045C.1.pep
MPKPGINGDHQGSAEPRLGPPGLAFDVGGIESTFNSRQEKPPHLALCSSLSK

SEQ ID NO: 165219 - protein, 70 aa, Oryza sativa
  Clone ID: PAT_MRT4530_64046C.1.pep
AGLIANVNSQDQLILAHNCQMQEVLKDVQKQNGYSSVRDSGIRRTTTFDMLRKQNFVRTMFNCNSITLSP

SEQ ID NO: 165220 - protein, 460 aa, Oryza sativa
  Clone ID: PAT_MRT4530_64047C.1.pep
MKVQTSSPCLLLLLGSLALVTLTLCGPAASARPETGSLDASATAAMELQELDRVMSLPGQPAYSPEFRQYSGYVTTDEYLGKALFYWFLEATDKPDEKPLVLWLNGGPGCSSIGFGQAQELGPFLVKKDVAELELNPYAWNQVANLLFLDSPAGVGFSYTNTSFGKDPPGDNSTAYGSYTFLIRWFQRFPQHKMKEFYIAGESYAGHYVPQLANVIVDQNKIAPKENYINLKGIMIGNAYMDGDTDLLGIVDSAWHHALISDKLYSDFQKFCNFSLVDLSKECNAAIDQFNALYSIIDIYSLYTPRCELGYPNFNSSFAAQIGRTSSRFDFLKIPMGYDPCSQTNSINRAWNDSDMTVLPIVKKLTQSGLRIWIYSGDTDARIPTTSTRYTLKKLGLPIKEDWSPWFHHKQVGGWSVVFDGLTFVTVRGAGHMVPSIMPEQALELFKYFLANQNLPSKPF

SEQ ID NO: 165221 - protein, 102 aa, Oryza sativa
  unsure (1)..(102): unsure at all Xaa locations
  Clone ID: PAT_MRT4530_64048C.1.pep
AVPCETGTVGRGPVPTIGARGRGGRKKSPSPRAARGPPAKFHAPSPPICRRPPAQXKIALAEGGKGAACKFRXRPSPESERPSATFKIALPEGGRRLFPLIF

SEQ ID NO: 165222 - protein, 136 aa, Oryza sativa
  unsure (1)..(136): unsure at all Xaa locations
  Clone ID: PAT_MRT4530_64049C.1.pep
HSYRRPCGPPGTPAXAWAEACRAGTARPTHRAVPWQPTCRTHGPGMAQHDSAVPGQHEGTMAYFPILCMSGLACWPIVSGRPNXPGQPSMPVGRPRHGPEVGPXHGPDPSRAXLRASGLMAIYKHSIDDRSTRANR

SEQ ID NO: 165223 - protein, 74 aa, Oryza sativa
  Clone ID: PAT_MRT4530_6404C.1.pep
LYKLAMDYQLLSSFNASIWPSLLWTWQREGPDCFFCFFLGPSLHISGLKCNLAICQGSPCKTCCTLNLLNKFLI

SEQ ID NO: 165224 - protein, 88 aa, Oryza sativa
  unsure (1)..(88): unsure at all Xaa locations
  Clone ID: PAT_MRT4530_64050C.1.pep
PPRRLWINGCCNNNNKYNAAENRKNNFRRRRDTTSNGNHYLTMRPNVPHVDEREDXMDSSQEMATPRTATFXAHEEEKKAATLDDPEE

SEQ ID NO: 165225 - protein, 728 aa, Oryza sativa
  Clone ID: PAT_MRT4530_64051C.1.pep
MLVCICILVLSRIVNYCQVQSAPPTFLLNHLLTAYAKSGRLARARRVFDEMPDPNLFTRNALLSALAHSRLVPDMERLFASMPERDAVSYNALITGFSSTGSPARSVQLYRALLREESVRPTRITLSAMIMVASALSDRALGHSVHCQVLRLGFGAYAFVGSPLVDMYAKMGLIRDARRVFQEMEAKTVVMYNTLITGLLRCKMIEDAKGLFQLMVDRDSITWTTMVTGLTQNGLQLEALDVFRRMRAEGVGIDQYTFGSILTACGALAALEEGKQIHAYITRTWYEDNVFVGSALVDMYSKCRSIRLAEAVFRRMTCRNIISWTAMIVGYGQNACSEEAVRAFSEMQMDGIKPDDFTLGSVISSCANLASLEEGAQFHCLALVSGLMRYITVSNALVTLYGKCGSIEDAHRLFDEMSFHDQVSWTALVTGYAQFGKAKETIDLFEKMLANGLKPDGVTFIGVLSACSRAGLVEKGCDYFDSMQKDHGIVPIDDHYTCMIDLYSRSGRFKEAEEFIKQMPHSPDAFGWATLLSSCRLRGNMEIGKWAAENLLETDPQNPASYVLLCSMHAAKGQWTEVAHLRRGMRDRQVKKEPGCSWIKYKNKVHIFSADDQSHPFSSRIYEKLEWLNSKMAEEGYKPDVSSVLHDVADADKVHMISHHSEKLAIAFGLIFVPQEMPIRIVKNLRVCVDCHNATKFISKITGRDILVRDAVRFHKFSDGTCSCGDFW

SEQ ID NO: 165226 - protein, 231 aa, Oryza sativa
  unsure (1)..(231): unsure at all Xaa locations
  Clone ID: PAT_MRT4530_64052C.1.pep
MPYRHYGEGRGLANPLRPQPLTPCLIGTMAKGVAFGEPCSPAALDVVPYWHYGEGRGLANPLRPQPLTPCLIGTMAKGVAFGEPCSPVALDAVPYWHYGEGRGLVNPLRPQPLTPCLIGTMAKGVXLANPVRPQPLTPCLIGTMAKGVAYGERCLEAGVASXPPSLDLTHFCPKPLSPYLTGTVVKGVGVAKGXSHFALSVXVPHGRRQLLSNGQLCHVERRGSLNSSWNV

SEQ ID NO: 165227 - protein, 142 aa, Oryza sativa
  unsure (1)..(142): unsure at all Xaa locations
  Clone ID: PAT_MRT4530_64053C.1.pep
LSEEAFSPAGGLRPACGAPAVPIEPLPPAVACLRAAGSLGXRXSAALFRQPDGSHLWAHXAAACHPRQVLXPAKRYXAXVSGGLKLXSCRFAWHCHLACTWLIKYGIYIYASIDACEMXLPLCMVWLVHAKCMAXYRGNMYI

SEQ ID NO: 165228 - protein, 50 aa, Oryza sativa
  Clone ID: PAT_MRT4530_64054C.1.pep
DPEPTILIMYTAFKRQLSITIDCLNKIIYKKNIGCTVTQTHITWMQASSN

SEQ ID NO: 165229 - protein, 222 aa, Oryza sativa
  Clone ID: PAT_MRT4530_64055C.1.pep
MGRNVLGRRRPAFISVPWRWVMVDVVAPRDAGSHVEMMRTTLAIADDDLYILGFANRTGHWHVMKDFGGLPEPLTKLTIEHSYGDLVGSFQNLHTVPLGRESAVQAVRTLANYNSAMAEAQLKLPIAKFAIMISEALRFPFIRNTFSTNWESETFMKPDHVKYVVYWGRLSKALVWWKQSGNNWWPRPDSDLGEDFEYINVKTSQDAVKLVDLLIRPASRYS

SEQ ID NO: 165230 - protein, 117 aa, Oryza sativa
  unsure (1)..(117): unsure at all Xaa locations
  Clone ID: PAT_MRT4530_64056C.1.pep
QSHVLLQPQVLTPYNXFVSSKYGIPASPFLLSAEFQLSSIQVXQQLALVAQLSHNQHINIVQAIAQQLHLQQFGDLYFDRNLAQAQAPLAFNAPSRYGIYPRYYGAPSTVTTPGGVL

SEQ ID NO: 165231 - protein, 57 aa, Oryza sativa
  Clone ID: PAT_MRT4530_64057C.1.pep
SPCRSFELTRSLVASWLQQAMLPSAIFTVSLPSRICVRVHMRRRLIVGANEVRRELG

SEQ ID NO: 165232 - protein, 888 aa, Oryza sativa
  Clone ID: PAT_MRT4530_64058C.1.pep
RDLPQDTEATLSTVQGFFDRLTGRNKEAWKEGRIRGTAVLVKKDVLGLGDFHASLLDGVHNILGHKEGVAFRLVSATARDPSNGGRGKLGKPAHLEELVVTMKSTAAGESVFRVAFEWDESQGIPGAVVVTNSNRSEFFLKTLTLDGVPGKGTVVFVANSWIYPADNYQYERVFFANDTYLPSKMPAPLIPYRQEELNILRGDGKIGPYKEHDRIYRYDYYNDLGQPDKGSKLVRPVLGGSQELPYPRRGRTGRAPTKTDPNTESRLPLLDLNIYVPRDERFGHLKMSDFLGYSLKAIVEGVLPIIRTYVDTTPKEFDSFQDIMELYEGGLKVANASALAEIKKRVPFELIKSLLPVAGDQVLKLPLPHVIKEDKFAWRTDEEFAREMLAGVNPVMIKRLTNFPAKSTLDPNVYGDHTSKITEAHIKHNMEGLTVQNALKGNRLFILDHHDHFMPFLDKINKLDGNFIYASRTILLLKDDGTLKPLAIELSLPHPDGQQHGAVSKVYTPANTGVESQIWQLAKAYASVNDSAWHQLISHWLNTHAVIEPFVIATNRQLSVVHPVHKLLSPHYRDTMNINALARQTLINADGIFEKTVFPGKYALEMSSVVYKNWKFTEQALPVDLVKRGVAVPDPTSPYNVRLLIKDYPYAVDGLVIWWAIERWVGEYLAIYYPNDGVLRGDEELQAWWKEVREVGHGDLKDQDWWPKMDTVQELTRACTIIIWIASALHAAVNFGQYPYAGFLPNRPTVSRRPMPEPGTEEYAKLERGGDEADLVFIHTITSQFQTILGISLIEILSKHSSDEVYLGQRDTPEWTSDAKALDAFKRFGSRLVDIENRIKDMNGNSALKNRNGPVKMPYMLLYPNTSDVTKEKGQGLTAMGIPNSISI

SEQ ID NO: 165233 - protein, 60 aa, Oryza sativa
  Clone ID: PAT_MRT4530_64059C.1.pep
MDQEVAPPTAPPENPSIRKLLRCYCDLDPPRSRRIDRQDTGAKLRRRDFDDARARASSSQ

SEQ ID NO: 165234 - protein, 105 aa, Oryza sativa
  Clone ID: PAT_MRT4530_6405C.1.pep
LYKVRLMCFSVCLRCFNLHREAPFGFTSRHHYMQLAMDYQLLSSFNASIWPSLLWTWQREGPDCFFCFFLGPSLHISGLKCNLAICQGSPCKTCCTLNLLNKFLI

SEQ ID NO: 165235 - protein, 85 aa, Oryza sativa
  Clone ID: PAT_MRT4530_64060C.1.pep
GKRRSGIGDVVAVLTGHLAERAVVALLVATGGAGGADDNHASTLAAVLVSRHSGDVVGFGFWCCCFSCGVSWKDCLDVEAGDPGR

SEQ ID NO: 165236 - protein, 254 aa, Oryza sativa
  Clone ID: PAT_MRT4530_64061C.1.pep
MAAAAREEEEASTAARSRQESEGEEEEVMAVLDFDMLCASVALAAERRKDSAAAAAATVEAGGGGGGGGGGGVQRMWEGDVVLDCLEDRRIALEAACCPCYRFGKNMRRANLGSCFLQAMVYLISLVAILVSLIAFSVTRHNIYLYMGLSSVLLIAIYTGYFRRRIRKQFNIRFLALNEQEARTLEINNVQCGVWHGRGDTICLGSNGEGNKAFAALHKSSFVPIKSPEVCGMDRTSNGANEHEPLVPSDLPEQ

SEQ ID NO: 165237 - protein, 90 aa, Oryza sativa
  Clone ID: PAT_MRT4530_64062C.1.pep
FQRNHYVTVRDHPSTEATIYALEFSEFSISVAQAHGNGDVENEANSDGGEAASAHLLPCAGVVRAVVHQRVGRRIRTTSAPRPVPAGPPR

SEQ ID NO: 165238 - protein, 87 aa, Oryza sativa
  Clone ID: PAT_MRT4530_64063C.1.pep
GFFFFFFFFFFFFFFFFFFFFFWILESFSFYQTGLFTPRPLRFFFQSTECYRGSRVKFLSRAGDNKLKTGNGKKKRKRPKMPHGNWE

SEQ ID NO: 165239 - protein, 352 aa, Oryza sativa
  unsure (1)..(352): unsure at all Xaa locations
  Clone ID: PAT_MRT4530_64064C.1.pep
MDREWGSKPGSGGAASAQNEAIDRRASGDAMALETGDHARDRCFIRNHHGGYCLPAAQPLPFLFLVYLAKDPYFMRNHLGSYECKLCLTLHNNEGNYLAHTQGKRHQTNLAKRAAREAKDAPAQPQPNKRKFAPRKSVKIGRPGYQVTKQYDPDMKQHSFLFEIGYPEIEENSKPRHRFMASYEQKVESWDKKYQYLLFAAEPYEIIGFKIPSAEIDKSADKFFNYWXDPDKKQYILQLYFKTRQPEANKPPAAPGTLPNGSGGPPRPPPPQVPPPPPQAPPPPPPNAPMGMPPRIPPPPVGGTQPPPPPPPLANGPPRSIPPPPMTGGAMANFTPGAPPRPPMQGFPGPQQ

SEQ ID NO: 165240 - protein, 39 aa, Oryza sativa
  Clone ID: PAT_MRT4530_64065C.1.pep
LGLSLVWLRVVPVARLLLRLGQFRLPLPGVLPVPSSVGL

SEQ ID NO: 165241 - protein, 137 aa, Oryza sativa
  Clone ID: PAT_MRT4530_64066C.1.pep
MWMRMRILSSGAAAGRRRLLGVAASASTVARAIRAIPIVGPSARRRRQAASAQAAPSPAQSPSPAVVPLFQSDEVMANDEAVCLTAVCCVLYCSMCSMLYACELKAVVSMVTGLEPREQRPLFRGKEREDSDHLKDM

SEQ ID NO: 165242 - protein, 55 aa, Oryza sativa
  Clone ID: PAT_MRT4530_64067C.1.pep
CGLLHNAGESPTCNIGIIRLILRPGRCREKIQLGSLNHGDHDHLSTPIRHFARST

SEQ ID NO: 165243 - protein, 52 aa, Oryza sativa
  unsure (1)..(52): unsure at all Xaa locations
  Clone ID: PAT_MRT4530_64068C.1.pep
MRNASGSSCCSRVAAPLHAQVLGSPSPSHGLRGAGXGXLLQAPPPAXXCGEM

SEQ ID NO: 165244 - protein, 67 aa, Oryza sativa
  Clone ID: PAT_MRT4530_64069C.1.pep
VALSQRGWSCPLQALLHVQLGAETKGNPKHAFPSKETSRPDKTQSDSDLPVRPATHRRSDRPSTGGL

SEQ ID NO: 165245 - protein, 84 aa, Oryza sativa
  unsure (1)..(84): unsure at all Xaa locations
  Clone ID: PAT_MRT4530_6406C.1.pep
YKCPNTIGLIYLHMDPWQFCCTVLYNLVIISYSLSPLFMRLDGLIKTXIEAAYCFSSNLLTKIHFQNVGSFYLLLADHILTLNS

SEQ ID NO: 165246 - protein, 408 aa, Oryza sativa
  Clone ID: PAT_MRT4530_64070C.1.pep
MQASSAAAAAACSAIKPAAHQHTVQVQEDKRGSEFRARFGTRKLSWGGKLSVENSALHQCQRQALSLTRSIRRQKRQHSPVLQVRCYAIAGDQHESIATEFEEICKEVPQKLGAFYRFCRPHTIFGTIIGITSVSLLPMRSLDDFTMKALWGFLEALSSSLCMNIYVVGLNQLYDIQIDKVNKPSLPLASGEFSVATGAVLVLTSLIMSIAIGIRSKSAPLLCALFISFFLGSAYSVDAPLLRWKRNAFLAASCILFVRAVLVQLAFFAHMQQHVLKRPLAPTKSVVFATLFMCCFSSVIALFKDIPDIDGDRHFGVESLSVRLGPERVYWLCINILLTAYGAAILAGASSTNLCQMIITVFGHGLLAFALWQRAQHCDVENKAWITSFYMFIWKLFYAEYFLIPFVQ

SEQ ID NO: 165247 - protein, 110 aa, Oryza sativa
  unsure (1)..(110): unsure at all Xaa locations
  Clone ID: PAT_MRT4530_64071C.1.pep
LENSSPASSSGSTWRRRARNRQPSQPTTPIPRFPPTPTHPGRRPPPPPHPFAAASSPLRRRLRHLTSLPPPPPPRPXSPQPPPLRRRRRVGQQPPPLRRRRRIAVSPPLP

SEQ ID NO: 165248 - protein, 58 aa, Oryza sativa
  Clone ID: PAT_MRT4530_64072C.1.pep
MRLAHADINCQGASIAQFTESFWMGLLSSHGKTLRQPENATDDTDEANTNNSSCSGTN

SEQ ID NO: 165249 - protein, 129 aa, Oryza sativa
  Clone ID: PAT_MRT4530_64073C.1.pep
MAKHQADLVRCSRQPGAAVGRVCAAHDGRCVACDSMVRPAAPARVCDGCSGGGGGHGSRSERCLVCGAGAGEGGAAAVADAYYCRSCVQMEKDRDGCPAVVNAGTARRDAAAFFFSARSKRGGFRSTMA

SEQ ID NO: 165250 - protein, 248 aa, Oryza sativa
  unsure (1)..(248): unsure at all Xaa locations
  Clone ID: PAT_MRT4530_64074C.1.pep
LMALRKLRHYFQAHQVSVVTSYPLGQILHNREGTGRVVKWAIELAEFDLHFEPRHAIKSQVLADFIAEWTPVDEPVPSDVPFPPREEEDPNADIRGGHWIMHFDGSLNLQVQGXTRMGIRHLLVLGDSQLVVNQVSKEYQCTDPQMEAYVYEVRRMERHFDGLELQHVPRRGNTVADELLRVASARAPLPPGTFEERLAQPSARPNPXGTPTTRPPTLVWMTDIXGYLDGNTLHKDRAEAEKVARISK

SEQ ID NO: 165251 - protein, 197 aa, Oryza sativa
  Clone ID: PAT_MRT4530_64075C.1.pep
AAVGLLPATRSRVEGEIASEETVSTSAEAPQRVAWLQLPTKSWRGAERAASFSRGTRSIAGGRRGRKSLPPSLGARPGGTHCGWPNSPGIRFPFAFEFPISLRLKVICNSWRKENIQGAPYPVSRWNGKRPWKPGRWVITDDDAEHGSSSGSRRERTHVARRGGCRSMHRPPRGAAFVRSSQTIALLPFSELRQLEI

SEQ ID NO: 165252 - protein, 716 aa, Oryza sativa
  Clone ID: PAT_MRT4530_64076C.1.pep
MERVLKSARESGSLNLSNRSLREVPKEVYNNLDTGAQDEKWWEGVDLQKLILAHNNLEVLREDLRNLSSLVVLNISHNNISSLPAAIGDLPLLKSLDVSSNQINAFPEEIGFATALVKVDCSNNCLTDLPVSLARCLELSELNASNNTISVLPDELAGCSKLFRLNLEGNKLVTLSDKMFMSWTMLTEMNAEITLIPPSIKDCSSLAEFYMGNNLLTSIPEDIGMLSNLGILDLHSNQLKEYPVGACRLKLSFLDLSNNSLSGLPAELDHRADSFFPWGICFENLACSMQVCYYLNELSKLWTLTYASACYIQGTMTTLRKLLLTGNPMRTLRSSLVSGPTTALLKYLRSRLSSDEGASGSGSTPTKDDQIAAARRLSLSSKELDLSGLGVTSVPPAAWETNDVMKLDLSKNSIEDLPNELSLCSSLQSLILSNNKIKRWPGTVFSSLASLSLLKLDNNPLAEILATDLEALSKLEVLDLSGSASSLPEPSAVSKLPHLKELYLRRMKLHGFPDSLLGLKLLRILDLSQNLLTSVPEGIKDLTSLIELDLSDNNITTLPPELGLLEPNLQVLKLDGNPLRRVIDVKCWYLNANGLTPSLVPGKDRLNDLPDDVVLNILERMDTSSAMKSCIRSNNMSAILPDMLALISVDFADFSPPNLRGLTLDEVVPTNGVKADLTNAVLKFLRPEIPVYLHALHFNVTSDAIDLLYYAVHVHS

SEQ ID NO: 165253 - protein, 71 aa, Oryza sativa
  Clone ID: PAT_MRT4530_64077C.1.pep
LDSFSTSSLRIDRFVTMSTPQCHNYMRRDDITENITDQFLSFSQDPNAGEAQHMYVQKIKKEDNRIRSDLD

SEQ ID NO: 165254 - protein, 118 aa, Oryza sativa
  unsure (1)..(118): unsure at all Xaa locations
  Clone ID: PAT_MRT4530_64078C.1.pep
TVYRCIYGHSLNTLRKSITKSANGKVTTRIGLGRYYIVQGPVSPSPTXRPFDLRYKRDPPGELKGSNLRAYTTTIAYEVGDYRSQVAGXSRRINLTMVSSVPLSFTTPFARRRSLLFL

SEQ ID NO: 165255 - protein, 342 aa, Oryza sativa
  unsure (1)..(342): unsure at all Xaa locations
  Clone ID: PAT_MRT4530_64079C.1.pep
SCTSSKTYAHEIPRLLPSCGGKWPTSDAAFEGHNLVNCYAGNLSIAVIQANNSFKEQYRVESSQPFGTVIGIFDGHGGSEAAXFSCDNLFLHLQEXLSSSQRVTTDAISKAFKATEEGFIELVSRQWKTDPQIATVGACCLVGAVQQKTLFIANLGNSRAVLGKVSCIGQIVAEQLSSEHIANDAWKAKGLVQVLRAIGDAYLKYPQYSREPLNKPILSANPSIVSRVLRPSDRFIIFGSAVLWEYLSNQEAVEIVKNHQASGSAKMLVKAALHAAAKKHNLHYSDLLKMDRDNPRHVHEDVIAVVLFINYDQLLKGKQGRPLSIRYPRSIQHGLVPSSRIS

SEQ ID NO: 165256 - protein, 140 aa, Oryza sativa
  Clone ID: PAT_MRT4530_6407C.1.pep
HASDCKSDSHHTQTSKHGESGGSNSGGSRAGLFRTPISGGVHTATSVHDLPPPARAVRNLMEQARFAHLCTVMSRMHHRRAGYPFGSLVDFAPDPMGHPIFSLSPLAIHTRNLLEDPRCTVVVQVPGWSGLSNARVTIFW

SEQ ID NO: 165257 - protein, 137 aa, Oryza sativa
  unsure (1)..(137): unsure at all Xaa locations
  Clone ID: PAT_MRT4530_64080C.1.pep
GRCPRSRAPTPRTTPWSSAPSPSARRGGRPGHRRRLPLGLPPSRTLLLSSAPTPPRTSPRRLSPPSAPPXVPPVPDLPSPLQRRPLRVPPMSSPSPRPSQGGTPAVVVCPRQPVPTVAELGRGRPRRPPLPILRRLR

SEQ ID NO: 165258 - protein, 53 aa, Oryza sativa
  Clone ID: PAT_MRT4530_64081C.1.pep
MFTRLLLLHHTAQLVSCTEAIGGKKISRALDDAYFFDGDKLASDLLLVCTPTV

SEQ ID NO: 165259 - protein, 144 aa, Oryza sativa
  unsure (1)..(144): unsure at all Xaa locations
  Clone ID: PAT_MRT4530_64082C.1.pep
KGRREKVGAXXRXRRRDPLLSPTPSPLGALPFRRALRLGPSLSTATSPAPTTTRWPHSDSGSPPPRSVLPPRXXXVXPHPSMVSREKRTPMQGRSPAASSPSVASKGSADRRPLLTSLARPKAPSSTLKEACSAYVIESAIKFL

SEQ ID NO: 165260 - protein, 496 aa, Oryza sativa
  Clone ID: PAT_MRT4530_64083C.1.pep
MSFQDLLRDMEAGVLQPAAPPAQEVAHGVFQLNTKVEALRYMAGALGTPRDTPSLRGRLRGTRAGIKRLATSTSQALRQAAAAADDDESVSSCSKLAMDFEAAVNEYQKIERRIAAVERQETAAAARRSPPPPTPGFNHINNNGDHTFPEQKQTQLAVLRDINLLDSEIELHEAIIAEREQGILEVQQEIADIHEIFRDLAVLVHDQGECIEIVTANIEMTEAATSQAEVQISKAAGIRGEKEELLTGAGTEDNSPSKCLLLAVLGLFLFIVGRRKLYSSGCPSKRGITDNQTKNTAAPAPEKKYKGVRLRQWGKWVAEIRLPNSRERVWLGSYDTPEKAARAFDAAFVFLRGAGAADAAGLNFPDSPLPVVARTRDLREVYAFAVSHANRPPPVAGETAATALAAMAALEHNEVRENIAPSSPLSAVQVAAPPAGSFDWSQLMANSPPLYSPIVIGSHAYDDLAVWPTTQPVEEFSEEDNENEGATSDELWSFDV

SEQ ID NO: 165261 - protein, 82 aa, Oryza sativa
  Clone ID: PAT_MRT4530_64084C.1.pep
MATRVSLTAGYRGYRAYRGVFHGYRVVTPVPAVWETLMASCCFGWSTFMSMHGIAFNIGFLLKWISLESLSQLNVYSLSYPF

SEQ ID NO: 165262 - protein, 217 aa, Oryza sativa
  unsure (1)..(217): unsure at all Xaa locations
  Clone ID: PAT_MRT4530_64085C.1.pep
GSDSGGGPRWTGSTDRERGSAPRGAHVALTWRTRGGHVAATRAVGLDGPDLPPDRSDGGGGSQPXAHGHGSNRPSDHGARRRGSTQRRRPAATGRGQRAAAKRLGGGAAAKQRGRERGGGGGVSPTAIDDASDGGRXRQRDELRNHLANMMXGLEREEDGRGRGRRPEAAAMAVLTGAWCRVGSDVGIRREMXDGVARTTANATASTARLGAATSDG

SEQ ID NO: 165263 - protein, 113 aa, Oryza sativa
  unsure (1)..(113): unsure at all Xaa locations
  Clone ID: PAT_MRT4530_64086C.1.pep
SCSCERKPARNGQPSRSPRTAAAPCTXXQKIKPNIVKHMTAVTXXVXAKIKGYIGSARWGGHGAVGEALALGLAAAPDPQAVRAARGRQLARRRDGLVVGGSMPWRRARVGRS

SEQ ID NO: 165264 - protein, 117 aa, Oryza sativa
  Clone ID: PAT_MRT4530_64087C.1.pep
RTRGRTRGRTRGRTRGRTRGRTRGAEMNSKMVGSKPLYVALAQRKEDRKARLQAQFSQLRPVPLAPSVGPRMPMFPPGVPGVGQQLFYGQAPSAFINTQSWVWVPAASYAWDEVRCK

SEQ ID NO: 165265 - protein, 67 aa, Oryza sativa
  Clone ID: PAT_MRT4530_64088C.1.pep
VGGLKKEPPTPYVSPPITEVFPGCRRRALERFRRCPPAFCKVDIPNGTVVVCFRLGYPRPTKNRSVD

SEQ ID NO: 165266 - protein, 244 aa, Oryza sativa
  Clone ID: PAT_MRT4530_64089C.1.pep
GEAKGLEFNLPYRLKNNQLDFGLKQPINLKIAYLNVGLPITNIRAKVFGHYPYTPQHPLKLEQLSMNLLDGALRIEHFALPQTKVAYLHLSQINFEQILALLKYQQIELKGRANATFPFWIEGKPCYVCNGSMAQAVSSRLKIAPELMQAISQSNGYSERLLAYLLHDTRITDLTSKVNINSEGEMALQAKLNMQLNQQAQTKINFNYHHQENVFKLWRTLNAGTYVEQNFENSIYQKLDRTNE

SEQ ID NO: 165267 - protein, 795 aa, Oryza sativa
  Clone ID: PAT_MRT4530_6408C.1.pep
MRIAPRPGGPPARARVDEQRVIHHEGALYLRTRQGRLQVVEVGELYEQRDGHLKIAPMVFRRFSRGGRDYGGAIAVRYLVESGENLLMVVRLVPHPPRLPPRTSAFKVFEMVEPPLETPINNDEAPYGWNELESLGGRMLFVARGCSRSYDANKYPGAEFNEGVYFLDDGRLYCEAAVFVDQAAAAAADEPRCPCWPCTDSGKWLAAAGEVPRVDKFLPEQGPSNHYSPPAWFLHHTGDNCVNPEKFIQEHRIAVEQAAATNAIQVMNTNHSTLSHHEVHDPKFFRPMKKCSTKCSYQNFRPKQTVTINWAQAQLLARLAKGWPSLLLLPNQTTPSFPCFQKPSSNMAHNDEASSSRSTTSSAAQPSPPPPPRLASASSSPMDAVAPARDFMAESLRLVHNRLTCLVDRRTMARVCHAWRAAVKPLHPPPEERPLPYILLPGDGERSFSCALRGCATHRFHIPDIPRDARCFGAHPGGWLFFAVAQTTKNAILRDEFPSGIPDVLHLDDRPPDKDTDVVMFAATISSHPEDQRCIGAAILSHFPDVTNPSIYAFFRMGVLPAMVANGDDASNAGSASGLEDLIHYDDAFYFLTGEEGLLVFRVSEFHDFKDEELDIAPIEIRRFPRRGRGHYGEDDVAVVRYLVESRGRLLMVARIAAGAGPLRPSPPSPTTTSEFRVFEMARRSTAFAATNNDGAEYDWVELDSLGGRMLFVARGCSTSYEVARHPGFEEGVYFLDDGRLYGEVAMFRDPNLRQYPCRDSGRWLASAPEAVPRVDNFLPEQAPSNYSPPAWFLP

SEQ ID NO: 165268 - protein, 120 aa, Oryza sativa
  unsure (1)..(120): unsure at all Xaa locations
  Clone ID: PAT_MRT4530_64090C.1.pep
ASERANRQRCSDGSTARQRARATASAVTSPPRLDGGRTKGRRQAECYCISCPARRRTSDGKRICSRTSSAGVXSPKATVKPTLPVPGEGPWRDKLQGGARTGVNRLGPEETGKLLQAEGH

SEQ ID NO: 165269 - protein, 868 aa, Oryza sativa
  unsure (1)..(868): unsure at all Xaa locations
  Clone ID: PAT_MRT4530_64091C.1.pep
ICLFQSPLAALYRQLRGRPTGSQPTDQMEPSPVRPTLVSISVLVWNVRGLNNSGKRSLIANVVSSSRASLXFCCQESKLAVLDQQLVAQTCGASLDGFDFVFPAXGSRGGVFTAWRSDRFMVSCTHKGHWSLTLSITNLEGGGCWLLTNVYGPQDAANKILFLDELLLVGQQLVTGPWCVVGDFNLLSADSDKNNSNVNKRLIGRFRNMMDSLEVQEVYLFGRRYSWSSEQENPTLTKIDKVLVNAGWEDLFRDAHLQALSSSASYHSPLLLACDIMMHRPRRFKFESFXTRLEFYLGFDDFVKETWELCATAAALRKWGERRISKLRLQLVVAYEIIFQRSAAIDFAQAGMHAFDLLELETDISEEARQINFAMPSEKALGPDGFSGXFFKRCWEVIKDDVVAAMKLTWRVNARHLHLLNMASIVLLPKKEEPTHFGEYRPISLIHSFVKNSXILTKIMASRLSARMDEIIRQSQTAFIRKRRIHENFLYVQGAVKLLHRTKKPAMLLKIDIAKAFDIVCWDFLLELMQFLGFGNHWQXVSHLSWLPRASLYADDAIIILHPSRQDVEVIQFILKLMGEATGLISNLAKNSFTPINCSETKILEVIEVLGCLVKDLPITYLGLPMSTRKLSKAQLLLMLDRMAKNLAGWKSCLLSPDARLALIKHVLMAIPLYLLSVLELQVWAVKAIEKKCXAFLWKEDEDASXGGGCSLVAXEKLFLPIENGGLGIVNLGRMGIAMXTRWLWLQCSQPEWLWATVPIDQSKDLQDLYLAXTRQVLGDGKNTKFWLADWLPVGSIKSRFPLIFSHVERSGLTVARGLLNHRWVRDIKGVPSNHAIGEYFQIWDAVQGVQLQDGEEDETIWKWAPNG

SEQ ID NO: 165270 - protein, 76 aa, Oryza sativa
  Clone ID: PAT_MRT4530_64092C.1.pep
SKLEDVPVVGMYIRVDVINYGDKYIVVNCCMMVSVSLNHEYRKRFIVFFIIIINFDILFILRLCFPCGMNCPTLII

SEQ ID NO: 165271 - protein, 88 aa, Oryza sativa
  Clone ID: PAT_MRT4530_64093C.1.pep
AIIPSQVPRPTQVPNWLTLGRRGIDPEGVWRSGPSRGRARHQWAPTLGRRVLKTYPPPCKRPSFLAASWAPPFSSSPPPHSPTTPPHT

SEQ ID NO: 165272 - protein, 73 aa, Oryza sativa
  Clone ID: PAT_MRT4530_64094C.1.pep
FDFMRQTELQFHESVRTFWAYSYAGTRNGLGGRALDRTFSRRTAGISKHPYSRSTIRGSGSGAPREGWPNCYG

SEQ ID NO: 165273 - protein, 269 aa, Oryza sativa
  Clone ID: PAT_MRT4530_64095C.1.pep
MGGGECRSNDYGAAAYWDARYSSPSPSSTATTGGGGGAFFDWYQAYPALRPLLRARLPASSRVLMLGCGNSLLSEDMVKDGYEEVVNVDISSVVIEQMREKHVDIPQLTYFQMDVRDMSLFGDGTFDCVLDKGTLDAMMCGDDAPLGASKMLAEVARILRPGGIYMLVHPLNLNNTKETLNNGEIQLDPDKIYCYHFAATPGYQLKWSKGVSLAQPIMEEVSLTVDGQLPPDYVLKDPESHFIYICKKPDAANEANSVVANEGETITSK

SEQ ID NO: 165274 - protein, 111 aa, Oryza sativa
  Clone ID: PAT_MRT4530_64096C.1.pep
GDKIRLTLWGQLARFFSEDVIGNQTVVIVTSTTVQEYIGLSLRSSSATRIYTNLHIRETWTLIDRQFSEETIPKMMEVDKSTQGTREEQMFYNRKTLKDITEMRHGNPGSQ

SEQ ID NO: 165275 - protein, 66 aa, Oryza sativa
  Clone ID: PAT_MRT4530_64097C.1.pep
LHPDVYTSLVKKVPKCLMFTGWFRVVQVCCVQDPRSCFSPYGCNHVHMPFLFATIIVVSCGFRPVL

SEQ ID NO: 165276 - protein, 38 aa, Oryza sativa
  Clone ID: PAT_MRT4530_64098C.1.pep
NPRVFPGVRPRVRPRVRPSVRQGSDQGSAHASVQGSPP

SEQ ID NO: 165277 - protein, 94 aa, Oryza sativa
  Clone ID: PAT_MRT4530_64099C.1.pep
MAIKKCRGAPEIQGRREEGVGEIDNIASSGGLLMARIRWRKEGSVMTQRKPVQAVAVRQRRIKGKKNEVLVRQWMDGSIEISKKEKDKKFWKGR

SEQ ID NO: 165278 - protein, 38 aa, Oryza sativa
  Clone ID: PAT_MRT4530_6409C.1.pep
MAWRASGVRGFSYRAVTGLTAGGYRGYRAVTVLTAGAR

SEQ ID NO: 165279 - protein, 34 aa, Oryza sativa
  Clone ID: PAT_MRT4530_640C.1.pep
TAGADRDRGVLDPRSRHRRDMPRQLGQDAITDSH

SEQ ID NO: 165280 - protein, 44 aa, Oryza sativa
  Clone ID: PAT_MRT4530_64100C.1.pep
FPSLHGPSACWPWVPPCSAAPLPFTLLLLLHCPAFPVWAPPVCC

SEQ ID NO: 165281 - protein, 67 aa, Oryza sativa
  Clone ID: PAT_MRT4530_64101C.1.pep
MFDRTLLGTRLSHPSPESGRIETSLVFRGDKKAPAKKAARPSAPTTDRPLWFPDPLVLHYLDGPLVK

SEQ ID NO: 165282 - protein, 100 aa, Oryza sativa
  Clone ID: PAT_MRT4530_64102C.1.pep
MADMRVFGGDVRHRFCQLPAKPLREPDYTGFNISGRPTGHAMHDGDAGVARDGRVRYEEGGDEAHEGSSTRVAAAVAADDVDVDLGILGGGMNYSDSFTG

SEQ ID NO: 165283 - protein, 938 aa, Oryza sativa
  Clone ID: PAT_MRT4530_64103C.1.pep
MAESVVFGILCKIGSILGSHLTQALVSHLGKEVSVLIEVESIVKQIRSEFRLMQSFLQDGQEKESSSRQAETFLQEVQQIAFEVEDILDEFVYYFGRKETPSVELLKNFFRKSESVMPLRRIAAELKEVQNRLQNIRNLKLQYNIDLSEESASSIRYEDSKGHTLHHIMHNKKLVGFVNERQKLQELLMANERSCSIISIWGMGGSGKTTLVKTVSESKASKNRFDCQIWVTVSQTYDITEIMRKIIQCALKDTCSADLGSMSSEGVVLMLQETLQGRTYMMVLDDVWDTNVWFSLEGFLDESSIRSKVVITTRINDVASLAEDKRRLQLRGLDEAESWDLFCMWAFRHGEDQTCPPAMDRVARQIVGRCEGLPLAITAVGNLLSFKRLDLMEWEKFYNQLNWELHNRLDNQGLSMVTRLLGLSYKHLPVHLKNCFLLCSIFPEDYMIRGKRLCKLLVVEGLVEPRKNMTLEEIAMEYIEKLVDRCLLQVARRNKLGRVWELQMHDIIRELAISISEKEGFCMIHNKAQRSVVECEPRRLSIHENSVRVQLSINASRVRSFYQFDIDCSSVSKVQWVSRTARYLKVLELGSVPIRKLPRDIGNLFNLHYLGLRRTKIKQLPESIDRLQNLRTLDIFLTEIASLPRGVTRLRMLRHLIAGKAVASYFGLEDVFTGVKVPNGLWRSLDLNVLTGISASSNLVEQLASFTQLRSLKLTDVKNIHYTKLFASIRKMQLLKNLLIGTANSDEYVSLEALDPAPQNLEILFVKGRLHDRVIGSDLFEANRLTLMELTLENSRLSIDPLPSLSNFCNLTLLGLFNHYIGETLLFQAEWFPKLHTLTLAELQNVSSIVIEKHSMPNLYNFALICLTNLEDLPEGMEFLGSVEELSLVGMHQKFMEHVQGSSNVKVKHIPVVDYFDQTKGRWDRLSPLYFEDEGTKN

SEQ ID NO: 165284 - protein, 570 aa, Oryza sativa
  Clone ID: PAT_MRT4530_64104C.1.pep
MEDMLSFFSSGLHVMLVDDDTKNTRTATKTLSMLHCPVVSTHTTACAGLRTLSGDNMLDVQTVLCDVSKVVSSGFDFRRVNETEHQIPVIYQERVPGDSMDDIAAHAGAGGEDGNDDDVVVIEEPQVHFKLVRSRGSRKRQLTINVDSGSSDSAAFKYAVWLIISIRSTDIDLSDANQRKKIEHMNDAKGPVGQHVASHLQLPAQEYCTKQQKDLDERRLISSDSLFLKAIFPTLNVSPSSPLILAGGAGPSCIPTTTIAGSRTAAPFQVPVFQQQPSGTTVISFSNTAVQAPIGNAFISFNNAASPAATGNTVISFNNIAAPAAMQVPAMRQRLSGGVQPDAPQQRLYMGPFSYQGPPPPPTMRNHINIVPTAFIPRVGMTVNIGKAPMIELPFGVPVDDFLVGETAYGGAGPSIGAPSNDAAVAYAYTGALNNNTAVGSLMAPPIDEPTFTLTDPIVGTKGEGVVHIVITSEDQNALAAVEAGAPNNAEPFMMPDQVDLEEDIMFSLESLLGLDEDMIPMEDAGGEAAEGSLNIGEGGMEIGWDLDLDDILMNNTNEFAFLDDLAWIE

SEQ ID NO: 165285 - protein, 753 aa, Oryza sativa
  Clone ID: PAT_MRT4530_64105C.1.pep
MGTGGGEGDKSAVLPLEALLALGLDQRTAENALVNSKVTANLAAVIAELALAYSAQAVACYVLLSTNGLANEQAGISGCDKTVGNLLYTVATKYPTNALVHRPVLIDYIVSTKIKNPAQLDAALSFLTNTGPDSLDTGKFEEACGVGVVVSIEEIKSTVNEVRKRHPWGDAKATKDEIDKKLAEILGPKTDADNVKPVKKKKEKAAKVEEKKAAVVTAAPPSEEELNPYSIFPQPEENFKVHTEIFYSDGNIWRAHNSKEILEKHLKATGGKVMTRFPPEPNGYLHIGHAKAMFIDFGLAKERNGHCYLRFDDTNPEAEKKEYIDHIQEIVHWMGWEPYKVTYTSDYFQALYEHAVELIRKGLAYVDHQTAEEIKEYREKKMNSPWRDRPIEESLKLFEDMRRGLIAEGAATLRMKQDMQNDNKNMSDLIAYRIKFTPHPHAGDKWCIYPSYDYAHCMVDSLENITHSLNRLVTEKWVDGWDDPRLLTLAGLRRRGVSSTAINSFICGIGITRSDNSLIRVDRLEYHIREELNKTASRAMVVLNPLKVVITNLEDEKVIDLDGKMWPDAPADDASSYYKVPFSRIVYIEKTDFRLKDSKDYYGLAPGKSALLRYAFPIKCTEVVYGDNPDDIIEIRAEYDPSKTTKPKGVLHWVAQPAPGVEPLKVEVRLFDKLFLSENPAELEDWLGDLNPNSKEVIKGAYAVPSLATAVLGDKFQFERLGYFAVDTDSTPENIVFNRTVTLRDSYGKAGPK

SEQ ID NO: 165286 - protein, 750 aa, Oryza sativa
  unsure (1)..(750): unsure at all Xaa locations
  Clone ID: PAT_MRT4530_64106C.1.pep
MGTGGGEGDKSAALPLEALLALGLDQRTAENALVNSKVTANLAAVIAEAGISGCDKTVGNLLYTVATKYPTNALVHRPVLIDYIVSTKIKNPAQLDAALSFLTNTGPDSLDTGKFEEACGVGVVVSIEEIKSTVNEVLKHNMEAILEQRYHINVGNLCGQVRKXRHPWGDAKLTKGGGLARMILNPNSKEVIKGAYAVPSLATAVLGDKFQFERLGYFAVDTDSTPENIVFNRTVTLRDSNVIQNHSEKKGPFLVKWTCLTCXYVSIKLCMIGYVLMSMRFGDMNSXAYINVHNQQLYKYFQDLYELAVWLIKKGLAYVDHQTAEEIKEYREXQMNSPWRDRPIEESLELFEDMRHGLVAEGKATLRMKXDMQNDXKNMADLIAYRIKFTPHPHAGDKWFIYPSYDYAHCLVDSLENITHSLCTLEFDIRRPSYYWLLVSLDQYQPYVWEYSRLNISNNVMSKRKLNKLVTEKWVDGWDDPRLLTLAGLRRRGVSSTAINSFIRGMGITRSDNSLIRLERLEYHIREELNKVAPRAMVVLHPLKVVINNLDYGTIIDLDAKKWPDAPGDDASAYYKVPFSRTVYIEQSDFRVKDSKDYYGLAPGKTVLLRYAFPIKCTEVIYGDNSDNIIEIRAEYDPSKATKPKGVLHWVAEPSPGVNPLKVEIRLFEKLFLSENPVELEDWLGDLNPRSKEVIKGAYAVPSLATAALGDKFQFERLGYFAVDSDSTAEELVFNRTVTLRDSYGKAGPK

SEQ ID NO: 165287 - protein, 224 aa, Oryza sativa
  Clone ID: PAT_MRT4530_64107C.1.pep
TKIKNPAQLDAALSFLTNTGPDSLDTGKFEEACGVGVVVSIEEIKSTVNEVLKHNMEAILEQRYHINVGNLCGQVRKRHPWGDAKATKDEIDKKLAEILGPKTDADNVKPVKKKKEKAAKVEEKKAAVVTAAPPSEEELNPYSIFPQPEENFKVHTEIFYSDGNIWRAHNSKEILEKHLKATGGKVMTRFPPEPNGYLHIGHAKAMFIDFGLAKERNGHCYLRF

SEQ ID NO: 165288 - protein, 889 aa, Oryza sativa
  Clone ID: PAT_MRT4530_64108C.1.pep
MAATAASTMSAAAAVTRRINAALRVDATSGDVAAGADGQNGRRSPVAKRVNDGGGGKDDVWVAVDEKDVCGARGGDGAARPPLFRTYKVKGSILHPYRFLILLRLIAIVAFFAWRVRHKNRDGVWLWTMSMVGDVWFGFSWVLNQLPKLSPIKRVPDLAALADRHSGDLPGVDVFVTTVDPVDEPILYTVNTILSILAADYPVDRYACYLSDDGGTLVHYEAMVEVAKFAELWVPFCRKHCVEPRSPENYFAMKTQAYKGGVPGELMSDHRRVRREYEEFKVRIDSLSSTIRQRSDVYNAKHAGENATWMADGTHWPGTWFEPADNHQRGKHAGIVQVLLNHPSCKPRLGLAASAENPVDFSGVDVRLPMLVYISREKRPGYNHQKKAGAMNVMLRVSALLSNAPFVINFDGDHYVNNSQAFRAPMCFMLDGRGRGGENTAFVQFPQRFDDVDPTDRYANHNRVFFDGTMLSLNGLQGPSYLGTGTMFRRVALYGVEPPRWGAAASQIKAMDIANKFGSSTSFVGTMLDGANQERSITPLAVLDESVAGDLAALTACAYEDGTSWGRDVGWVYNIATEDVVTGFRMHRQGWRSVYASVEPAAFRGTAPINLTERLYQILRWSGGSLEMFFSHSNALLAGRRLHPLQRVAYLNMSTYPIVTVFIFFYNLFPVMWLISEQYYIQRPFGEYLLYLVAVIAMIHVIGMFEVKWAGITLLDWCRNEQFYMIGSTGVYPTAVLYMALKLVTGKGIYFRLTSKQTTASSGDKFADLYTVRWVPLLIPTIVIIVVNVAAVGVAVGKAAAWGPLTEPGWLAVLGMVFNVWILVLLYPFALGVMGQWGKRPAVLFVAMAMAVAAVAAMYVAFGAPYQAELSGGAASLGKAAASLTGPSG

SEQ ID NO: 165289 - protein, 97 aa, Oryza sativa
  Clone ID: PAT_MRT4530_64109C.1.pep
QGSHYRIGPFLGEHRANPPQGFNLSPGGIVHKKGAPLHHPFEGPHGGGLLFSNPIMPPSSTRVFVGPPTDMARSKKQVGAQAAPEHRGGLLPIHFGG

SEQ ID NO: 165290 - protein, 78 aa, Oryza sativa
  Clone ID: PAT_MRT4530_6410C.1.pep
WRRGRSLARCEEAGRAVMRGGTVGEVSAVGCSAIYSARRPAGGGHWCSGRTCRQRLDGGGASGHPPWTPMMLEASFPS

SEQ ID NO: 165291 - protein, 116 aa, Oryza sativa
  Clone ID: PAT_MRT4530_64110C.1.pep
EYDPSKTTKPKGVLHWVAQPAPGVEPLKVEVRLFDKLFLSENPAELEDWLGDLNPNSKEVIKGAYAVPSLATAVLGDKFQFERLGYFAVDTDSTPENIVFNRTVTLRDSYGKAGPK

SEQ ID NO: 165292 - protein, 70 aa, Oryza sativa
  Clone ID: PAT_MRT4530_64111C.1.pep
GCAPMYKPFCSLLQRRAAFGVTPAPTLFMNSLSIACPRSLIRQFYLFICWWVVGRGGSLEFKHTLYCSLV

SEQ ID NO: 165293 - protein, 100 aa, Oryza sativa
  Clone ID: PAT_MRT4530_64112C.1.pep
RLKIWLVDSKGGGVVYTKNCVQTFKKPWAHEHEPLTTLYDAGQSIKPTVLIGTSGVGRTFTKEVVEGMASFNERPIIFALANSTFHSECTAEEAYNWTQG

SEQ ID NO: 165294 - protein, 398 aa, Oryza sativa
  Clone ID: PAT_MRT4530_64113C.1.pep
MASSPCGGFLEKAKPYFAMICLQFGYAGMNVITKVSLNHGMSHYVLVVYRHAFATISIAPFALLLERKVRPKMTWSVFLQIFVLALLGPVIDQNFYYAGLKFTGPTFACAMSNILPAMTFVMAVIFRMEKVDLKKVRCQAKVAGTLVTVAGAMMMTLYKGPLMQMAWTSHVQAPHGHGAEAPAAAAAVDPSGREWFLGSLFVIIATLAWASLFILQAHTLKKYSAPLSLTTLICFVGTLQAIVVTFAMEHRPSVWAIGFDMNLLAAAYAGIVTSSIAYYVQGLVIQKTGPVFASAFSPLMMIIVAGMGSFILAEKIYLGGVLGAVLIVVGLYSVLWGKHKETQEQDAAMMELPVASKGNDAEFTAATVVGDDDDAADCKKANGVKKSSSSNEQGASAV

SEQ ID NO: 165295 - protein, 146 aa, Oryza sativa
  unsure (1)..(146): unsure at all Xaa locations
  Clone ID: PAT_MRT4530_64114C.1.pep
MSYVGEAPVHVATALSDGAVNDQLRQECSRQLATVFNTSSRCSALIHRVGGISSRIGATHVGHPMSXVFLDCLKGNSEXARRASLPAFCNVYIPNRTVGVSYLLGYPRTPTTWSLGILKLCCVYDSVGLLNKERFHLSVSIYTYGE

SEQ ID NO: 165296 - protein, 145 aa, Oryza sativa
  unsure (1)..(145): unsure at all Xaa locations
  Clone ID: PAT_MRT4530_64115C.1.pep
MPARRGRGKRKQQQPPPPPTGPADARQPEGKQREEERKGMEGSDKGGAGDDGSPAPLPETVQIGNSPTYKLERKLGKGGFGQVYVGRRISSPTHGNRNSGANALEVALKFEHRTSKGCSYGAPYEWQVYNTLSGNHGXPRVHYKG

SEQ ID NO: 165297 - protein, 114 aa, Oryza sativa
  Clone ID: PAT_MRT4530_64116C.1.pep
LGYKTSCGGVDTRSNISYRFSSYYITDYYQKNDQDNVACGFSNLATITGRDHSTGTCRFGIMIEVDSAFSWKLQHVRSSNLLMLLQDEKSPEKARRRCGLSELHLQSPTTTKRL

SEQ ID NO: 165298 - protein, 68 aa, Oryza sativa
  Clone ID: PAT_MRT4530_64117C.1.pep
VMPNAILDSTTLMVAHIINQFGSAIYSMSHISWSRVFKVLFYCNCSLDRYMLNSLNIKVRGFPPKKTP

SEQ ID NO: 165299 - protein, 105 aa, Oryza sativa
  unsure (1)..(105): unsure at all Xaa locations
  Clone ID: PAT_MRT4530_64118C.1.pep
DYNNSGCINRPMVLFAVCLFLLCDXSISTQISRKRTRRXRSSPRGTRRGXDVDRSRASGSSRSASSEATTSEVFNASNDVFPCTEXYVRPRVIESRGLLLAHYTM

SEQ ID NO: 165300 - protein, 64 aa, Oryza sativa
  Clone ID: PAT_MRT4530_64119C.1.pep
MAKSEYYCGCMYQRPYHLWRLVEDFTVLPSRPVSVVDHHRPARYRAISENFQKKFDADMNSKQL

SEQ ID NO: 165301 - protein, 188 aa, Oryza sativa
  unsure (1)..(188): unsure at all Xaa locations
  Clone ID: PAT_MRT4530_6411C.1.pep
WQWRGEGGGVGGGAEVXGGGLAGTERNRIWLPQRRIRWGGGRKASSARRGTTGGGGDRHGARXGVAGGGRPAWRDEARRALDEASRGGXGMAAREEPGTYRRWGAVRSTAHEGQPVEGTGAVVAHVGRGWTVVEHRGTRRGLVGGERRVRTXPGLGRAGSDDARSVIPLLRALSCRLILHVWMHAHDH

SEQ ID NO: 165302 - protein, 80 aa, Oryza sativa
  Clone ID: PAT_MRT4530_64120C.1.pep
MEGEAASDNLTLLPPRLLESGCATEVEVEDDVQGAGRLVGDGTVGVVEEDDGCSEQPENATDDTNEETPTTAAAAAEPTN

SEQ ID NO: 165303 - protein, 204 aa, Oryza sativa
  unsure (1)..(204): unsure at all Xaa locations
  Clone ID: PAT_MRT4530_64121C.1.pep
GADRQRGRQPTAASSLSTTISPPVAGAVAASWAAAGRPGRAGALLPSRCCRVGQAALPAGHTTAASVRGSATPSCGRPPPQRPGWPXPSHNQPPRPRPKAAATTPARRRAAEPPLPXLSGGAAAELPLPPXQPATPPPPLRAGRPRRAVAEPRPSAALAPGPASPSHRPPPTPRPXGPAEPQLPAVSPPAXMPPPPCPHAAAPP

SEQ ID NO: 165304 - protein, 90 aa, Oryza sativa
  Clone ID: PAT_MRT4530_64122C.1.pep
MKNRQTRITWVAAEMTGATGGGHFSGETAGGRAAAGAKPGANSHTGGESAPRVCQLRRVQSGRRPSKRRRIGEVPGSPDSPASLLHLDPG

SEQ ID NO: 165305 - protein, 549 aa, Oryza sativa
  Clone ID: PAT_MRT4530_64123C.1.pep
MERMSRVAVAVLLLLCLQLQLGISGGGGGGHGARRDDQLVQECSGFCLADLCVRPAARLIHAKKSSSSSQQQQQQQRSRQAGSKAGWPSTSSTPSNPFGLPMLLPPPPPLKDWPPWLDMPPVQGPSSSPSPSPSPAPSPASSAAVAEHAAPPRRGEEHARPRSIALPPASSSGDAGETSRPEVTDGSATRRGGGGGKTNYVLVAAAGASVLLAASAAAFAACYRSSKVVRSVRPWATGLSGQLQRAFVTGVPALRRAELEAACEDFSNVIGSLPEYTMYKGTLSSGVEIAVVSTTKTSPKDWSKKCEAHFRKKITSLSRVNHKNFVNLLGYCEEEQPFTRMMVFEYAPNGTLFEHLHARDEGHLDWPTRLRVAVGVAYCLEHMHQLAPPEIVRTLDASTVYLTDDFAAKISDVGFCEEEMAAAAAAPAMADRESVVHGYGMLLLEMMAGRLAASEGGLVQGWAAALLRGERRLRDVMDPALRGAFHAETVDRLDAVVRSCADRDPRRRPSMADVAARLREITAMPPDAATPKVSPLWWAELEIISTEAA

SEQ ID NO: 165306 - protein, 110 aa, Oryza sativa
  unsure (1)..(110): unsure at all Xaa locations
  Clone ID: PAT_MRT4530_64124C.1.pep
SSEEHLRFKAKRSIHQNSKGHSSSHGPESSSPINHRINKSANTKPKFADDIXAQILGAPSTTMILHRSTDHRCKPKKXWTNFALNNGIKLHTVCIFHFXTTHRGATVDIF

SEQ ID NO: 165307 - protein, 109 aa, Oryza sativa
  Clone ID: PAT_MRT4530_64125C.1.pep
RAAGIGEDKPKTKRKKSPAHVVSSSPVRTQPKQGRESNSAFRRRRRNTKKMAADSLDMSLDDSSPTSTSRPVQIQRPLPAASSRAAPALLPSLSRHHLSGAATATPTRR

SEQ ID NO: 165308 - protein, 55 aa, Oryza sativa
  Clone ID: PAT_MRT4530_64126C.1.pep
ALNFVFVKTLIKNCLLPHYSASGHVSLFPMSVCLKPVSWGRYYARGLTAFQPRLW

SEQ ID NO: 165309 - protein, 184 aa, Oryza sativa
  unsure (1)..(184): unsure at all Xaa locations
  Clone ID: PAT_MRT4530_64127C.1.pep
FFFFFYDALMASSINIPKIQVINNRQTNHFSPFFSSHYPLMAQNSLHPITLLSLSVSPQSHSPHLSQPHIAHLLPPSTQQSNSIPQXPSRSTQQQVRHHWSTVXRPNGTPMXASSVTSXALMVPSRPGAYPGLIYIMTPSTYNETLSPGVSLXVGTLYWEPEHCAGRDTNWGXYGIXFGGLFMV

SEQ ID NO: 165310 - protein, 119 aa, Oryza sativa
  Clone ID: PAT_MRT4530_64128C.1.pep
ASPTAIPAPPRRRYKPWLRRPRPPRTQTKHTTTRRGEHRRRSALGGFASPPPRALGAAAAGAAGLLRAETTAPPRRRATSPPRRRRRTGSHHASTTTGAREVGRPCTTAAVVTEQASRH

SEQ ID NO: 165311 - protein, 288 aa, Oryza sativa
  unsure (1)..(288): unsure at all Xaa locations
  Clone ID: PAT_MRT4530_64129C.1.pep
DVLNFSLADHSQSYVNTYLFLQPPPPPPPSPVQQSPSNQTPSATGSHHVEEEEQPAALAIPVLADLFSFDIKDYLDETEEDTTSEALAPLSDDVKKTLEDISYRLEASSLDSLVVDCGSIRARLHEVQALIPEELTDVLTPAAYFEQHQFKLEKAKQRLVERRERKEIEATIQANRQLVHEEKSKLDQLSEGPIRSNIDRLEARKIELLAQFQECNAEVVLEHKKLADLPXSGEEQKARLKSAIKNVADMTKSLKVIPGTDAQDAQFIEEVEQIGQRAISAIQRYLSQ

SEQ ID NO: 165312 - protein, 344 aa, Oryza sativa
  Clone ID: PAT_MRT4530_6412C.1.pep
MGSLPVSSPECAPGRRVTVAASDLAPLFGAQRRHLDHFFDRLDLSQAAAFAQALVDAPGAVFFTGVGKSGIVARKLAQTLASLGFTRAGFLSPVDALHGDIGSVFPGDLLVLLSKSGASDELLALAPCARAKGAHLISLTSAASGADCPLAAVCDLNVHLPLQAEVCPFGLAPVTSTAIQMVFGDTVVAAIMEARRLSRDQYASNHPAGKIGKSLIFKVKDVMKKQNELPLCKEGDMIMDQLTELTSKGCGCLLVVDDEYHLIGTFTDGDLRRTLKASGQAIFNLTVGEMCNRHPRTITADAMAVQAMEKMESPPSPVQFLPVVDSNNVVCGIITLHGLVSAGL

SEQ ID NO: 165313 - protein, 764 aa, Oryza sativa
  Clone ID: PAT_MRT4530_64130C.1.pep
MSTSASPSAAPSVEYADDEIGIGQALALTIANSAKDEPLMAAATYFWSNTINAFLFNQGPMTPTLIDITMIIGLDVTSSANPMSLNTNNQYDFRTKSIGGWSGYVAAYMGQGSVTPREHVAFLLMWLEKFLFCGSSCGRTTNCQFAAEALESKREFPLGKILLGYLYQMLNNASAKIVVGSVVGAGGPWWLLQSWLNLMVMTVVNRPFVTEAEFPRLEPIVEDDKEDRTHRRCMSYGEYASTPADAGAKLRAELLKDWFCSFYEGFQKDARVWFPYEDSVHLDLPLDFRFKDINHERFQKSREVFSAAISPCILPVGIHQGRNIQVSYEFYHPKNSARQFGICQLPIGLFFADKIQCRGEISSTLMMDRLLNIQGPPLGSIENIELARFRSRNFDRWWGEWKQHLFHQSASMYMTDLFPDVVPQMREPADAGRKRKTKVPAIDPSVLALKKKAKKQKPKPTDDLPALDPSIEQALDEEEIGEDVDQAAAEPPPPSPPVQQSSSDQTPSAIGSHRVEEEEQPAAPAIPLLTLLKLFLRVLADLFSIDIKDYFDETEEDTTSKALAPLSDDVKKTLEDISHRLEASSLGSLVVDCGSIRTRLHEVQALIPEELANVLTPATYLEQHQFKLEKAKQKLAERRERKEIEATIQANRQLVHEEKSKLDQLSEGPIRSNIDRLEARKIELLAQLQECNADLDLEHKKLVDLPQSVEEQKARLKSAIKNVADMTKSLRFISETDAQDAQAIEEVEQIRQRAISAIQRYLSQ

SEQ ID NO: 165314 - protein, 599 aa, Oryza sativa
  Clone ID: PAT_MRT4530_64131C.1.pep
MIISMANPEDFFWEALLKENEAPSPPPVFFDLPATPLANSDGSTDPSSLLDNQLLSYVTRMLMEDEMGSSAAVTNLQCVNRGSTEEANNMLPGSEVVRAFSKGMGEASKLLPRNNSFRTLETVDQVSSDGHCRGGKKKNHDRDEQQLEEELGRSSKLAAMTNAGTEEAGARELLDELMLHAHETCIKDMEKLRIDMDNEAEKTINKKGKKGSSSKVVDLRLLLIQCAQAMATDNQQSAGELLKKIKQHALATGDAMQRVAHYFAKGLEARLAGRGKHLYQNQMRMSLVEYLKVYKLYMAACCFTKVALMFAAMTIMQAVQGKKRLHIVDYGPRCGLHWPDLLRRLGSREDGPPEVRITIVDIPQPAFRPFQRIEEAGHCLSSCANEFRVPFRFQAVVAAKWETVGAEDLHIEPDEVLVVNDLWSFSALMDESIFCDGPNPRDVALRNISKMQPDVFIQGIINGGYGASFLSRFRGALLYYSALFDMLDATTPRDSGLRLALEQNVLGPYALNAIACEGADLVERPEKYKQWQARNHRAGMQQLKLRPDIVDTIRDEVNKYHHKDFLLGEDGQWLLQGWMGRILFAHSAWVRQSQDTSSG

SEQ ID NO: 165315 - protein, 585 aa, Oryza sativa
  unsure (1)..(585): unsure at all Xaa locations
  Clone ID: PAT_MRT4530_64132C.1.pep
KDARIWFXYEDSALLEHPSDFRFEDINHERYQKSREVFSAAISPCILPVGIHQGRNIQVSYEFYHPMSAARQLGMGQLPIGLFFADKIQCRGEISSTLMMDRLLNLHGPPLGSIENIELATFRSRSFDKWWGEWKLHLFHQSASMYMTDLFPNIVPQTTESSPPHQSNSGRDIEYVPGLIPNGGGPSTPVIGYHAPKTSTLLQGLIREPADTGKKRKTRASAVDTSALAPKKKAKSKKTKPTDDLPALDPSIEQALDEEEIGEDVDQAAAEVSDTEKTPSASPKQTPPTPSAPAHFSRLQKKRIAMKKKSAATTLKPAPPPPPPPSSPVQQSSSDQTPSAIGSHHVEEEEQPAAPAIPVLADLFSFDIKDNFDETEEDTTSKAIAPLSNDVKKTLEDISHRLEASSLDSLVVDCGSIRARLHEVQTLIPEELADVLTPAAYLEQHQFKLEKAKQRLVERRERKEIETTFQANQQLVHEEKSKLDQLSEGPIMSNIDRLEARKIELLAQLQECNAELDLEHKKLADLPXFVEEQKARLKSAIKNVADMTKSLKVISGTDAQDAQSIEEVEQIRQRAISAIQCYLSL

SEQ ID NO: 165316 - protein, 190 aa, Oryza sativa
  Clone ID: PAT_MRT4530_64133C.1.pep
VVAHGSWRRGTRAAGRPCVVELLRLPDHDGGRARPPLHRPLPLPLPRGPRRRRRRGAAAALRARPTVRRRASPPARPRWWSPRRRRHRRAAAALREGRHHRRQRSVGSSRPSSSPSPPPPTSPEPAAAAVARAVYRRRRRAPRSRSSTPSRRPVATTSGGEGRGGVGHGCCKRRCRWLQMALIPSLPRSL

SEQ ID NO: 165317 - protein, 136 aa, Oryza sativa
  Clone ID: PAT_MRT4530_64134C.1.pep
MDSSSVEKGSGSIDPDERTASGEPKACTDCHTTKTPLWRGGPSGPKSLCNACGIRYRKKRREALGLDAGEGGAERQEKKKSKRERGEEVTMELRMVGFGKEVVLKQRRRMRRRRRLGEEEKAAILLMALSSGVIYA

SEQ ID NO: 165318 - protein, 68 aa, Oryza sativa
  Clone ID: PAT_MRT4530_64135C.1.pep
MGIRLRPAAFWEGKAAGRDASRTHACVVGWALGSVKLGDKVAGAVVQLDDGGLFGAVPLPTWRGDDET

SEQ ID NO: 165319 - protein, 76 aa, Oryza sativa
  unsure (1)..(76): unsure at all Xaa locations
  Clone ID: PAT_MRT4530_64136C.1.pep
LNAQLKLPYSLHFISYYKSFLFFVMLNFFWSPSSVLFSSVHLAGRFCFPSSVHLSLLSLRCICVFTDQPQXVSTSF

SEQ ID NO: 165320 - protein, 55 aa, Oryza sativa
  Clone ID: PAT_MRT4530_64137C.1.pep
FLLMSSVTSDHKNVLYDLHFKSHMIHSVSLLARQLRSPATVVELVVPAILCIHLR

SEQ ID NO: 165321 - protein, 59 aa, Oryza sativa
  unsure (1)..(59): unsure at all Xaa locations
  Clone ID: PAT_MRT4530_64138C.1.pep
XSLYLSFKLKLLPHLPPKFGLKNYSSYSEPRMVCLLNTNSKVILTTSICHGRATRPMCS

SEQ ID NO: 165322 - protein, 516 aa, Oryza sativa
  Clone ID: PAT_MRT4530_64139C.1.pep
MTEMDRLVRVYYGGRVVEPYVGGHVEFEDMSLKTILFPTHPTLDELRSRVKEVLGWTKDNVEIRFYGRYDVGQGHKYILNVIGQLEWEVYFDLMWMWLRLPVGRPKWRQSFTPWPYNEPDMEKTVAYLFESTATTHAHRDVAYKHYVNEMDCLQPQHIEWLPYHTNEASSLTLNSMCNRDSDYFMYQCPLICFWAVQYHLPHRVMRQFGKKQDWPVEDISTGVELHKYDRVRTKKVKDWGLEHNRYIDEWRTAGRNDRYIETIHQNHLFSEYLRWLHRTYRLFLRPTWTEADKEDDRDSDERRNPYDVRTRVGYQMEHAPLRDRVSRELLRSVNEIGHALQAPRGGEDTENTLRNVLEKVRQRCRKLAARLGCRSVGLDDVYQPGRLPPPLPQSARPSTARHSIRIEVREGVGGSSSSRIKQGRGKGKAPAPPSDDDDDEDEEDEDYVASDAEEIDMSQLPDAPQGTQPTQYNLRSTRAAKKRYTPGSQAIRRQRKKEAEGSANHPGATVGKGGAS

SEQ ID NO: 165323 - protein, 147 aa, Oryza sativa
  Clone ID: PAT_MRT4530_6413C.1.pep
MAASLPANARRKPRACAGAAAAAGARAARREGQAGARAARRGEAAAGARAAGRGGPAGWCGEPAGHDHQAAAATPSSRHAAMRASGGGGDNSSGGAATRVASSIGGSSARRREAETAASQHEHQAAEAPRHGYASTRTRGGAGSMRA

SEQ ID NO: 165324 - protein, 520 aa, Oryza sativa
  Clone ID: PAT_MRT4530_64140C.1.pep
MAIGWHRSQSLASAGLGLHVLLCSSLLLNAVFIAHQFLGASPPATPERLGDGLSWALQAAKEAEDVAAVDCSGHGSVFLDGVTGEDGRPGCECNSCFSGPDCSVRIPNCAADGQGGDPLFLEPYWKRHAAASAVVFSGWHRLSYITTDGHLKSVELDRQIRRLHRAVGNAVVDDKYLVFGTGSTHLINALVYALSPEGNAASPPASVVATVPYFAMYKSQTVMFDGREYRWDGTTAAWANNNSSRNPTRGFIEFVTSPNNPDSTLHEPILAGSSAIVDHAYYWPHLTHIPAPADEDVMLFTTSKLSGHAGSRFGYTRATEFPAACHLQARHVHNDTKADRYTPCRALRRWALVRDEKVASRAISYIEESTVGTSRETQLRVLKILKVILANLHGKEDIFAFGYDVMSSRWRRLNAVVSRSTRISLQKMPPQYCTYFNRIKEPSPAYAWVKCEWVEDDDCYETLLAAGINSLTGTVNEAGTRYTRLSLIKTQDDFDMLLERITEFVDAEKHGRAPAASSSM

SEQ ID NO: 165325 - protein, 81 aa, Oryza sativa
  unsure (1)..(81): unsure at all Xaa locations
  Clone ID: PAT_MRT4530_64141C.1.pep
LGPPSSRCWRGRRSGRWPPSPGRAXAPGGWGSGCPWALAPPPCPGPAXAARSPXSVNKLRFAVRXRWGRYWVGEEPGNSGR

SEQ ID NO: 165326 - protein, 941 aa, Oryza sativa
  Clone ID: PAT_MRT4530_64142C.1.pep
MALLHATTGARELGWANRGHQREEDDDANSPVQRTTTDDDERRPATRFNGGSTWVNNGDGAPAVFGGCEGADGVPLLRCDNDRPFPPLTNNDKLALEEWRAFEKVFERKPDIPEFRDLTHAHGAILDGGINLDQLPEPFQVDGLIKSLEFPSMVTLKLWLQEYAIVHHRPYRVVNSAANRKYTVKCEKPWCKWKVHATKRSSGTWRISRVGKAHSCATAEGSGSHRQLTSNFIANSLCNAIKLQPTLSASALALYIFEVFQYRVKYGKAWRAREEAMKLIYGEWGEAYVRLPTLLQAIKQRNPSMVYHIDTHPDRVVNVDGVTKKIFMRAFWCVGPSIEAFKHCRPVLAINATFLTGKYGGALMTALSADAEDQLVPLAFALVEKENSRDWCWFIDLVRRVVVGQHREVCIISDRHTGIMNAMRTPVPGLPPVHHRWCMRHFSANFHKAGADKHQTKELLRICQIDEKWIFERDVEALRQRIPEGPRKWLDRNGRRWGYLTTNMAKQFNSVLVGVSKHPVTAIVSFTFMKFNDYFVNRHDEAMKRVQLWERWSTKVASKMKLPPYDGEEFVADPNLKIKTRGKRRSKRFKNEMDSGLGGSRRKPPSCVQLDAAPVQNRCSLCNQEGHKKPNCPKRPKKKKSKNKIEVLGRMAKEGQPPTYPALEEYYEARHRGAAIEAGRILQPLRVRTHAPPVFDKRYIPYLRAVGLLGVALVMSRGMPVFNAPALTALVDRWRPETHSLWMWLRLPVGRPKWRQSFTPWPYNEPDMEKTVAYLFESTATAHAHRDVAYKHYVNEMDCLQPQHIEWLPYHTNEASSLTLNSMCNRDSDYFMYDRVRTKKVKDWGLEHNRYIDEWRTAGRNDRTYRLFLRPTWTEADIEKDRDSDERRNPYDVRTRVGYQMEHAPFRDRVSRELLRSVNEMGHALQAPRGGEDTENTLRNV

SEQ ID NO: 165327 - protein, 969 aa, Oryza sativa
  unsure (1)..(969): unsure at all Xaa locations
  Clone ID: PAT_MRT4530_64143C.1.pep
MDRIVRVYYGGRVVEPYVGAHVEFEDMSLKTILFPTHPTLDELRSRVKEVLGWTEDNVEIRFYGRYDVGQGHKYILNVIGQLEWEVYFDLVKESQFRSLEVFASKLVRTVENLDLNKSPSYHYVEKNFVTYSSRRGGGASKTELVREDLEGEGNKKRPLLGNDLGEAGPSKRHCGSDDVDAAREMKRELVQEGLHLSEHLSESVHWSLYGGNPEYTMKVASQYVNPDDYFDVELSGGHDSVSVEVNREEVDEDASVEQYDVEFAEDSDDDRPFPPLTNNDKLALEECRAFEKVFGRKPDIPEFRDLTHAHGAILDGGINLDQLPEPFQVDGLKKGLEFPSMVALKLWLQEYAIVHHRPYRVVNSAANRRYTVKCENPWCKWKVYATKRSSGTWRISRVALYIFEDFQYRVKYVKAWRAREEAMKLIYGEWGEAYVRLPTLLQAIKQRNPSMVYHIDTHPDWVVNVDGVTKKIFMRAFWCFGPSIEAFKHCRPVLAIDATFLTGKYGGALMTALSADAEDQLVPLAFXALVEKENSRDWXGVDKHQTKELLRICQIDEKWIFERDVEALRQRIPEGPRKWLEDELLDKDKWSRAYDRNGRRWGYMTTNMAEQFNSVLVGVRKLPVTAIVSFTFMKCNDYFVNRHDEAVKRVQLGERWSTKVASKMRVQKSKPNKHTSRCFDKQKKTYEVTERGADIEDDRDSDEGRNPYDVRTRVGYQMEHAPLRDRVSRELLGSVNKMGHALQAPRGGEDTENKLRNVLEKVRQRCRKLAARLGCSTLRARKLFGANGRSDLYEVNLFVGSMTYVGGRGRRAITLAPRVGEGGASLAPEAEGFLCGGRAAPALLAPRLGRAAPASARRQKRFRWGEEGGARHPGAVVQEGGAXRGPEAEGCRAGKEGRASXTLAPRSAGXAPLLPGGRTDFAKKLVGGEKVGGARRGGARQPCWHGGMRGGANLAGAPLLPSQHLRTGP

SEQ ID NO: 165328 - protein, 77 aa, Oryza sativa
  Clone ID: PAT_MRT4530_64144C.1.pep
LLLQGRGTHPALIRPPFWPLTGSKVGVRSLVGPMGVPRHVRGHPWQITDRTGRTCPISPDTRRDVGRFAPSQNLGPG

SEQ ID NO: 165329 - protein, 99 aa, Oryza sativa
  Clone ID: PAT_MRT4530_64145C.1.pep
RLFPVCLVRSPSALAPLSRLSSFRGLAGSFLFLACQVSRLASGLLALFLSFLFPPSFGPPAFSLFSSGLFVVSPCSPAFPFFPGFCFGLFFARFFFVSL

SEQ ID NO: 165330 - protein, 62 aa, Oryza sativa
  Clone ID: PAT_MRT4530_64146C.1.pep
MADSPLRARHLTGPPSLLLACSNVPERRGLGRREWDLGFVPRQSTEEEGEARAITAPVCENL

SEQ ID NO: 165331 - protein, 1460 aa, Oryza sativa
  Clone ID: PAT_MRT4530_64147C.1.pep
MSMSIPLNVLEDDKHSIFQGVLVPQESIVDDGSGVNLEIRSSIFVCSGSAVVPAIRSAVVRRSDRWLLRRDRKRKIKVNCVIGKPQEVLGKRTLQGQADRQKRDRRMKKQGDGLMDRLVRVYYGGRVVEPYVGAHVEFEDMSLKTILFPTHPTLDELRSRVKEVLGWTEDNVEIRFYGRYDVGQGHKYILNVIGQLEWEVYFDLKNFVTYYSRRGGGASKSELVREDLEGEGEKKRPLLGNDLWEAGPSKRYCGTDDVDAARVMKRELVQEGLDLSEHLSASVHWSSYGVNPEYPTEVAGQYVNPDDYFYVELSGGHDSVSVEVNRDDVDEEASVEQYDVELAEDSDDDRPFPPLTNNDKLALEECRAFEKVFGRKPDIPEFRDLTHAHGALLDGGINLDQLLEPFQVDGLRKGLEFPSMVALKLWLQEYAIVHHRPYRVVNSAANRRYTIKCENPRCKWKVHATKRSSGTWRISRVGKKHSCATAEGSGSHRQLTSKFIANRLFNAIKLQPTLSASALALYIFEVFQYRVKYGKAWRAREEAMKLIYGEWGEAYVRLPTLLQAIKQRNPSMIYHIDTHPDRVVNVDVVTKKIFMRAFWCFGPSIEAFKHCRPVLAIDATFLTGKYGGALMTALSADAEDQLVPLAFALVEKENSRDWEVCIISDRHAGIMNAMTTPIPGLPPVHHRWCMRHFSANFHKAGADKYQTKELLRICQIDEKWIFERDVEALRQRIPEGPRKWLEDELLDKDKWSRAYDRNGRRWGYMTTNMAEQFNSVLVGVHKLPVTAIVSFTFMKCNDYFVNRHDEALKRVQLGQRWSTKVDSKMKVQKSKANKHTARCFDKQKKTYEVTERGGITRGGVRFGARAFKVEGEGNSCSCQRPLLYHMPCSHLIHVYMIHAIDEESPNRMPYQFSSRAVVNTWASRFEPYLDPTQWPPYDGEEFVADPNLKIKTRGKRRSKRFKNEMDSGLGGSGRKPPSCVQLDAAPVQNDARCVTRRVLQPLRVRAHAPPVFDDRGMPVFNAPALTALVDRWRPETHSFHLPSGEMTITLQDVAMILALPLQGHAVTGRTETPGWHAQMWMWLRLPVGRPKWRQSFTPWPYNEPDMEKTVAYLFESTATAHAHQNVAYKHYVNEMDCLQPQHCPLICFWAVEYHLPHRVMRQFGKKQDWPVEDISTGVELHKYDRVRTKKVKDWGLEHNRYIDEWRTAGRNDRTYRLFLRPTWTEADIEDDRDSDEGRNPYDVRTRVGYQMEHAPLRDRVSRELLRSVNEMGHTLQAPRGGEDTENTLRNVLEKVRQRCRKLAARLGCRSVGLDDVYQPGRLPPPLPQSARPSIARHSIRIEEREGVGGSSSSRIKQGRGKGKAPAPPSDDDDDEDEEDEDYVAPDAEEIDMSQLPDAPQGTQPTQYNLRSTRAAKKREAEGGANHPGAAVGEGGASQCREAEGFRAGGGRRQLPWRRGP

SEQ ID NO: 165332 - protein, 538 aa, Oryza sativa
  Clone ID: PAT_MRT4530_64148C.1.pep
MGVLGDGSGWCFCSGGAKLERIKNSVLAAKGAAVAAVSFPAGGGGGGRGGSGFLIHRALLLTTHGTIPSAAAAAAAEVRLSHGRLPARLVPQRFFITSPILDLTIVGLDVVNDELNSHGQQPHFLKTCLNPSLDLGSTVLLLGHTKRKDLTIGEGKVIITTDNLIKFSTDEVAWYPGSAGFDMHGNLAFMVCDPMKLAPSTPTGYASASSAALLSAKKDVPTQFGMPIPAVCGWLKQHWNGNLEDVSKPMMPPARLISTGQRSECSSVGRLNYIKTMEREGGDGMSSSQIPPRLTQHHGSCSSASAKISCGENDSVDSHSIHEQQDLTSQMHESKIEQSASLMDNNFPPGHPRSIRLPLPLKHMMSHENKIKPNPSFSHEAQLANVRINCGTLHNVAYQENCWSEAQSSSSPPDISELGDERGGFSSGEETMYSAETRESRNIPSPKEKNPKMVGRSQSFVNHSKWDSPKSVESSKGAPSKSHTFIPLRKPHLQAAAISQKSQDFFSPTVSSSMKKRNLSQIPMKPRQSAQVTSKWII

SEQ ID NO: 165333 - protein, 1068 aa, Oryza sativa
  unsure (1)..(1068): unsure at all Xaa locations
  Clone ID: PAT_MRT4530_64149C.1.pep
MLPESYFQPADLIVPISDVAGNGKGGFWFRIQNASDSHSRLVTIPSSTYRAVLEVFVSPHSNEEYWCXNPPGIDLRENNLNTGRGNEVYREVVVSVDHRLEVSVPLFRLLQRTVAARRFHARVAALGAFDLPTYDVELTPFLGLLVDSNAHEIGLSVFDGIAEWLVDANLHLWLDPSTSDVHAALGAYQTPRLKISRHYSTRLLEGRFKIKAKRKSSFSGWVKSSFGNFTTEVEAELKATSLVEFTGDGRNKTVSLEAKQETKTLIRAGDTRKVIGRVEREAKYPLSLFAETEDGENGTSVVTVSLTHGLSVETEVETKALESKEKLDDAQAAQGWMVLLDHDVLNGSVTTTQAYRFSDDEREYERAIDVVDGAVLSDNVTESFSALAAAAADARRRRFHAGIAALIRFRPHRRDQDYCFSSEGEGKVSTGDDLLDALLEVFPQLNFLTLVEVCMEYKNDIDGAADYIIHNVLPSIPDNNDAHANEGPASVDNDADSVQSYLANKYTAEQEEEEEEEEEEEEEEEEEEEDEDDDEEEEDEDDEEEDEDDEEEDRLMEENSDCLVAIDLNSKPGTSAFDDDLVTHDDGLPAMNIQSSYPVRLELLDNAIADEIDKKVTLMSNVTAINQMLEDIKLKEEKTKQAVLEATQAGNDIFVKVAGEVFAEQSILASEAHGLQARLSNISEERNNCALIIDEMRYTLQNRFAEAEVETVAAEKKKVERETLAEKMLNEQELILDATKERSKMLEQQVRENAKLRELLMDRGQIVDALQGEMLGIFDKISQLQLRVDKQLPEPLLSSMSSSVNSADNIAQLQCRVDDPQHSVDDSLQLASPRLSSSFKSTDSTAQAHCRVDEPQISVDESLLPVDECEQLKLILPRLSSSVMSAQSQYRVDEPLLPVDEVLQLASSSLSSSLKSGDNIAQLLGVLDVHLPVDELLQLPSLILSSSVKSSDSIAQFQQKADADEMLQSSSLASSEKPATFKNWSSASDTITQFQQRANADESLPLPSSSLASSEKPATFKSTWSSAAESNSVFSGDEEIDDASFHDSIDLDDSWDLVDDEAIYMCAN

SEQ ID NO: 165334 - protein, 39 aa, Oryza sativa
  Clone ID: PAT_MRT4530_6414C.1.pep
ERNMGQSQALLSFKEPCIYGIDQRYYGAQSIITTLGGVL

SEQ ID NO: 165335 - protein, 1131 aa, Oryza sativa
  unsure (1)..(1131): unsure at all Xaa locations
  Clone ID: PAT_MRT4530_64150C.1.pep
MSLKTILFPTHPTLDELRSRVKEVLGWTEDNVEIRFYGRYDVGQGHKYILNVIGQLEWEVYFDLVXESQFRSLEVFASXLVRTVENLDLNNSPXSYHYVEKNFVTYYSRRGGGASKSELVREDLEGEGEKKRPLLGNDLWEAGPSKRHCGTDDVDAARVMKRELVQEGLDLSEHLSASVHWSSYGVNPEYPTEVAGQYMNPDDYFDVELSGGHDSVSVEVNRDDVDEEASVEQYDVEFAEDSDDDRPFPPLTNNDKLALEECRAFEKVFGRKPDIPEFRDLTHAHGALLDGGINLDQLPEPFQVDGLRKGLEFPSMVALKLWLQEYAIVHHRPYRVVNSAANRRYTVKCENPRCKWKVHATKRSSGTWRISRVGKEHSCATAEGSGSHRQLTSKFIANRLCNAIKLQPTLSASALALYIFKVFQYRVKYGKAWRAREEAMKLIYGEXGEAYVRLPTLLQAIKQRNPSMVYHVDTHPDRVVNVDGVTKKIFMRAFWCFGPSIEAFKHCRPVLAIDATFLTGKYGGALMTALSADAEDQLVPLAFALVEKENSRDWCWFIDLVRRVVVGPHREVCIISDRHAGIMNAMMTPVPGLPSVYHRWCMRHFSANFHKAGADKHQTKELLRICQIDEKXIFERDVEALKQRIPEGPRKWLEDELLDKDKWSRAYDRNGRRWGYMTTNMAEQFNSVLVGVRKLPVTAIVSFTFMXCNDYSVNRHDEALKRVQLGQRWSTKVDSKMKVQKSKANKAXNEPVGRPKWRQSFTPWPYNEPDMEKTVAYLFESTATAHAHRDVAYKHYVNEMDCLQPQHSLQLLQIEWLPYHTNEASSLTLNSMCNRDSDYFMYQCPLICFWAVEYHLPHRVMRQFGKKQDWPVEDISIGVELHKYDRVRTKKVKDWGLEHNRYIDEWRTAGRNDRYIETIHQNHLFSEYLRWLYRTYRLFLRPTWTEADIEDDRDSDEGRNPYDVRTRVGYQMEHVPLRDRVSRELLRSVNEMGHALQAPRGGEDTENTLRNVLEKVRQRCRKLAARLGCRSVGLDDVYQPGRLPPPLPQSARPSTARHSIRIEEREGVGGSSSSRIKQGRGKGKAPAPPSDDDDDEDEEDEDYVAPDAEEIDMSQLPDAXPQGTQPTQYNL

SEQ ID NO: 165336 - protein, 88 aa, Oryza sativa
  Clone ID: PAT_MRT4530_64151C.1.pep
EGTNPAFCPHTGTHTLLRFFYRGNIYLYGDKKGHLTYNWGAHGGMLLLHAALDYSFAAGSQSGGPVLAGGARFTRKSRGNLRGGREFL

SEQ ID NO: 165337 - protein, 134 aa, Oryza sativa
  Clone ID: PAT_MRT4530_64152C.1.pep
HETAQLPRQSKVALQRSNAGVEPAAASVRRCGGQGAEALGDVVAEHGAVHDVDRPLVLPLVVAEPVRLGRRHRPVEHVVVQEHHPPLRGLRVIELLLALEGLRLDLRLHAEAVGEAHRDDGRAVLAVLGIREER

SEQ ID NO: 165338 - protein, 898 aa, Oryza sativa
  Clone ID: PAT_MRT4530_64153C.1.pep
MAAPATLASCPCHRGTRAVVEMDRLVHVYYGGRVVEPYVGGHVEFEDMSLKTILFPTHPTLDELRGASKSELVREDLEGEGEKKRPLLGNDLWEAGPSKRHCGTDDVDAARVMKRELVQEGLDLSEHLSASVHWSSYGVNPEYPTEVAGQYVNPDDYFDVELSGGHDSVSVKVNRDDVDEEASVEQYDVEFAEDSDDDRPFPPLTNNDKLALEECRAFEKVFGRKPDIPEFRDLTHAHGALLDGGINLDQLPEPFQVDGLRKGLEFPSMVALKLWLQEYAIVHHRPYRVVNSAANRRYTVKCENPRCKWKVHATKRSSGTWRISRVGKEHSCATAEGSGSHRQLTSKFIANRLCNAIKLQPTLSASALALYIFEVFQYRVKYGKAWRAREEAMKLIYGEWGEAYVCLPTLLQAIKQRNPSMVYHIDTHPDRVVNVDGVTKKIFMRAFWCFGPSIEAFKHCRPVLAIDATFLTGKYGGALMTALSADAEDQLVPLAFALVEKENSRDWCWFIDLVRRVVVGPHREVCIISDRHAGIMNAMMTPVPGLPSVHHRWCMRHFSANFHKAGADKHQTKELLRICQIDEKWIFERDVEALRQRIPEGPRKWLEDELLDKDKWSRAYDRNGRRWGYMTTNMAEQFNSVLVGVRKLPVTAIVSFTFMKCNDYFVNRHDEALKRVQLGQRWSTKVDSKMKVQKSKANKHTARCFDKQKKTYEVTERGGITRGGVRFGARAFKVEGISQPNAVSVLFKSRCEHVYQPGRLPPPLPQSARPSTARHSIRIEVRERVGGSSSSRIKQGRGKGKAPAPPSDDDDDEDEEDEDYVAPDAEEIDMSQLPDAPQGTQPTQYNLRSTRAAKKREAKGGANHPGAAVGKGGASQCREAEGFRAGGGRRQLPWRRSP

SEQ ID NO: 165339 - protein, 65 aa, Oryza sativa
  Clone ID: PAT_MRT4530_64154C.1.pep
MMRSEEAEDGDRCPVGGRAPNTHKAPEKSHPHPHPPHKRIDAENQSALDFVVPRPRGIGTQLVLG

SEQ ID NO: 165340 - protein, 129 aa, Oryza sativa
  Clone ID: PAT_MRT4530_64155C.1.pep
TRRGNAAYREVVVSVDHRFVGSFVPFPVIYTGGINPLFWQPVAALGAFDLPTYDVELTPFLGLLVDSNAHEIGLSVFDGIAEWLVDANLHLWLDPSTSDVHAALGAYQTPRLKISRHYSTRLLEGRFKI

SEQ ID NO: 165341 - protein, 678 aa, Oryza sativa
  Clone ID: PAT_MRT4530_64156C.1.pep
MAAPATLAPCPCHRGTRAVVEMDRLVRVYYGGRVVEPYVGAHVEFEDMSLKTILFPTYPTLDELRSRVKEVLGWTEDNVEIRFYGRYDVGQGHKYILNVIGQLEWEVYFDLVKESQFRSLEVLASKLVRTVENLDLNKSPSYHYVEKNFVTYYSRRGGGASKTELVREDLEGEGEKKRPLLGNDLWEAGPSKRHCGSDDVDAAREMKRELVQEGLDLSEHLSASVHWSSYGVNPEYPTEVAGQYVNPDDYFDVELSGGHDSVSVEVNRNDVDEEASVEQYDIEFAEDSDDDRPFPPLTNNDKLALEECRAFEKFGKKQDWPVEDISTGVELHKYDRVRTKKVKDWGLEHNRYIDEWRTAERNDRTYRLFLRPTWTEADIEDDRDFDEGRNPYDIRTRVGYQMEHAPLRDRVSRELLRSVNEMGHALQAPRGGEDTENTLRNVLEKVRQRCRKLAARLGCKSVGLDDVYQPRRLPPPLPHSARPSTARHSIRTEEREEVGGSSSSRIPQGRGKGKAPAPPSDDDDDDDDEDEDYVAPDAEEIDMSQLPDAPQGTQPTQYNLRSTRAAKKREAEGGANHPSAAVGEGGASQCREAEGFRAGGRAAPTTLAPWSMRAAPAEVRRQKGFDGRRRGAPATLAPRSGGGGASRCLEAEAKILRGRRKLVGPAEEGRASHAGAVV

SEQ ID NO: 165342 - protein, 109 aa, Oryza sativa
  Clone ID: PAT_MRT4530_64157C.1.pep
SSSTAGSSSSAKGEGKVSTGDDLLDALLEVFPQLNFLTLVEVCMEYKNDIDGAADYIIHNVLPSIPDNNDAHANEGPASVDNDADSVQSYLANKYTAEQEEEDEEEAEE

SEQ ID NO: 165343 - protein, 1164 aa, Oryza sativa
  unsure (1)..(1164): unsure at all Xaa locations
  Clone ID: PAT_MRT4530_64158C.1.pep
MAAPATLAPCPCHRGTRAVVEMDRLVRVYYGGRVVEPYVGAHVEFEDMSLKTILFPTHPTLDELRSRVKEVLGWTEDXVEIRFYGRYDVGQGHKGXASKTELVQEDLEGEGEKKRPLLGNDLWETGPSKRHCGTDDVDAVREMKRELVQERLDLSEHLSASVHWSSYGGNPEYPTEVAGQYVNPDDYFDVELSGGHDSVSVEVNRDDVDEEASVEQYDVEFAEDSDDDRPFPPLTNNDKLALEECHAFEKVFGRKPDIPEFRDLTHAHGALLDGGINLNQLPEPFQVDGLRKGLEFLSMVALKLWLQEYAIVHHRPYRVVNSAANRRVKYGKAWRAQEEAMKLIYGEWGEAYVRLPTLLQAIKQRNPSMVYHIDTHLDRVVNVDGVTKKIFMRVFWCFGPSIEAFKHCRPVLAIDATFLTGKYGGALMTALSADAEDQLVPLAFALVEKENSRDWCWFIDLVRRVVVGPHREGCVEALRQRIPEGPRKWLEDELLDKDNWSRAYDRNGRRWGYMTTNMAEQFNSVLVGVRKLPVTAIVSFTFMKCNDYFVNRHDEALKRVQVGQRWSTKVDSKMKVQKSKVNKHTARCFDKQKKTYEVTERGGITRGGVRFGARAFKVEGEVNSCSCQRPLLYHMPCSHLIHVYLIHAIDEESPNRMPYQFSSRAVVNTWASRFEPYLDPTQWPSYDGEEFVADPNLKIKKIGKRRSKRFKNEMDSGLGGSGRKPPSCIQLDAAPVQNRCSLCHQEGHKKTKCPKRPKKKKSKKNISVREVLQPLRVRAHAPQCSTIGVLFPNAGGDIASAIWIPLVANLGDLGRFSWGSAVLAWTYGQLCEACCRQALSSNMSGCVLLIQLWMWLRLPVGRPKWRQSFTPWPYNEPDMEKRVAYLFESTATAHAHRDVAYKHYVNEMDCLQPQHCPLICFWAVEYHLPHRVMRQFGKKQDWPVEDISTGVELRKYDRVRTKKSRELLRSVNEMGHALQAPRGGEDTENTLRTVLEKVRQRCRKLAARLGCRSVGLDDVYQPRRLPPPLPQSARPSTARHSIRIEEREGVGGSSSSRIPQGRGKGKAPAPPSDDDDDEDEEDEDYVAPDAEEIDMSQLPDAPQGTQPTQYNLRSTRAAKKREAEGGANHPGAAVEEGGASQCREAEGFRAXGGGRRQLPWRRGP

SEQ ID NO: 165344 - protein, 97 aa, Oryza sativa
  Clone ID: PAT_MRT4530_64159C.1.pep
MAAAAVMQPNPRGGGRRLRIRAWGGHRWIGRSRRVPPRRRRCPPYPVLPRQMRAADAVAAHHRSRLCPPHAVSSLSLREERREEAYLAQLQLNLHLS

SEQ ID NO: 165345 - protein, 56 aa, Oryza sativa
  unsure (1)..(56): unsure at all Xaa locations
  Clone ID: PAT_MRT4530_6415C.1.pep
WYTTLRLLLVALQLPFTTPCVWCLRNGVLNMYMWVREVTKYSSXYQLICDMMIXLV

SEQ ID NO: 165346 - protein, 605 aa, Oryza sativa
  Clone ID: PAT_MRT4530_64160C.1.pep
MSLKTILFPTHPTLDELRSRVKEVLGWTEDNVEIRFYGRYDVGQGHKYILNVIGQLEWEVYFDLVKESQFRSLEVFASKLVRTVENLNLNKSPSYHYVEKNFVTYSSHREGGASKTELVREDLEGEGDKKRPLLGNDLGEAGSSKRHCGTDDMDAAREMKRELVQKGLDLSEHLSESVHWLSYGGNPEYPTEVAGQYVNPDDYFDVELSGGHDSVSVEVNREEVDEEASVEQYDVEFAEDSDDDRPLRGHAVTGRTENPGWRAQVEQLFGIPLNIEQGQGGKKKQNGIPLSWLSQNFSHLDDDAEPWRVECYARAYILHLLGGVLFPDAGGDIASVIWIPLVANLGDLGHFSWGSAVLAWTYRQLCEACCRQARSSNMSGCVLLIQLWMWLRLPVGRPKWRQSFTPCPYNEPDMEKTVAYLFESTTTAHAHRDVAYKHHVNEMDCLQPQHSRELLKSVNEMGHALQAPRGGEDTENTLRRARLGCRSVGLDDVYQPRRLPPPLPQSARPSTARHSIRIEEREEVGGSSSSRIPQGRGKEKAPAPPSDDDDDDEEEDENYVALDAEEIDMSQLPDAPQGTQSTQYNLRSTRTAKKRYTPGSQAIRR

SEQ ID NO: 165347 - protein, 62 aa, Oryza sativa
  Clone ID: PAT_MRT4530_64161C.1.pep
MSHLNTENPFAGMCTTLRAKSNWYDEAATRTFQDGFAHLLLLLANTECSHQHPNAMAPRSTQ

SEQ ID NO: 165348 - protein, 110 aa, Oryza sativa
  unsure (1)..(110): unsure at all Xaa locations
  Clone ID: PAT_MRT4530_64162C.1.pep
PYTDGPTNNICMQKSKVHHRSLNCTXCVIPVPKLANRPFRSSNLFDCVIPVSKLADYSFRSSNLFSCVTPVPKQYGLKTLYQKFRDRGDTTEQVGGPKRVICKFRDRDLR

SEQ ID NO: 165349 - protein, 1105 aa, Oryza sativa
  Clone ID: PAT_MRT4530_64163C.1.pep
MAAPATLAPCPCHRGTPPHLPTSNPLHLNSFFAGFFVEIKEKEECRAFEKVFGRKPDIPEFRDLTHAHGALLDGGINLDQLPEPFQVDGLRKDLEFPSMVALKLWLQEYAIVHHRPYRVVNSATNRRYTVKCENPRCKWKVHATKRSSGTWRISRVLQPLRVRAHAPPVFDDRYIPYLRAAGLLGVALVVSRGMPVFNAPALTALVDRWRPETHSFHLPSGEMTITLQDVAMILALPLQGHVVTGRTETPGWRAQVEQLFGIPLNIEQGQGGKKKQNGIPLSWLSQNFSHLDDDAEPWRVECYARAYILHLLGGVLFPNAGGDIASAIWIPLVANLGDLGRFSWGSAVLAWTYRQLCEACCRQALSSNMSGCVLLIQLWMGLRLPVGRPKWRQSFTPWPYNEPDMEKTVAYLFESTATAHAHRDVAYKHYVNEMDCLQPQHIEWLPYHTNEASSLSLNSMCNRDSDYFMYQCPLVCFWAVEYHLPHRVMRQFGKKQDWPVEDISTGVKLHKVRTKKVKDWGLEHNRYIDEWRTAGRNDRYIETIHQNHLFSEYLRWLHRTYRLFLRPTWTEADIEDDHDSDEGRNPYDVRTRVGYQMEHAPLRDRVSRELLRNVNEMGHALQAPRGGEDTENTLHNVLEEVEGGTNHPGTVVGEGGASQCREAEGFRAGGRAVPATLAPWSMRAAPAEAWRQKGFDGGGGGRQPPWRRGLGGRQPLPGGRTDLAKILRGEKVGGARRGGARQPCWRRGMRGGATLAGAPFGLVSTSTTALLPRWHGHGASVAGATMLGGNGGRLAVAVTVEAVATSVDAGKDSGASLGRQAEGMVDGCIWPAQHRLEVGSEIGLAQRGAADGSGGRLILRGADGGDGGRFGARDAAGGGGGDLGVKRSCRRGFAGGERQVKTQTGLGRSDNDGSFPLLRVLACCLTPSRASPFCGKPNEDANAHLQQFLEICSTYTIKGVSPDTVRLRLFPFSLLGRVKKWFYANRAAVNTWDKCSTAFLSILFLMGKTNALRGRISSFQQTRDKSIPEAWERLQEYVAACPHHGMYDWLILQNFYNGLTPMSRDHLDVVARGAFFSKMVQGAVDLIQKMVSNMGWSEERLQTRQ

SEQ ID NO: 165350 - protein, 93 aa, Oryza sativa
  unsure (1)..(93): unsure at all Xaa locations
  Clone ID: PAT_MRT4530_64164C.1.pep
VRNLHESLRAPTLTRPTLRLCTACSSNRAVGSLTGGFHDCLTPCSMEKNVLLFAEEQPHQVHLALPTXQGSFFTSVSIPXHKGLPRIRLKAHR

SEQ ID NO: 165351 - protein, 64 aa, Oryza sativa
  Clone ID: PAT_MRT4530_64165C.1.pep
MAVAWSPESTMRKESCKGRASKDCHGSGEGKYGSEIRIPTLLGEWQGCGGCAAPARDGPIMARI

SEQ ID NO: 165352 - protein, 115 aa, Oryza sativa
  Clone ID: PAT_MRT4530_64166C.1.pep
MIPATLFGGHHFLSVSNYSPDGHERTLTLKKRFSEEQIIGFLQQAEAGVAIKELCRQHGFSDASFYNWRAKFGGMSVPDAKRLKELEAENAKLKRLLAESILDAEALKAALGRKR

SEQ ID NO: 165353 - protein, 153 aa, Oryza sativa
  Clone ID: PAT_MRT4530_64167C.1.pep
AVVVGGDDSMQWSWTALAAPRLSLPPWRGCGQKTAAFDYDEAEVEVLLHAAQQIPLMLNSSAASTRSCPNHRIRSRSGLMLSPPPRRDGRNGGVFCSVEGGGMAGEGGDKIMVGKLGKELCMRDTELRAMHTLEEHVQPRSTLAALNGLHLDL

SEQ ID NO: 165354 - protein, 78 aa, Oryza sativa
  Clone ID: PAT_MRT4530_64168C.1.pep
QKPRFFFKWFGPPGSAWGLVNLNFPPNGVEIGGAFGGKKTFVGGPKPGIFFWNPSFRGAPFSFPFGSGLPFAQEINFG

SEQ ID NO: 165355 - protein, 92 aa, Oryza sativa
  Clone ID: PAT_MRT4530_64169C.1.pep
MDGANHRTVQHVRTCGDCISVGIEPRFFDETYIEVKKVCLGGCGGNNLGGMDEDAGTGIPMLPSLVLAEIRPKCIASISMAFPSGTHGSPLL

SEQ ID NO: 165356 - protein, 441 aa, Oryza sativa
  Clone ID: PAT_MRT4530_6416C.1.pep
MAPTRRILGASPPSYDQIIIYNLTNQNDLSCDVGCKDEQFTTELHHGGFFSGVGSSRIYLDEKVDWFDYCDSDTWSSLWLDDFIEQLGYDMSEKAKVYWLLPGKTFSDGLRRINSDASTNSMVALAPRFRTLLLYVDPQDILESINWDDVALSTPASIPIVASRERSTMNRKDSDVKPIEGHDIDDDDDIDVDPDFVDSDYEADKGDDDAFDNCVEIEEVASSKMVVKLPEHDSDDEGLLLPESSDEDNEGIKLKFKNFVAAVDMESPIFKVGMLFSDAIEVRQAIKQYSVKNRVAIKFTRNTKKKIEAKVESRASWGWFLNTLKEDLLIDNTGPYTIMTDRQKGLVPAVRDKFSDSEQRFCVRHLYQNFHVLYKGETLKNQLWAIARSSTIPEWEFNMEKMKSLSKDAYAYLEEIPPNQWCRAFFSDFPKCDILLNNNSE

SEQ ID NO: 165357 - protein, 48 aa, Oryza sativa
  Clone ID: PAT_MRT4530_64170C.1.pep
NYGGSVEVVAVDGEDCLVRYEGPESIGSGIKAAIKEKFPDITNVVFLQ

SEQ ID NO: 165358 - protein, 54 aa, Oryza sativa
  Clone ID: PAT_MRT4530_64171C.1.pep
KFVYKCYPRQIPFRQLANSASYLIFICGVNLLSSSTTELLFHLSWVQFLAMLVR

SEQ ID NO: 165359 - protein, 181 aa, Oryza sativa
  Clone ID: PAT_MRT4530_64172C.1.pep
MPLLLQLALAVAVAVAMVGTATTTTTHTRFYMHDTVTASASGGGPAATAVRVVRGVAAAALPGDAVNRFGDLYAIDDPLTDGADAASSAAVGRARGFYMFSSRTDSALLFSATMEFTAGVHRGGAVSVLARDAILDEVRELPVVGGAGVLRGAAGYGLLRTHSFNATTNNAVLQIDLYLSV

SEQ ID NO: 165360 - protein, 89 aa, Oryza sativa
  Clone ID: PAT_MRT4530_64173C.1.pep
FEADITVDGGEIHKTINGYRHYLNITCTRTLELDKRHCYIGRGGEFIKRSFRRYLVIITSTYRHDNIRIQLGLLTLIPYVVTRENDFFF

SEQ ID NO: 165361 - protein, 275 aa, Oryza sativa
  Clone ID: PAT_MRT4530_64174C.1.pep
MEASLTVAGAGAAALSLRPQIRLRITQATPLMPPRRLQSGPSKIQTSGARAHLAAAPASTPPAAGGGLYSAETYELTAENVDRVLDDVRPYLIADGGDVTVASVEDGVISLKLEGACGSCPSSTTTMKMGIERVLKEKFGDAVKDIRQVFDDDQQPAEPTPQAVNGHLDILRPAIANYGGSVEVVSVDGEDCLVRYEGPESIGSGIKAAIKEKFPDITNVVLLWFVTESQMEDTDQELCTVAVEMMSSGKLKPCRHLLFYQDSLHREASIKMVHV

SEQ ID NO: 165362 - protein, 762 aa, Oryza sativa
  Clone ID: PAT_MRT4530_64175C.1.pep
MALHQTLLLLLFVSIAIHRAVAQTTTSTAVRGDGNRFVTYSFPSFANALLHLQANLTVLNNASISQGALQITPDSSNSADGYLVNQTGRVFFSTPFTLWSPAAGGGGNGNGNGTYVASFNMVFRVNIFRTNTSDPGEGVAFVVASGLDPPPPGSYSGFLGLTNASTDGDDANRFVALELDTVKQGYDPDDNHVGLDVNGVRSVKAVPLAPFGIKLGAANASNFFVWVDYDGTSRHVWMYMARSDDGVPSPKPPSPVLDAPLDLSAFVAEKAYFGFSASTGTRFQLNCLHMWNMTVELLDDGSRSSGGGQTRRKLGLGVGVPCGVAALATGAVVAFLYIKKRRRRVGDDPESLSSTAAFKFNKSSINLRSLAGTPKEFEYTELRKGTEDFAAKNKLGQGGYGVVYKAVVAGDSDGESVEVAVKQFSAANTKGQEDFLAELSIINRLRHRNLVRLRGWCHQNGVLLLVYDYMPNGSLDKHLFGGAAVAPVLSWEQRYNIVAGVAAALNYLHHEYDQRVIHRDIKPSNIMLDSAFGARLGDFGLARALDSDKTSYTEMVGVPGTMGYIAPECFHTGRATRESDVFGLGAVLLEVACGRRVSFGAGGDGGAIGGCSQLLEWVWRLHGAGRILDAVDPKLAGGAFDADDADRLLLLGLACSHPDPGARPTAKAVVQVLARAVPAPAVPPSKPAFMWPALSGADCDDSDGGGAGEMSSRHSARTTSTEQTSSTYYASSSSYSSHGCTRTQVTSSGDAIADETRYMSIG

SEQ ID NO: 165363 - protein, 94 aa, Oryza sativa
  Clone ID: PAT_MRT4530_64176C.1.pep
YKNGRLAYSRKNQVCQSWLLDTCKTNHEIENQSETRSRSALEKKWKQSEAIHRIFQQGHDGAWSINHRTYGASVEVWNPWRNTPGRVLHEKFCR

SEQ ID NO: 165364 - protein, 90 aa, Oryza sativa
  Clone ID: PAT_MRT4530_64177C.1.pep
LLCIGPRGGQELHGRSGRILSCRECGWCRRSNLSKLLACWIMKKENAIRYHSGDRIYQAVQSRNIIKKITSVVDDDDTEKRRSVGKAESR

SEQ ID NO: 165365 - protein, 68 aa, Oryza sativa
  Clone ID: PAT_MRT4530_64178C.1.pep
VRLLAAPTVQMVICYPQQYSSSSSFSLAGHVISFILHMSSNPRFTSFIIVQYLLPHLSYLIEIRPQFL

SEQ ID NO: 165366 - protein, 1582 aa, Oryza sativa
  Clone ID: PAT_MRT4530_64179C.1.pep
MDRLVRVYYGGRVVEPYVGGHVEFEDMSLKTILFPTHPTLDELRSRVKEVLGWTEDNVEIRFYGRYDVGQGHKYILNVIGQLEWEVYFDLVKESQFRSLEVFASKLVRTVENLDLNKSHSYHYVEKNFVTYYSRRGGGASKSELVREDLEGEGEKKRPLLGNDLWEAGPSKRHCGTDDVDAARVMKRELVQEGLDLSEHLSASVHWSSYGVNPEYPTEVAGQYVNPDDYFYVELSGGHDSVSVEVNRDDVDEEASVEQYDVEFAEDSDDDRPFPPLTNNDKLALEECRAFEKVFGRKPDIPEFRDLTHAHGALVDGGINLDQLPEPFQLDGLRKGLEFPSMVALKLWLQEYAIVHHRPYRVVNSAANRRYTVKCENPRCKWKVHATKRSSGTWRISRVFQYRVKYGKAWRAREEAMKLIYGEWGEAYVRLPTLLQAIKQRNPSMVYHIDTHPDRVVNVDGVTKKIFMRAFWCFGPSIEAFKHCRPVLAIDATFLTGKYGGALMTALSADAEDQLVPLAFALVEKENSRDWCWFIDLVRRVVVGPHREVCIISDRHAGIMNAMMTPVPGLPSVHHRWYMRHFSANFHKAGADKHQTKELFPLKKDINGQIDEKWIFERDVEALRQRIPEGPRKWLEDELLDKDKWSRAYDRNDRRWGYMTTNMAEQFNSVLVGVRKLPVTAIVSFTFMKCNDYFVNRHDEALKRVQLGQRWSTKVDSKMKVQESKANKHTARCFDKQKKTYEVTERGGITRGGVRFGARAFKVEGEGNSCSCQRPLLYHMPCSHLIHVYLIHAIDKESPNRMPYQFSSRAVVNTWASRFEPYLDPTQWPSYDGEEFVADPNLKIKTRGKRRSKRFKNEMDSGLGGSGRKPPSCVQLDAAPVQNRCSLCHQEGHKKTKCPKRPKKKKSKKNLSVREVLQPLRVRAHAPPVFDDRYIPYLRAAGLLGVALVVSRGMPVFNAPALTALVDRWRPETHSFHLPSGEMTITLQDVAMILALPLRGHAVTGKTDTPGWHAQVQQLFGIPLNIEQGQGGKKKQNGIPLSWLSQNFSHLDDDAEPWRVECYARAYILHLLGGVLFPDAGGDIASAIWIPLVANLGDLGRFSWGSAVLVWTYRQLCEACCRQAPSSNMSGCVLLIQMWMWLRLPVGRPKWRQSFTPWPYNEPDMEKTVAYLFESTATAHAHRDVAYKHYVNEMDCLQPQHIEWLPYHTNEASSLTLNSMCNRDSDYFMYQCPLICFWAVEYHLPHRVMRQFGKKQDWPVEDISTGVELHKYDRVRTKKVKDWGLEHNRYIDEWRTAGRNDRYIETIHQNHLFSEYLRWLHRTYRLFLRPTWTEADIEDDRDSDEGRNPYDVRTRVGYQMEHAPLRDKVSRELLRSVNEMGHALQAPRGGEDTENTLRNVLEKVRQRCRKLAARLGCRSVGLDDVYQPGRLPPPLPQSARPSTARHSIRIEEREGVGGSSSSRIKQGRGKGKAPAPPSDDDDDEDEEDEDYVAPDAEEIDMSQLPDAPQGTQPTQYNLRSTRAAKKRYSPGSQAIRRQRKKEAEGGANHPGAEVEKGSASQCRVAEGFRAGGGRRQLPRRRGP

SEQ ID NO: 165367 - protein, 307 aa, Oryza sativa
  Clone ID: PAT_MRT4530_6417C.1.pep
CEDEQFTTELHHGGFFSGVGSSKIYLNEKVDWFDYCDSDTWSSLWLDDFIEQLGYDMSEKAKVYWLLPGKTFSDGLRRINFDASTNSMVVLAPSRERFTMNQKDSGVIPIEGHDIDDDDDIDVDPDFVDSDYEANKGDDDVFDNCVEIEEVASSKMVVKLPEHDSDDEGLLLPESSDEDNEGIKLKFKNFVAAVDMESPIFKVGMLFSDAIEVRQAIKQYSVKNRVAIKFTRNTKKKIEAKCKEECSWMLDVAEDSRTNCLMVKRYIDGHKCQKEWELNYVTARYLANRYVESFRDNDRMTLKSFSK

SEQ ID NO: 165368 - protein, 1351 aa, Oryza sativa
  Clone ID: PAT_MRT4530_64180C.1.pep
MSLKIILFPTHPTLDELRSRVKEVLGWTEDNVEIRFYGRYDVGQGHKYILNVIGGASKSELVREDLEGEGEKKRLLLGNDLWEAGPSKRHCGTDDVDAARVMKRELVQEGLDLSEHLSASVHWSSYGVNPEYPTEVAGQYVNPDNYFDVELSGGHDSVSVEVNRDDVDEEASVEQYDVEFAEDSDDDRPFPPLTNNDKLALEECRAFEKVFGRKPDIPEFRDLTHAHGALLDGGINLDQLPEPFQVDGLRKGLEFPSMVALKLWLQEYAIVHHRPYRVVNSAANRRYTVKCENPRCKWKVHATKRSSGTWRISRVAIKQRNPSMVYHIDTHPDRVVNVDGVTKKIFMRAFWCFGHSIEAFKHCRPVLAIDATFLTGKNGGALMTALSADAEDQLVPLAFALVEKENSRDWCWFIDLVRRVVVGPHREVCIISDRHAGIMNAMMTPVPGLPSVHHRWCMRHFSANFHKAGADKHQTKELLRICQIDEKWIFERDVEALRQRIPEGPRKWLEDELLDKDKWSRAYDRNGRWWGYMTTNMAEQFNSVLVGVRKLPVTAIVSFTFMKCNDYFVNKHDEALKRVQLGQRWSTKVDSKMKVQKSKANKHTTRCFDKQKKTYEVTERGGITRGGVRFGARAFKVEGEGNSCSCQRPLLYHMPCSYLIHVYLIHAIDEESPNRMPYQFSSRAVVNTWASRFEPYLDPTQWPSYDGEEFVADPNLKIKTRGKRRSKRFKNEIDSGLGGSGRKPPSCVQLDAAPVQNRCSLCHQEGHKKTKCPKRPKKKKMAEEGQPPTYPALEAYYEARHRGAAIEAGRVLQPLRVRAHASPVFDDRYIPYLRAAGLLGVALVVSRGMPVFNAPVLTALVDRWRPETHNFHLPSGEMTITLQDVAMILALPLRGHAVTGRTETPGWHAQVQQLFGIPLNIEQGQGGKKKQNGIPLSWLSQNFSHLDDDAEPWRVECYARAYILHLLGEMWMWLRLPVGRPKWRQSFTPWPYNEPDMEKTVAYLFESTATAHAHRDVAYKHYVNEMDCLQPQHFGKKQDWPVEDISTGVELHKYDRVRTKNVKDWGLEHNRYIDEWRTAGRNDRYIETIHQNHLFSEYLRWLHRTYRLFLRPTWTEADIEDDRDSDEGRNPYDVWTRVGYQMEHAPLRDRVLRELLRSVNEMGHALQSPRGGEDTENTLRNVLEKVRQRYRKLAARLGCRSVGLDDVYQPGRLPPPLPQSARPSTARHSIRIEEREGVGGLSSSRIKQGRGKGKAPAPPSDDDDDEDEEDEDYVAPDAEEIDMSQLPDAPQGTQPTQYNLRSTRAAKKREAEGGANHPGAAVGKGGASQCREAEGFRAGGGRGQLPWRRGP

SEQ ID NO: 165369 - protein, 54 aa, Oryza sativa
  Clone ID: PAT_MRT4530_64181C.1.pep
TVRPVSDSVMCTIGLLPDISHRSSSTCWDSPSSPVILLATDCLPATNFMFSAIV

SEQ ID NO: 165370 - protein, 1122 aa, Oryza sativa
  Clone ID: PAT_MRT4530_64182C.1.pep
VVEPYVGTHVEFEDMLLKTILFPTHPTLDELRSRVKEVLGWTEDNVEIRFYGRYDVGQGHKYILNVIGQLEWEVYFDLVKESQFRSLEVFASKLVRTVENLDLNKSPSYHCVEKNFVTYYSRRGGGASKTELVREDLEGEGEKKRPLLGNDLWEAGPSKRHCGSHDVDAAREMKRELVQEGLDLSEHLSASVHWSSYGVNPEYPTEVAGQYVNPDDYFDVELSSGHDSVSVEVNRDDVDEEASVEQYDVEFAEDSDDDRPFPPLTNNDKLALEECRAFEKGLKVPYMVALKLWVQDYVIVHHRPYRVVNSAANRRYTVKCENPRCKWKVHATKKSSGTWRISRVFQYRVKYGKAWRAREEAMKLIYGEWGEAYVRLPTLLQAIKQRNPSMVYHIDTHSDRVVNVDGVTKKIFMRAFWCFGPSIEAFKHCRPVLAIDATFLTEKYGGALMTALSADAEDQLVPLAFALVEKENSRDWCWEVCIILDRHAGIMNAMTTPVPGLPPVHHRWCMRHFNANFHKGGADKHQTKELLRICQIDEKWIFERDVEALRQRIPEGPRKWLEDELLDKDKWSRAYDRNGRRWGYMTTNMAEQFNSVLVGVRKLSVTAIVSFTFMKCNDYFVNRRDEALKRVQLGQRWSTKVDSKMKVQKSKANKHTARCFDKQKKTYEVTERGSITRGGVRFGARAFKVEGEGNSCSCQRPLLYHMPCSHLIHVYLIHAIDEKSSNRMPYQFSSRAVVNTWASRFEPYLDPTQWPPMAEERQPPTYPALEAYYEAHHRGAAIEAGRVLQPLRVRAHAPPLFDDRYIPYLRAAGLLGVALVVSRGMPVFNAPALTALVDRWRPETHSFHLPNGEMTITLQDVAMILALPLRGHAVTGRTETPGWRAQVEQLFGIPLNIEQGQGGKKKQNGIPLSWLSQNFSHLDDDAEPWRVECYARAYILHLLGGVLFPDAGDDIASAIWIPLVANLGDLGRFSWGSAVLAWTYRQLCEACCRQAPSSNMSGCVLLIQLWMWLRLPVGRPKWRQSFTPWPYNEPDMEKTVAYLFESTATAHAHRDVAYKHYVNEMDCLQSQHFGKKQDWPVEDISTGVELHKYDRVRTKKVKDWGLEHNRYIDEWRTAGRNY

SEQ ID NO: 165371 - protein, 1322 aa, Oryza sativa
  Clone ID: PAT_MRT4530_64183C.1.pep
MAAPATLAPCPCHRGTRAVVEMDRLVRVYYGGRVVEPYVGGHVEFEDMSLKTILFPTHPTLDELRSRVKEVLGWTEDNVEIRFYGRYDVGQGHKYILNVIGQLEWEVYFDLVKESQFRSIEVFASKLVRTVENLDLNKSPSYHYVEKNFVTYYSRRGGGASKSELVREDLEGEGEKKRPLLGKDLWEAGPSKRHCGTDDVDAARVMKRELVQEGLDLSEHLSASVHWSSYGVNPEYPTEVACQYVNPDDYFDVELSGGHDSVSVEVNRDDVDEEASVEQYDVEFAEDSDDDRPFPPLTNNDKLALEECRAFEKVFGRKPDIPEFRDLTHAHGALLDGGINLDQLPEPFQVDGLRKGLEFPSMVALKLWLQEYAIVHHRPYRVVNSAANRRYTVKCENPRCKWKVHATKRSSGTWRISRVGKEHSCATAEGSGSHRQLTSKFIANRLCNAIKLQPTLSASVLALYIFEVFQYRVKYGKAWRAREEAMKLIYGEWGEAYVRLPTLLQAIKQRNPSMVYHIDTHPDRVVNVDGVTKKIFMRAFWCFGPSIEAFKHCRPVLAIDATFLTGKYGGALMTALSADAEDQLVPLAFALVEKENSRDWCWFIDLVRRVVVGPHREVCIISDRHAGLPSVHHRWCMRHFSANFHKAGADKHQTKELLRICQIDEKWIFERDVEALRQRIPEGPRKWLEDELLDKDKWSRAYDRNGRWWGYMTTNMAEQFNSVLVGVRKLPVTAIVSFTFMKCNDYIVNRHDEALKRVQLGQRWSTKVDSKMKVQESKANKHTARCFDKQKKTYEVTERGGITCGGVRFGARAFKVKGEGNSCSCQRPLLYHMPCSHLIHVYLKIKTRGKRRSKRFKNEMDSGLGGSGRKPPSCVQLDAAPVQNRCSLIQMWMWLRLPVGRPKWRQSFTPWPYNEPDMEKTVAYLFESTDTAHAHRDVAYKHYVNEMDCLQPQHIKWLPYHTNEASSLTLNSMCNRDSDYFMYQCPLICFWAVEYHLPHRVMRQFGKKQDWPVEDISTGVELHKYDRVRTKKVKDWGLEHNRYIDEWRTAGRNDRYIETIHQNHLFSEYLRWLHRTYRLFLRPTWTEADIEDDRDSDEGRNPYDVRTRVGYQMEHAPLRDRVSRELLRSVNEMGHALQAPRGDEDTENTLRNVLEKVRQRCRKLAARLGCRSVGLDDVYQPGRLPPPLPQSARPSTARHSIRIEEREGVGGSSSSRIKQGRGKGKAPAPPSDDDDDEDEEDEDYVAPDAEKIDMSQLPDAPQGTQPTQYNLRSTRAAKKREAEGGANHPGAEVGKGGASQCREAEGFRAGGGRRQLPWRRGP

SEQ ID NO: 165372 - protein, 124 aa, Oryza sativa
  Clone ID: PAT_MRT4530_64184C.1.pep
MGAGGERGEAAELLRSGSGQQRRKEGDVQQRRKERDSGVNAEEALQERGVDALHARRHGILPAEGHAADAGAATNRSSGERICGSDTNQKRRLSLSWMLWYQSQPPNLTSIAHQTVCFKNSKVW

SEQ ID NO: 165373 - protein, 1499 aa, Oryza sativa
  unsure (1)..(1499): unsure at all Xaa locations
  Clone ID: PAT_MRT4530_64185C.1.pep
MAAPATLAPCSCHRGTRAVVEMDRLVRVYYGGRVVEPYVGAHVEFEDMSLKTILFPTHPTLDELRSRVKEVLGWTEDNVEIRFYGRYDVGQGHKYILNVIGQLEWEVYFDLVKESQFRSLEVFASKLVRTVENLDLNKSSSYHYVEKNFVTYYSRRGGGASKTELSSYGVNPEYPTEVAGQYVNPDDYFDVELSGGHDSVSVEVNRDDVDEEASVEQYDVEFAEDSDDDRPFPPLTNNDKLALEECRAFEKVFGRKPDIPEFRDLTHAHGTLLDGGINLYQLPKPFQVDGLRKGLEFPSMVALKLWFQDYAIVHHRPYRVVNSAANRRYTVKCENPRCKWKVHATKRSSGTWRISRCFRPSIEAFKHCRPVLAIDATFLTGKYGGALMTALSADAEDQLVPLAFALVEKENSRDWCWFINLVRRVVVGPHREVCIISDRHASIMNAMTTPVPGLPPVHHRWCMRHFSANFHKAGADKHQTKELLRICQIDEKWIFERDVEALRQRIPEGPRKWLEDELLDKDKWSRAYDRNGRRWGYMTTNMAEQFNSVLVGVRKLPVTAIVSFTFMKCNDYFVNRHDEALKRVQLGQRWSTKVDSKMKKKTYEVTERGGITRGGVRFGVRAFKVEGEGNSCSCQRPLLYHMPCSHLIHVYLIHAIDEESPNRMPYQFSSRAVVNTWASRFEPYLDPTQWPPYDGEEFVADPNLKIKTRGKRRXEMDSGLGGSGRKPPSCVQLDAAPDGRGETTADLPSLGGVLRGPSSRXAIEAGRVLQPLRVRAHAPPVFDDRYIPYLRAAGLLGVALVVSRGMPVFNAPALTAIVDRWRPETHSFHLPSGEMTITLQDVAMILALPLRGHAVTGRTETPGWRAQVEQLFGIPLNIEQGQGGKKKQNGIPLSWLSQNFSHLDDDAEPWRVECYARAYILHLLGGVLFPDAGGDIASAIWIPLVTNLGDLGRFSWCSAVLAWTCRQLCEACCRQAPSSNMSGCVLLIQLWIWLRLPVGRPKWRQSFIPWPYNEPDMEKTVAYLFESTATAHAHRDVAYKHYVNEMDCLQPQHIEWLPYHTNEASSLTLNSMCNRDSDYFMYDRVRTKKVKDWGLEHNRYIDEWRTAGRNDRTYRLFLHPTWTEADIDDDRDSDEGRNPYDVRTRVGYQMEHAPLRDRVSRELLRSVNEMGHALQAPRGXVRQRCRKLAARLGCKSVGLDDVYQPRRLPPLLPHSARPSTARHXIEEREEIGGSLSSRIPQGRGKGKAPAPPSDDDDDDDEEDEDYVAPDAEEIDMSQLPDAPQGTQPTQYNLRSTRAAKKREAEGGANHPGAAVGEGGASQCREAEGFRAGGGRRQPRPGGRRASMGGGGGHQPPWRCGLGGRQPLPGGRSENFEGGGEKVGGARRGGARQPCWRRGMRGGATLAGAPFGLVSTSTTALLPRWHRHDASVAGAAMLGRSAAGVVGMGRFGRPGTMLWHFLAGPAKELLAGRERIAIGPASFGELRPVTDSPCGADATR

SEQ ID NO: 165374 - protein, 112 aa, Oryza sativa
  Clone ID: PAT_MRT4530_64186C.1.pep
MNTCSCRSKRRHLVCSLHQRIGGHPSGAATTKGVAWKEVPPPPLVAAVPPVVIFHSDGGAIGGHRSDGVPANDHHATTAPPHQVAQSPATAWDGLARMAATAALSPDQRKSW

SEQ ID NO: 165375 - protein, 1345 aa, Oryza sativa
  unsure (1)..(1345): unsure at all Xaa locations
  Clone ID: PAT_MRT4530_64187C.1.pep
MDGGSGSSACLIVLFDGGGANAVVHELRLESFGGDGRCQCYASRSAPYIQIHLHVRTRCSHPYMHALLEQMDRLVRVYYGGRVVEPYVGAHVEFEDMSLKTILFPTHPTLDELRSRVKEVLGWTEDNVEIRFYGRYDVGQGHKYILNVIGGASKTELVREDLEGEGEKKRPLLGNDLWEAGPSKRHCGSDDVDVAREMKRELVQEGLDLSEHLSASVHWSSYGVNPEYPTEVAGQYVNPDDYFDVELSGGHDSVSVEVNRDDVDEEASVEQYDVEFAEDSDNDRPFPPLTNNDKLALEECRAFEKVFGRKPDIPEFRDLTHAHGALLDGGINLDQLPELFRLQDYAIVHHRPYRVVNSAANRRYTVKCENPRCKWKVHATKRSIGTWRISRVGKEHSCATAEGSGSHQQLTSKFIANRLCNAIKLQPTLFASALALYIFEVFQYRVKYGKAWKAREEAMKLIYSEWGEAYVRLPTLLQAIKQRNPSMVYHIDTHPDRVVNVDGVTKKIFMRAFWCFGPSIEAFKHCRPVLTIDATFLTGKYSGALMTALSADAEDQLVPLAFALVEKENSRDWCWFIDLVRRVVVGPHREVCIISDRHAGIMNAMTTPVSGLPPVHHRWCMRHFSANFHKAGADKHQTKELLRICQIDEKWIFERDVEALRQRIPEGPRKRLEDELLDKDKWSRAYDRNGRRWGYMTTNIAEQFNSVLVGVRKLPVMAIVSFTFMKCNDYFVNRHDEALKCFDKQKKTYEVTERGGITRGGVRFGARAFKVEGEGNSCSCQRPLLYHMPCSHLIHVYLIHAIDEESPNRMPYQFSSRAVVNTWASRFEPYLDPTQWPPYDGEEFVADLKLKIKTRGKRRSKRFKNEMDSGLGGSGRKPPSCVQLDAAPVQNRCSLCHQEGHKKTKCPKRPKKKKMAEERQPPTYPALEAYYEARYRGAAIEAGRVLQPLRVRAHAPPVFDDRYIPYLRXGRPKWRQSFTPWPYNEPNMEKTVAYLFENTATAHAHQDVAYKHYVNEMDCLQPXMYDRVRTKKVKDWGLEHNRYIDEWRTAGRNDRTYRLFLRPTWTEADIEDDRDSDEGRNPYDVRTRVGYQMEHAPLRDRVSRELLRSVNEMGHALQAPRGGEDTENTLRNVLEKVRQRCRKLAARLGCKSVGLDDMYQPRRLPPPLPHSVRPSTARHSIRIEEREEVGGSSSSRIPQGRGKGKAPAPPSDDDDDDDEEDEDYVAPDAEEIDMSQLPDAPQRTQPTQYNLRSTRAAKKREAEGGANHPGAAVGEGGASQCREAEGFRAGGRAVPTTLAPWSMRAAPAEARRQKGFDGGRRGAPATLAPRSGGAPAVARRQKRKF

SEQ ID NO: 165376 - protein, 245 aa, Oryza sativa
  Clone ID: PAT_MRT4530_64188C.1.pep
VAVSVFLALAFAFYVFFAPFVGKKVFQDVAVGLYTPLVSFVFFMYIWCAATDPADPGVLKSKKYLRLYGSGKHKHPKEFRHGISDSGLQVEGTGEKQEHEFAAASEKSTTRYKDNNPSCCSSTSSVFLIIFYPLYLVFSCCQPREWSEQQASEEGMFFCSLCEVEVLKYSKHCRVCDKCVDGFDHHCRWLNNCIGKRNYMRFFILMTSSLFLLILQSAVGVLVLVFCFERKEFSIQIVSKLGSSF

SEQ ID NO: 165377 - protein, 1361 aa, Oryza sativa
  Clone ID: PAT_MRT4530_64189C.1.pep
MDKLVRVYYGGRVVEPYVGAHVEFEDMSLKTILFPTHPTLDELRSRVKEVLGWTEDNVEIRFYGRYDIGQGHKYILNVIGQLEWEVYFDLVKESQFRSLEVFASKLVRTVENLDLNKSPSYHYVEKNFVTYYSRRGGGASKTELVREDLEGEGEKKRPLLGNDLWEAGPSKRHCGTDDVDEARVMKRELVQEGLDLSEHLSASFHWSSYGVNPEYPTEVAGQYMNPDDYFYVELSGGHDSVSVEVNRDDVDEEASVEQYDVEFAEDSDDDRPFPPLTNNDKLALEECRAFEKLWLQEYAIVHHRPYRVVNSAANRRYTVKCENPRCKWKVHATKRSSGMWRISRVGKEHSCATAEGSGSHRQLTSKFIANRLCNAIKLQPTLSASALALYIFEVFQYRVKYGKAWRAREEAMKLIYGEWGEAYVRLPTLLQAIKQRNPSMVYHIDTHPDRVVNVDVVTKKIFMRAFWCFGPSIEAFKHCRPVLAIDATFLTRKYGGALMTALSADAEDQLVPLAFALVEKENLRDWCWFIDLVRRVVVGPHREVCIISDRHAGIMNAMTTPVPGLPLVHHRWCMRHFSANFHKAGADKHQTKELLRICQIDEKWIFKRDVEALRQRIPEGPRKWLEDELLDKDKWSRAYDRNGRRWGYMTTNMAEQFNSVLVGVRKLPVTAIVSFTFMKCNDYFVNRHDEALKRVQLGQRWSTKVDSKMKVQESKANKHTARCFDKQKKTYEVTERGGITRGGVRFGARAFKVEGEGNSCSCQRPLLYHMPCSYLIHVYLIHAIDKESPNRMPYQFSSRAVVKTWASRFEPYLDPTQWPSYNGEEFVADPNLKIKTRGKRRSKRFKNEMDSGLGGSGRKPPSCVQLDAAPVQNRCSLCHQEGHKKTKCPKRPKKKKSKKNLSVREVLQPLRVRAHAPPVFDDRYIPYLRAAGLLGVALVVSRGMPVFNAPTLTALVDRWRPETHSFHLPSGEMTITLQDVAMILALPLRGHAVTGRTETPGWHAQMWMWLRLPVGRPKWRHSFTPWPYNEPDMEKTVAYLFESTATAHARDVAYKHYVNEMDCLQPQHIEWLPYHTNEASSLTLNSMCNRDSDYFMYDRVRTKKVKDWRLEHNRYIDEWRTAGRTDRYIETIHQNHLFSEYLRWLHRTYKLFLRPTWTEADIEDDRDSDEGRNPYDVRTRVGYQMEHAPLRDRVKVRQRCRKLAARLGCRSVGLDDVYQPGRLPPPLPQSARPSTARHSIRIEEREGVGGSSSSRIKQGRGKGKAPAPPSDDDDDEDEEDEDYVAPDAEEIDMSQLPDAPQGTQPTQYNLRSTRTAKKREAEGGANHPGAEVGKGGASQCREAEGFRAGGGRRQLPWRRGP

SEQ ID NO: 165378 - protein, 215 aa, Oryza sativa
  unsure (1)..(215): unsure at all Xaa locations
  Clone ID: PAT_MRT4530_6418C.1.pep
QVYIFSDLEPHVDVDKTCNLERLVIANXISSFSSFDLKKHVALNELCEEHHMEKPRMVFREEGEDXVTMKTMDTTVAHIMDQQEDIKMASKCWNPIRPPATLPTSNGRQRSIRASFXVHEYLMERFXCHLSNGSSLVAKFHLYRPQLKKQGIASPVIGLWACNFVWDPGPCGVVXGISLIYTDKINNPXRGVSIAKVQHNVLYGCSRVVNVSPKT

SEQ ID NO: 165379 - protein, 572 aa, Oryza sativa
  Clone ID: PAT_MRT4530_64190C.1.pep
MRRHGWQLPYHPLQVVAVSVFLALAFAFYVFFAPFVGKKVFQDVAVGLYTPLVSFVFFMYIWCAATDPADPGVLKSKKYLRLYGSGKHKHPKEFRHGISDSGLQVEGTGEKQEHEFAAASEKSTTRYKDNNPSCCSSTSSVFLIIFYPLYLVFSCCQPREWSEQQASEEGMFFCSLCEVEVLKYSKHCRVCDKCVDGFDHHCRGKWLNNCIGKRNYMRFFILMTSSLFLLGSSFSVVPYVIVVASCTILAIVALLPIAQLLFFHILLIKKGISTYDYIIAIREQEQEEVGGQQSPQMSRVSSYTGLSSTSSFGGRRRGSWCTPPRLFLEDQFDVIPSEAGSSHNSTSKRKEDEVRRKKGSGGIKISPWALARLNAEEVSRVAAEARKKSKVLLPIRKDEIDLGPDNKRRTSRRARPHNDFSLKPVAKISADALDSHGSELVPETLSSLAPLQLEARSAFHPSRAASSANGGGSSPDSSLDSPDLHLYRVSAVSSSAAEDLQLTTLTAPGSTPQQGIELSRSTSDGYEASGGEDSDRIPSRIVHRSSNWASIILSSDQSVASSGILVPKNRLS

SEQ ID NO: 165380 - protein, 960 aa, Oryza sativa
  Clone ID: PAT_MRT4530_64191C.1.pep
MALLHATTGARELGWANRGHQREEDDDANSPVQRTTTDDDERRPATRFNGGSTWVNNGDGAPAVFGGCEGADGVPLLRCDNDRPFPPLTNNDKLALEEWRAFEKVFERKPDIPEFRDLTHAHGAILDGGINLDQLPEPFQVDGLIKSLEFPSMVTLKLWLQEYAIVHHRPYRVVNSAANRKYTVKCEKPWCKWKVHATKRSSGTWRISRVGKAHSCATAEGSGSHRQLTSNFIANSLCNAIKLQPTLSASALALYIFEVFQYRVKYGKAWRAREEAMKLIYGEWGEAYVRLPTLLQAIKQRNPSMVYHIDTHPDRVVNVDGVTKKIFMRAFWCVGPSIEAFKHCRPVLAINATFLTGKYGGALMTALSADAEDQLVPLAFALVEKENSRDWCWFIDLVRRVVVGQHREVCIISDRHTGIMNAMRTPVPGLPPVHHRWCMRHFSANFHKAGADKHQTKELLRICQIDEKWIFERDVEALRQRIPEGPRKWLDRNGRRWGYLTTNMAKQFNSVLVGVSKHPVTAIVSFTFMKFNDYFVNRHDEAMKRVQLWERWSTKVASKMKLPPYDGEEFVADPNLKIKTRGKRRSKRFKNEMDSGLGGSRRKPPSCVQLDAAPVQNRCSLCNQEGHKKPNCPKRPKKKKSKNKIEVLGRMAKEGQPPTYPALEEYYEARHRGAAIEAGRILQPLRVRTHAPPVFDKRYIPYLRAVGLLGVALVMSRGMPVFNAPALTALVDRWRPETHSFHPPSVGAQQCWRGHIDSSLWMWLRLPVGRPKWRQSFTPWPYNEPDMEKTVAYLFESTATAHAHRDVAYKHYVNEMDCLQPQHIEWLPYHTNEASSLTLNSMCNRDSDYFMYDRVRTKKVKDWGLEHNRYIDEWRTAGRNDRTYRLFLRPTWTEADIEKDRDSDERRNPYDVRTRVGYQMEHAPFRDRVSRELLRSVNEMGHALQAPRGGEDTENTLRNV

SEQ ID NO: 165381 - protein, 499 aa, Oryza sativa
  Clone ID: PAT_MRT4530_64192C.1.pep
MTRARARSLRRSLPQPQPQPQPPTGGASKSKSIAHESEEMIIRTRRRKAEAVLVLHDPQDWRDWANLLAEMVGEIAGRLLAVDVAEYIRFRAVCGPWRERTADPRVRRLDARFRPRNWAVLTITPPPPRRLPPRRRLLNLATAASIGVVLPALSTHCHLCAADGLLVLFNKATNLISLLDPLTNTITDFPAIFLMAATATAAAAVPSSLSAMCRDRRFNLRIFNGAGFDDTTSPPTLVLCLRDTVRSIIVAKPGDSHWTLVNPGEASYREYDSQGQLLFHSVLSWRGRCYVASPEGSMYVLELRPPLPRLVEIIDQRRMCPPDTHHLNRVLSFLVGSGTAMLMVRYWIDIKHFGGAEAYDPAELFTTVGGFTGRLEVLELDDIAKPKSERSLLPVRSLGRHAAFVGNTHCLLMSTETFPSLATDAIYLGYRLQRYRTSKFSVYTIDDRRIEPPHQFCLDEEWRLHPSARPCNLDQYLVCYVDRLHSWSGDCISSKLPHP

SEQ ID NO: 165382 - protein, 1448 aa, Oryza sativa
  Clone ID: PAT_MRT4530_64193C.1.pep
MGAPATLAPPLLSRVVEPYVGTHVEFEDMLLKTILFPTHPTLDELRSRVKEVLGWTEDNVEIRFYGRYDVGQGHKYILNVIGQLEWEVYFDLVKESQFRSLEVFASKLVRTVENLDLNKSPSYHCVEKNFVTYYSRRGGGASKTELVREDLEGEGEKKRPLLGNDLWEAGPSKRHCGSHDVDAAREMKRELVQEGLDLSEHLSASVHWSSYGVNPEYPTEVAGQYVNPDDYFDVELSSGHDSVSVEVNRDDVDEEASVEQYDVEFAEDSDDDRPFPPLTNNDKLALEECRAFEKLWLQDYVIVHHRPYRVVNSAANRRYTVKCENPRCKWKVHATKRSSGTWRISRVFQYRVKYGKAWRAREEAMKLIYGEWGEAYVRLPTLLQAIKQRNPSMVYHIDTHSDRVVNVDGVTKKIFMRAFWCFGPSIEAFKHCRPVLAIDATFLTEKYGGALMTALSADAEDQLVPLAFALVEKENSRDWEVCIISDRHAGIMNAMTTPVPGLPPVHHRWCMRHFNANFHKAGADKHQTKELLRICQIDEKWIFERDVEALRQRIPEGPRKWLEDELLDKDKWSRAYDRNGRRWGYMTTNMAEQFNSVLVGVRKLPVTAIVSFTFMKCNDYFVNRRDEALKRVQLGQRWSTKVDSKMKVQKSKANKHTARCFDKQKKTYEVTERGSITRGGVRFGARAFKVEGEGNSCSCQRPLLYHMPCSHLIHVYLIHAIDEKSPNRMPYQFSSRAVVNTWASRFEPYLDPTQWPPYDGEEFVADRKLKIKTRGKRRSKRFKNEMDSGLGGSGRKPPSCVQLDAAPVQNRCSLCHQESHKKTKCPKRPKKKKSKKNICVREVLQPLRVRAHAPPLFDDRYIPYLRAAGLLGVALVVSRGMPVFNAPALTALVDRWRPETHSFHLPNGEMTITLQDVAMILALPLRGHAVTGRTETPGWRAQVEQLFGIPLNIEQGQGGKKKQNGIPLSWLSQNFSHLDDDAEPWRVECYARAYILHLLGGVLFPDAGDDIASAIWIPLVANLGDLGRFSWGSAVLAWTYRQLCEACCRQAPSSNMSGCVLLIQLWMWLRLPVGRPKWRQSFTPWPYNEPDMEKTVAYLFESTATAHAHRDVAYKHYVNEMDCLQSQHIEWLPYHTNEASSLTLNSMCNRDFDYLMYQCPLICFWAVEYHLPHRVMRQFGKKQDWPVEDISTGVELHKYDRVRTKKVKDWGLEHNRYIDEWRTAGRNYRTYRLFLRPTWTEADIEDDRDSDEGRNPYDVRTRVGYQMEHAPLRDRVSRELLRSVNEMGHALQAPRGGEDTENTLRNVLEKVRQRCRKLAARLGCKSVELDDVYQPRRLPPPLPHSVRPSTARHSIRIEEREEVGGSSSSRIPQGRGKGKAPTPPSDDDDDEEEEDEDYVAPDAEEIDMSQLPDASQGTQPTQYNLRSTRAAKKRYTPGSQAIRRQRKK

SEQ ID NO: 165383 - protein, 1258 aa, Oryza sativa
  unsure (1)..(1258): unsure at all Xaa locations
  Clone ID: PAT_MRT4530_64194C.1.pep
MGPPPLPRAQRRGARAPAALLVLLTLVARAGDAGRGARGCGTGGDHSGGGAHSRAGPAQGEDDGVAMAGGGEEVKGSSVRPHYTVSGLFYFPGIVGTFDFRVGAAGLREATRRRRMDRLVRVYYGGRVMEPYVGAHVEFEDMSLKTILFPTHPTLDELRSLEVFASKLVRTVENLDLNKSPSYHYVEKNFVTYSSRRGGGAREVGPSKRHCGSGDVDAAREMKRELVQEELDLSEHLSESVHWSSYGGNPEYPTQVIASQYVNPDDYFVVKLSGGHDSVSVEVNREEVDEEASVEQYDVEFAKDSDDDRPFPPLTNNDKLALEECRAFEKLWLQEYAIVHHRPYRVVNSTANRRYTVKCENPRCKWKIHATKRSSGMQRISRVAIKQRNPSMVYHIDTHLDRVVNVDGVTKKNFMRAFWCFGPSIEAFKHCRPVLAIDATFLTRKYGGALMTALSIDAENQLVPLAFALVEKKNSRYWCWFIDLVLTGCGWAAQGGLPPVPPRWCMRHFSANFHKAGADKHQTEELLRICQIDEKWIFERDVEALRQRISEGPRKWLEDELLDKDKSSRAYDRNGRRWGYMTTNMAEQFNSVLVGVRKLPVTAIVSFTFMKCNDYFVNKHDEVVKRVQSEEHWSAKVASKMKVQKSKANKHTSRCFDKQKKTYEVTERGGITRGGVRFSARAFKVEGEGNSCSCQRPLLCHMPCSHLIHIYLIHAIDEESPNRMLYQFSSRAVVNTWASRFEPYLDPTQWPPYDGEEFVADPDLKIKTRGKRRSKRFKNEMDSGLGGSRRKPPSGVQLDAAPVQNXDARCVTRRVTRNLSVLSVQKRRRWPRRXQPPTYPALEEYYEARHRGAAIEAGGYIPYLRTTGLLGVALVVSRGMPVFNAPALTALVDRWRPETHSFHLLVMWMWLRLPVGRPKWRQSFTPWPYNELDMEKTVAYLFESTATAHAHRDVAYKHYVNEMDCLQPQHXEYHLPHRVMRQFRKKQDWSVEDISTGVELHKXISYLCLSWTEADIEEDRDSDEGRNPYDVRTRVGYQMEHTPLRDRVSRELLRSVNEMGHALQSPRGGEDTENTLRNVLEKVRQRCRKLAARLGCRSVGLDDVYQPRREPPPLPQSACPSTARHSIRIEEHEEVGGSSSSRIPQGRGKGKAPAPPSDDDDDDEEEDEDYVAPDAEEIDMSQLPDAPQGTQPTQYNLRSTRTAKKRSSICREAEGGASHPSTAVGKGGASQCHEAEGFQXGGGGRLHPPYRRGPRGQL

SEQ ID NO: 165384 - protein, 51 aa, Oryza sativa
  Clone ID: PAT_MRT4530_64195C.1.pep
CHGYALSHIGGMKKFLPHRLPRVPRNRRLLICAPQAQHFTTPRRGSMSSLW

SEQ ID NO: 165385 - protein, 132 aa, Oryza sativa
  Clone ID: PAT_MRT4530_64196C.1.pep
MEHPHHSKIKPCTARHIPRHLTLENSMPTPFLASSRHCPPEPVNHHHTGDVASYTLQARSAMRSSSLRQIWPLIESQIDLLASSSPAASAARRERKWRTCGEACGGVGARLGAGGWSGGATAQGVGVAGRGG

SEQ ID NO: 165386 - protein, 89 aa, Oryza sativa
  Clone ID: PAT_MRT4530_64197C.1.pep
WMMICLVHHSHCDDVKHQQHYYPCVNRTYDGNGVSLGQSTERDNCTQCYPCLGPLLSPRCYGTITIRLISRLNSGTYGRMVYFTAVLEF

SEQ ID NO: 165387 - protein, 78 aa, Oryza sativa
  unsure (1)..(78): unsure at all Xaa locations
  Clone ID: PAT_MRT4530_64198C.1.pep
PIMPTETVLAATPEMAAVALALALPSCREEVNRXPXGKTGTFYSYPRLHARCYGTLAYLNRSQGPVPEFGGTTQKVFH

SEQ ID NO: 165388 - protein, 127 aa, Oryza sativa
  unsure (1)..(127): unsure at all Xaa locations
  Clone ID: PAT_MRT4530_64199C.1.pep
KRSHFGVFFTLLLCIIQAFSFIFGGTHLVVRPFFCMAPPGRFKTPLLWSVRMVCILAFLCNLFFCSSCPPGFGASPLPASVMRILFPKCSFPPRICIHPSPVFWLNPEKKLKKPPKKNKFXGVDKKK

SEQ ID NO: 165389 - protein, 1050 aa, Oryza sativa
  Clone ID: PAT_MRT4530_6419C.1.pep
IIYDLTHQNGLSCNIGCEDEQFTTELHHGGFFSGVGSSKIYLNEKVDWFDYCDSDTWSSLWLDDFIEQLGYDMSEKAKVYWLLPGKTFSDGLRRINSDASTNSMVVLAPRFRTLLLYVDHQDILESINWDDVALSTPASIPIVASRERSTMNQKDSGVIPIEGHDIDDDDDIDVDPDFVDSDYEANKGDDDVFDNCVEIEEVASSKMVVKLPEHDSDDEGLLLPESSDEDNEGIKLKFKNFVAAVDMESPIFKVGMLFSDAIEVRQAIKQYSVKNRVAIKFTRNTKKKIEAKCKEECSWMLDVAEDSRTNCLMVKRYIDGHKCQKEWELNYVTARYLANRYVESFRDNDRMTLKSFSKVVQKELNVTPSRHKLGRARKLAMKAIYGDEIAQYDMLWDYGQELRTSNPGSKFFLNLQNMCFHTCYVSFDACKRGFLSSCRPIIFLDGCHIKTKFGGHLLTVVGIDPNDCIYPIAMAIVEVESRASWGWFLNTLKEDLLIDNTTPYTIMTDRQNGLVPAVRDKFPDSKQRFCVRHLYQNFHVLHKGETLKNQLWAIARSSSIPEWESNMEKMKYLSTDAYGYLEEIPPNQWCRAFFSGFPKCDILLNNNSEVFNKYILEARELPILSMLEKIRSQIMNRIHNKQEECAKKWSGNICPKIKKKVEKNAEIANTCYVLPAEKFMEAYGFNIMPVRDKTTWAKMNGVKVNPPVYEKKVESLVDVEESSLKSLKEEQKYRNMVCKYTVATAKELITIRRDRKKRKEDIKSGKQQASAPSLQPVQEDVVPLQVMPGILNSQTSILTSQPNYNQLDNTILSSLIREEEIDIRVYYRNRLSTLLREEEIKWYQRAKTKDILEGDSNTKYFHLVANGLFGPPDDYDLQLDESKIDDIPQVSQLENEALTQEFTENEIKEAIFQMEHNKAPGADGFPAEFYQVFWNGIKADLLDLFKDFHNASFFQGGHVGIKVNDQIGNNFQTYKGLRQGYPLSPILFNIVADMLALLIKRAKDVGTINGAKDFYEQYSTIFGCLMKVKNSFLNMTSWIINNGEQVRFWE

SEQ ID NO: 165390 - protein, 820 aa, Oryza sativa
  Clone ID: PAT_MRT4530_641C.1.pep
MVRVRMGAAVLGVAVVVLACVLGARADGSDHRYKDGDYVPLYANKVGPFHNPSSLLIELPTVYCSETYRYYDLPFCAPDHPKDKREALGEVLNGDRLVDAPYELNFKEDRNSKVLCQKSLSKVEVAKLRDAVAKDYYFQMYYDDLPLWGFLGKLDKDKEQGNAKYLLFKHIHFDIMYNGDRVIEINVQTDPNVAVDITEDKEVQVEFSYSVTWKKTDIPFEKRMEKYSKSSSMPQHLEIHWFSIINSCVTVLLLTGFLATILMRVLKNDFIKYSHEDESLEDQEETGWKYIHGDVFRFPQQKSLFAAIVGSGTQLLALHLLLSATGGNKLGKDCFNGAAIKVRNLILTGCLFCGPLFLTFCFLNTVAIAYSATAALPFGTIIVIILIWALVTSPLLVLGGIAGKNSNTEFQAPCRSTKYPREIPQLPWYRSTIPQMAMAGFLPFSAIYIELYYIFASIWGHKIYTIYSILFIVFIILIIVTAFVTVALTYFQLAVEDHEWWWRSVLCGGSTGIFIFFYCIYYYHARSDMSGFMQTSFFFGYMTCVCYGFFLMLGTVGFRASLLFVRHIYRSIKLREMFAARSIRFVSLAPGLDIPGARTVVAASDSDDDEQLRHVGFGMAAAPPAFTGNLKKALAGLRRINLDGLRWRVFDAKGQVLGRLASQIAVVLQGKDKPTYAPHVENGDMCVVLNAKDISVTGRKMTDKIYYWHTGYIGHLKERRLKDQMEKDPTEVIRKAVMRMLPRNRLRDDRDRKLRIFSGSEHPFHDRPLEPFAMPPRQVREMRPQARRALIRAQKKEQDRAAASTKDDKDGKSANTDVTS

SEQ ID NO: 165391 - protein, 82 aa, Oryza sativa
  Clone ID: PAT_MRT4530_64200C.1.pep
LGVGVFLLWLARVFVILVAFSLSMAPIRLGSWFLSVCRGRTLWRGPLGLVRLCSPSLSGPHLWGPRRRLLSQLPRQYCLFLN

SEQ ID NO: 165392 - protein, 719 aa, Oryza sativa
  Clone ID: PAT_MRT4530_64201C.1.pep
MDDPSFCNFELRLLGMRGDDEDDLEEERVEVFGNTASPRIDGSQPETKTEPDDDGTGAGGNGAPSGSSASNKRSRSQSMLRFNADGSVSQWEYKTDVARTELVKLIAREDLPLCFGESAAFEEYIQKAHNPRFCSVSRQTTSRDVFKVFDSQRAMLIETLKSISSVALTSNIWSGNAKEDYLSVVAHFVNSNWQLGKRILGLVLIDVSHTAENISEHILSVVQEYGLTDKIFSVTLDNAAANTKAMDHLKHAISGYVGDLYLHQRCACHIINLIVKAGLEIFKNMLADFRSAISFVNASNQRIALYKSFCIAKGVRPRKFGLDMDVRWNATYLMLKNLLPHKGIFSVFIATNHPPVNGHALLTDLHWTIAETVLLFLEQFYDSTIIMSGVYYPTSPLIMHHILEIAGHLNTYENDRNLRNVVIPMKSKFLLYWSEIPFLYSFAFILDPRAKIRGFSNVLQIMTGNYSEYLTEVRAALSDIYKKYEAKFGDVRLQRATPSSSCGKKKTAWGKIFGSSASGSSVGAGPGVGDGFASASPGAGLSASASPIPGFGASASPGAGLGAGLFSRRTSATALIQAVYSTANMNASELFAYFDSDTVNQFDDDFNILNWWHEHKHTYPILSLLDRDVLNVPVSTISLEYAFSLTGRIIEDRRRCLGPAMVQALALIKDWEQAESKKQHSAENKELIKSFEYLYLDDETTGDGDGTGTGDGARAGTGT

SEQ ID NO: 165393 - protein, 61 aa, Oryza sativa
  unsure (1)..(61): unsure at all Xaa locations
  Clone ID: PAT_MRT4530_64202C.1.pep
MADKVYVVYYSMFGHVVKLAEEIQNGAXCVDREQVDMMYVFDTLSEEALARMGAMDHHHFL

SEQ ID NO: 165394 - protein, 203 aa, Oryza sativa
  Clone ID: PAT_MRT4530_64203C.1.pep
DVLRTVENFLEYVPDFWSSEELADSVKDDEQRLLNFLRALGKLIKLNSQCKEMVFPCCWLEGRQLWRLMNDEEQEEEQGQMQELLKSTNQLTDADHFALMKGFVDTELPDALKIEFRKADDYPLVQNDGNSIALDSDDEDLIRGSHKRRKRDRKRKRRRYDSDEDDLDQLLELDSCISGRASRCYMTKVPCWLIPLKNYRLGH

SEQ ID NO: 165395 - protein, 54 aa, Oryza sativa
  Clone ID: PAT_MRT4530_64204C.1.pep
KQKQLPWCSKQFPQRLSFKSYFIKHLGPICCCPFSLNTIFLSPVNGFFFVILNF

SEQ ID NO: 165396 - protein, 125 aa, Oryza sativa
  unsure (1)..(125): unsure at all Xaa locations
  Clone ID: PAT_MRT4530_64205C.1.pep
GGGAAKISCEFVLVIIYKFMVSKRLMDRQXMYKADRRSKEFIDGEHYFLRVANVNKHKGFICCPLNKCKNQKEYSTLRTIHFHLFESGFMPSYNCWTLHGELGVQMEEDEVEDENISDWAQYDNW

SEQ ID NO: 165397 - protein, 499 aa, Oryza sativa
  Clone ID: PAT_MRT4530_64206C.1.pep
MVQLFFQGTTDGGSVDTDAVKARRSLLGKVEPIIRSVIKSGGGYEARMWLCSTVSSIHLLDPYGQRDLFLNLLGMKNSKRDVAARLLRMIFDKKPKKAGSIIAKKCQMLEDFFQGNPKQIMQWFGHFAVTGELTHKKGARALSQFAFVNRDICWEELEWKGKHGQSPAVVATKPHYFRDLDVLRTVENFLEYVPDFWSSEELADSVKDGEILQIDTEYFVDQFVYLMYEENSRDAWQLVDEFLMDEQFSSLSQHLLIHLDEQRLLNFLRALGKLIKLNSQCKEMVFPCCWLEVLLSAHSDHISLDELVLLNCVISKGRQLWRLMNDEEQEEEQGQMQELLKSTNQLTDADHFALMKGFVDTELPDALKWIGIQSWLVFCELSKGCKSADSCEHLFTCNRIEFRKADDYPLVQNDGNSIALDSDDEDLIRGSHKRRKRDRKRKRRRYDSDEDDLDQLLELGTSNRRGIESHHGCWYLSTDGFSASWDIIHAFLDVLAAAT

SEQ ID NO: 165398 - protein, 176 aa, Oryza sativa
  Clone ID: PAT_MRT4530_64207C.1.pep
MEGERRKERRKKEERRKKKKKKKKGKELWLVVAAAPVPFAMHASSPSFNAANSCWQLRPLCVDITAPSTSFGLEGVDVKNTHWRGLLYSSAGPKICLQVQGVLVSLILQPTRNKESKVKSINDSRSAGLPMTYHLAPSRCNAGQIGNENIFKLSDWDRSGSVPRQYKLLALKSALE

SEQ ID NO: 165399 - protein, 87 aa, Oryza sativa
  Clone ID: PAT_MRT4530_64208C.1.pep
EKPKPWGIQGLKKTLKVPIRGKTPPPHPQNIFLIWGGGHLKKRAKNENPPKKLIGGGLMGNPLGNPKTFLFIKGAFKTLPEKGGGFF

SEQ ID NO: 165400 - protein, 164 aa, Oryza sativa
  Clone ID: PAT_MRT4530_64209C.1.pep
MGAGDPATINGAGERPDHLLSHLRRLGARLHRPSGARQERIGEGSLGIYSVAARPPDCSRSSSRPPDCRCQCRCSSPCAPAVAAVPSHIGVDPASKAILVHVEMESAHATERQPKVAPTPPVQLMEMWSSDSRAVGDHTDNREGKDDEQQRGPPPPFPSSSHCH

SEQ ID NO: 165401 - protein, 108 aa, Oryza sativa
  Clone ID: PAT_MRT4530_6420C.1.pep
IKPTKQHSLSIAQVRLVLALTPSILRLNSFNVGTLHTFSFPCYSCSTASCAVWSLLVSDRCSSVKQQATQGDERMGWRRTTTAEPAAAAAPAETGTAAAVVGRRRCGG

SEQ ID NO: 165402 - protein, 236 aa, Oryza sativa
  Clone ID: PAT_MRT4530_64210C.1.pep
MASPEGSTWVFDCPLMDDLAAAAGFDAAPAGGFYWTTPAPPQAALQPPPPQQQPVAPATAAPNACPRSESGTRPSSKACREKVRRDKLNERFLELGAVLEPGKTPKMDKSSILNDAIRVMAELRSEAQKLKESNESLQEKIKELKAEKNELRDEKQKLKAEKESLEQQIKFLNARPSFVPHPPVIPASAFTAPQGQAAGQKLMMPVIGYPGFPMWQFMPPSDVDTTDDTKSCPPVA

SEQ ID NO: 165403 - protein, 135 aa, Oryza sativa
  unsure (1)..(135): unsure at all Xaa locations
  Clone ID: PAT_MRT4530_64211C.1.pep
EDEGNGGGGPRCCSSSLPSRLSVWSPTARESLDHISINCTXRGRGHLRLPLRLLAPFSTDEEGGEEAEARRARLTACADSISTCTKMALLAGSTPMCDGTAATAGAQGLEHRHWQRQSGGRELERLQSGGRAATL

SEQ ID NO: 165404 - protein, 58 aa, Oryza sativa
  Clone ID: PAT_MRT4530_64212C.1.pep
MAVDQKIKSTGTLTNLKAGFWTCTEVKQIFQPHPPLPPPSYAIVMSPEIRCLHCFTPC

SEQ ID NO: 165405 - protein, 123 aa, Oryza sativa
  Clone ID: PAT_MRT4530_64213C.1.pep
MPCKTHAHNACLTQQMHRTKKPTLFFKLDIAKAFDSVSWEYMLTLLEKMGSQRVLQMLPDATIFIKPSCQDVDNLISILHNFSGATGLKVNLSKSSVNLIECDAIKLDEVLHNFTGPRTTFPM

SEQ ID NO: 165406 - protein, 107 aa, Oryza sativa
  Clone ID: PAT_MRT4530_64214C.1.pep
PQRSQVLSCYEKLLPLQEFLSPIFCLVGGAFPPGQTNYTLSRCLVTRNVKCFFFFLAGKVTLNVPFPAYPKLENDSPCEILPFPDFAVTPPMKNCFCVPGCEMFVNA

SEQ ID NO: 165407 - protein, 168 aa, Oryza sativa
  Clone ID: PAT_MRT4530_64215C.1.pep
IMSDTRMYIDNASSSYIIFTFTKDCTKGKHVAYSRIYNNFVGPNARDNDSFKTELQTEVLWKCWFLKQNEKNSGGSYPLTTSSTSSGFTLYRDMLHLVSCILPAALGLSFFYMKKGQYVEICVSKSHIIVHLPQIVGAGGKAYRQARLKGILRCFCQVEGGNILADIF

SEQ ID NO: 165408 - protein, 98 aa, Oryza sativa
  unsure (1)..(98): unsure at all Xaa locations
  Clone ID: PAT_MRT4530_64216C.1.pep
GGRRRXKGGFVREPVGEDKVGGVQGRVGRRARGRRRGGRRRVGAGGEVRREADGRQRRGRRRLCALQQGQGEAGVNCNRVTLSLSGYTYQMHSCESSG

SEQ ID NO: 165409 - protein, 172 aa, Oryza sativa
  Clone ID: PAT_MRT4530_64217C.1.pep
SWDAHVLESLREEDVEGAIAVDKHTFQAHPLDYWVKDEGVNLGSLRYIKQDDFSSEDYKTLLGDNLDEVIDKRLKALEEIKKEKKRVDKAYNKRVKAKLFQVGDLVWKTILPLGTRSREFGKWSPSWEGPYRVCGIVRGNAYFLETLQGERFQRAINGKYLKKYFPSIWQDA

SEQ ID NO: 165410 - protein, 51 aa, Oryza sativa
  Clone ID: PAT_MRT4530_64218C.1.pep
ASNSTNSGHHDVSVKHATQNMHWLDPPSPFTQADAWDDAIMPELAPAGAPA

SEQ ID NO: 165411 - protein, 427 aa, Oryza sativa
  Clone ID: PAT_MRT4530_64219C.1.pep
MRRRRGRWLLDLRGRIHGHTIQVHKNIKNALAAPTSTYLQQQKASIFGSGSVEGQENTAESGDARAQSALVRGSRGCAGDGHLLGPGLRRGIEMRERRSGAAVGALDASVYAAMAGSVEVVFPNERRCRKQWWIHRTELALFFWKKKSGANQMQTAVRAAPMRMHDAWMRRSSDGRPTQASPHPARLDSGRGVQQKSTGAAGLLVPSSDLVQPLPAVAHDMAGQSSHEHDVIVGDRGADGKQRTQISEFMTMEEDVAGAIDANANGDDNTLCRIVPEEMADKAPNQANDKVAQTLILPQVGMAFDSKQKAWTKYAKKGFNIDKQGSEKETLKTHAAREDLNNASEDEDEDVGDVCGQSSTMDANDVCGQSSTMAAYDVYGQSSTMAAYDGFGQSSTMDAPLIQGGFTSLLFGVQQDSAMAARKLHFN

SEQ ID NO: 165412 - protein, 446 aa, Oryza sativa
  Clone ID: PAT_MRT4530_6421C.1.pep
MANTTLLYYSKLLVRCSAYEKDGSGGGRVRVNGAAHRVPLQVGAALETKINRSLAGLMRPPVLSQPPTEEEAEGRRSQRQNIPSEKQTVDPFRQAVIVEGGVRYRQTVVVRSYEVGPDRTATLETVLNLLQETALNHVWMSGLLGDGFGATHAMITNNLIWVVSRMHVQVDHYPIWYIILVFVFVHGVLFVQRGRGKKIYAHQTEVGCRGEVLEIDTWVGSSGKNGMRRDWLVRGRSSGAIFVRATRRFSHLGGKRTWVMMNKVTRRLSKMPKEVRDEISPWFIDRHAIDEVATDKIIKLDTNATYVDSDLKPKRSDLDMNHHVNNVKYVRWMLETLPDQFLQQHQLSSIILEYRKECGSSDVVQSICQPDEDTIMPGENVSIVMGPSLSQEIINGHHSLAGALQQWPTKYTHLLQLKANDKYEEIVRGRTTWKKKSYSISNVLKF

SEQ ID NO: 165413 - protein, 63 aa, Oryza sativa
  unsure (1)..(63): unsure at all Xaa locations
  Clone ID: PAT_MRT4530_64220C.1.pep
MSLNSEQGTTARRTSDEGYYDEQQQQPGMTRVRLTRARQYAAQLPSMCRVEPPQCNIFAASQX

SEQ ID NO: 165414 - protein, 107 aa, Oryza sativa
  Clone ID: PAT_MRT4530_64221C.1.pep
AATAAAPYQQGLAPPATGSAPSLRPSAASPRAAADRTAADPSGPRTVGPRRDGGRFLGVRAAKAVSVVQSDTVQDDGVQRAWKLSEARFALEDGSAWKAKPFGAVGA

SEQ ID NO: 165415 - protein, 790 aa, Oryza sativa
  unsure (1)..(790): unsure at all Xaa locations
  Clone ID: PAT_MRT4530_64222C.1.pep
MTALSADAEDQLVPLAFALVEKENSRDWCWFIDLVRRVMVGPHREVCIISDRHAGIMNAMTTPVPGLPPVHHRWCMRHFSANFHKAGADKHQTKELLRICQIDEKWIFERDVEALRQRIPEGPRKWLEDELVDKDKWSRAYDRNGRRWGYMTTNMAEQFNSVLVGVRKLPATAIVSFTFMKCNDYFVNRHDEALKRVQLGQRWSTKVDSKMKVQKSKANKHTARCFDKQKKTYEVTERGGVTRGGVRFGARAFKVEVEGNSCSCQRPLLYHMPCSHLIHVYLIHAIDEESPNRMPYQFSSRAVVNTWASRFEPYLDPTQWLPYDGEEFVADPNLKIKTRGKRRSKRFKNEMDSGLGGSGRKPPSCVKLDAAPVLQPLRVRAHAPLVFDDRQLCEACCRQAPSSNMSGCVLLMQLWMWLRLPVGRPKWRQSFTPWPYNEPDMEKTVAYLFESTATAHAHRDVAYKHYVNEMDCLQPQHIEWLPYHTNEASSLTLNSMCNRDSDYFMYQCPLICFWAVEYHLPHRVIRQFGKKQDWPVEDISTGVELHKYDRVRTKKVKDWRLEHNRYIDEWRTAGRNDRTYRLFLRATWTEADIEXPADFDEGRNPYDVRTRVGYQMEHAPLTDRVVTFLAFVKSRELLRSVNQMGHALQAPRGGEDTENTLRNVLEKVRQRCRKLAARLGYRSVGLDDVYQPRRLPPPLPQSGRPSTARHSIRIEEREGVGGSSSSRITQGRGKGKAPAPPSDDDDDEDEEDEDYVAPDAEEIDMSQLPDAPQGTQPTQYNLRSTRAAKK

SEQ ID NO: 165416 - protein, 1375 aa, Oryza sativa
  unsure (1)..(1375): unsure at all Xaa locations
  Clone ID: PAT_MRT4530_64223C.1.pep
MAAAGSSPSAPSRPGAGVAMTAAGWRDCGDGAVVGLSAATAVGLSTAPATGDGVAISGRPASRSGRGDRRQARLTPAPLGRRRVAGDGHLRCGFVGDDGIGSVVAPPASGALGGARSSTGCRVDLAGGNRPAVVFAGDRDGASISLPPVPPDPILPFFSGCSFGAHRRLRSEGFCTTRGRLVVLETSFALCCQSCLPLLASGYGLYPLEIRSKRHQELVVVLYVCNVLIAELVREDLEGQGEKKRPLFENDLWEAGPSNRHCGSDDVDEAREMKRELVQEGLDLSEHLSESVHWSSYGGNPEYPAQVAGQYVNPDDYFVVELSGGHDSVSVEVNREEVDEEASVEKYDVEFAKDYYDDRPFPPLINNDKLALEECRAFQKVFGRKPNIHEFRDLTHTHGAILDGGINLDQLLEPFQVDGLKKDLEFPSMVTLKLWLQEYAIVHHRPYRVVNSTTNRRYXVKCENPRCKWKVHATKRSSGTWRISRVGFXQYRVKYGKAWSAREEAMKLIYGEWGEAYVRLPTLLQAIKQRNPSMVYHIDTHPDXFALVEKVNSRDWCWSIDLVRRVVVGPHREXCIISDRHAGIMNAMRTPVPGLPPVHHRWCMRHFSANFHKAGVDKHQTEELLRICQIDEKWIFERDVEALRQRIPEGPRIWLEYELLDKDKWSRAYDRNGYRWGYMTINMAEQFNSVLVGVRKLPVTAIVSFTFMKCNDYFVNRHDEAVKRVQSGERWSAKKKTYEVTERGGITCDGVRFGARAFKVEVKGNSCSCQRPLLYHMPCSHLIHVYLIHVIDEKSSNRMPYQFSSRAVVNTWASRFEPYLDPTQWPPYDGEEFVANPDLKVKTRGQRRSKRFKNEMDSGVGGSRRKLPSGVQLDAAPVQNRCWLCHQEGHKKPKCLKRPKKKKSKKIVLGRMAEEEQPPTYPALEEYYEACHRRAAIEAGRVHPVPKGGGLLGVTLVVNGMLVCNAPALTALVDRWRSETHSFHLPSGEMTITLQDVAMILALPLRGHVVTGRIENPGWRVQVEQLFGIPLNIEQGQGSKKKHNGIPLSWQSQNFSYLDDDAEPWRVECYARAYILHLLGGVLFPDAGGDIASAIWIPLVASLDDLGRFSWGSAVLMWMWLRLPVGRPKWRQSFTPWPYNEPDMEKTTAYLFESTATAHAHRDVAYKHYVNEMDYLQPQHIEWLPYHTNEASSLTLNSLCNRDSDYFMYDRVRTKKVKDWRLEHNRYIDKWRTVGRNNRKFRLFLRPNWTEIDIEEDRDSDEGRNPYDVRTRVGYQMKHAPLIDRVSRELLRSMNEMGHALQSPRGGEDTENTLRNILEKVHQRYRKLAARLGCKSVRLDDVYQPRRVPPPLPQSACPSTARHSIRIEECEEVGG

SEQ ID NO: 165417 - protein, 75 aa, Oryza sativa
  Clone ID: PAT_MRT4530_64224C.1.pep
TCDIVYKSDKIWSPTVVSVSTVCSVSFHFAGLALLLFVCQMISVLLYVRGDYAWGISCTRRHVLFPYMESPAILF

SEQ ID NO: 165418 - protein, 301 aa, Oryza sativa
  Clone ID: PAT_MRT4530_64225C.1.pep
MPTTCKTFTAILSEADRIILQIPGKSTAEVGINVAADRCSGAQGGQVAGPEVVDRWIDLFVFTTVVRRPSIARHSIRIEEREEVGGLSSSRIPQGRGKGKAPAPPSDDDDEEDEDYVAPDAEEIDMSQLPDAPQGTQPTQYNLRSTQAAKKRFSICREAEGGANHPGAAVGEGGASQCHEAEGFRGEEEGRRQDGWRRGLGGSASHCPEAEARAGDLAKMGVGGESWWGPQRRGCATHAGPVVCEAAPRWLAPRSTESAMPRSPGAMVARARCQCGWRRHVGGRRQPLWRPKKDHFRFKFF

SEQ ID NO: 165419 - protein, 1372 aa, Oryza sativa
  unsure (1)..(1372): unsure at all Xaa locations
  Clone ID: PAT_MRT4530_64226C.1.pep
MDEDNVEIRFYGRYDVGQGHKYILNVIGQLEWEVYFDLVKESQFRSLEVFASKLVRTVENLDLNKSPSYHYVEKNFVTYYSRRGGGTSKTELVREDLEGEGEKKRPLLGNDLWEAGPSKRHCGSDDVDAAREMKRELVQEGLDLSEHLSVSVHWSSYGVNPEYPTEVAGQYVNPDDYFDVELSGGHDSVSVEVNRDDVDEEASVEQYDVEFAEDSDDDRPFPPLTNNDKLALEECRAFEKVFGRKPDIPEFRDLTHAHGALLDGGINRDQLPEPFQVDGLRKGLEFPSMVALKLWLQEYAIVHHRPYRVVNSAANKRYTVKCENPRCKWKVHATKRSSGTWRISRVGKEHSCATAEGSGSHRQLTSKFIANRLCNAIKLQPTLSASALALYIFEVFQYRVKYGKVWRAREEAMKLIYGEWSEAYVRLPTLLQAIKQRNPSMVYHIDTHPDRVVNVDGVTKKIFMRAFWCFGPSIEAFKHCRPVLAIDATFLTGKYGSALMTALLADAEDQLVPLAFALVEKENSRDWCWFIDLVRRVVVGPHREVCIISDRHAGIMNAMTTPVPGLPPVHHRWCMRHFSANFHKAGADKHQTKELLRICQIDEKWIFERDVEALRQRIPEGPRKWLEDELLDKDKWSRAYDRNGLRWGYMITNMAEQFNSVLVGVPLKRVQLGQRWSTKVDSKMKVQKSKANKHTARCFDKQKKTYEVTERGGITRGGVRFGARAFKVEGEGNSCSCQRPLLYHMPCSHLIHVYLIHAIDEESPNRMPYQFSSRAVVNTWASRFEPYLDPTQWPPMAEERQPPTYPALEAYYEARHRGAAIEAGRVLQPLRVSAHAPPVFDDRYIPYLRVAGLLGVALVVSRGMPVFNAPALIALVDRWRPETHSFHLPSGEMTITLQDVAMILALPLRGHAVTGRTETPGWRAQVEQLFGITLNIEQGQGGKKKQNGIPLSWLSQNFSHLHDDAEPWRVECYARAYILHLLGGVLFPNAGGDIASAIWIPLVANLGDLGRFSWGSAVLAWTYRQLCEACCRQAPSSNMSGCVLLIQLWMWLRLPIEWLPYHTNEASSLTLNSMCNRDSDYFMYQCPLICFWAVEYHLPHRVMRQFGKKQDWPVEDISTGVELHKTYRLFLRPTWTEADIEDDRDSDEGRNPYDVRTRVGYQMEHAPLRDRVRELLRSVNEMGHALQAPRGGEDTENTLRNVLEKVRQRCQKLAARLGCRSVGLDDVYQPRRLPPPLPQSARPSTARHSIRIEEREEVGDSSSSRIPQGRGKGKAPAPPSDDDDDDDEEDEDYVAPDAEEIDMSQLPDAPQGTQPTQYNLRSTRAAKKREAEGGANHPGAAVGEGGASQCREAEGFRAXGGGRRQLPWRRGP

SEQ ID NO: 165420 - protein, 1597 aa, Oryza sativa
  Clone ID: PAT_MRT4530_64227C.1.pep
MAAPATLAPCPCHRGTRAIVEMDRLVRVYYGGRVVEPYVGGHVEFEDMSLKTIFFPTHPTLDELRSRVKEVLGWTEDNVEIRFYGRYDVGQGHKYILNVIGQLEWEVYFDLVKESQFRSLEVFASKLVRTVENLDLNKSPSYHYVEKNFVTYYSRRGGGASKSELVREDLEGEGEKKRPLLGNDLWEAGPSKRHCGTDDVDAVRVMKRELVQEGLDLSEHLSASVHWSSYGVNPEYPTEVAGQYVNPDDYFDVELSGGHDSVSVEVNRDDVDEEASVEQYDVEFAEDSDNDRPFPPLTNNDKLALEECRAFEKVFGRKPDIHEFRDLTHAHGALLDGGINLDQLPEPFQVDGLRKGLEFPSMVALKLWLQEYAIVHHRPYRVVNSAANRRYTVKCENPRWKWKVHTTKRSSGTWRISRVGKEHSCATAEGSGSHRQLTSKFIANRLCNAIKLQPTLSASVLALYIFEVFQYRVKYGKAWRAREEAMKLIYAIKQRNPSMVYHIDTHPDRVVNVDGVTKKIFMRAFWCFGPSIEAFKHCRPVLAIDATFLTGKYGGALMTALSADAEDQLVPLAFALVEKENSRDWCWFIDLVRRVVVGPHREVCIISDRHAGIMNAMMTPVPGLPSVHHRWCMRHFSANFHKAGADKHQTKELLRICQIDEKWIFERDVEALRQRIPEGPRKWLEDELLDKDKWSRAYDRNGRRWGYMTTNMAEQFNSVLVGVRKLPVTAIVSFTFMKCNDYFVNRHDEALKRVQLGQRWSTKVDSKMKVQESKANKHTARCFDKQKKTYEVTERGGITRGGVRFGARAFKVEGEGNSCSCQRPLLYHMPCSHLIHVYLIHAIDKESLNRMPYQFSSRAIVNTWASRFEPYLDPTQWPSYNGEEFVADPNLKIKTRGKRRLKRFKNEMDSGLGGSGRKPPSCVQLDAAPVQNRCSLCHQEGHKKTKCPKRPKKKKSKKILSVREVLQPLRVRAHAPPVFDDRYIPYLRAAGLLGVALVVSRGMPVFNAPALTALVDRWRPETHSFHLPSGQTPGWHAQVQQLFGIPLNIEQGQGGKKKQNGIPLSWLSQNFSHLDDDAEPWRVECYARAYILHLLGGVLFPDARGDIASAIWIPLVANLGDLGRFNWGSAVLAWTYRQLCEACCRQAPSSNMSGCVLLIQMWMWLRLPVGRPKWRQSFTPWPYNEPDMEKIVAYLFKSTATAHAHRDVAYKHYVNEMDCLQPQHIEWLPYHTNEASSLTLNSMCNRDSDYFMYQCPLICFWAVEYHLPHLVMRQFGKKQDWPVEDISTGVELHKYDRVRTKKVKDWGLEHNRYIDEWRTARRNDRYIETIHQNHLFSEYLRWLHRTYRLFLRPTWTEADIEDDRDSDERRNPYDVRTRVGYQMEHAPLRDRVSRKLLRSVNEMGHALQAPRGGEDTENTLRNVLEKVRQRCRKLAARLGCRSVGLDDVYQPGRLPPPLPQSARPSTARHSIRIEEREGVGGSSSSRIKQGRGKGKAPAPPSDDDDDEDEEDEDYVAPDAEEIDMSHIDMSQLPDAPQGTQPTQYNLRSTRAAKRREAEGGANHPGAEVGKGGASQCREAEGFRAGGGRRQLPWRRGP

SEQ ID NO: 165421 - protein, 1527 aa, Oryza sativa
  unsure (1)..(1527): unsure at all Xaa locations
  Clone ID: PAT_MRT4530_64228C.1.pep
MAAPATLAPCPCHRGTRAVVEMDRLVRVYYGGRVVEPYVGGHVEFEDMSLKTILFPTHPTLDELRSRVKEVLGWTEDNVEIRFYGRYDVGQGHKYILNVIGQLEWEVYFDLVKESQFRSLEVFASKLVRTVENLDLNKSPSYHYVEKNFVIYYSRRGGGASKSELVREDLEGEGEKKRPLLGNDLWEAGPSKRHCVEVNRDDVDEEASVEQYDVEFAEDSDDDRPFPPLTNNDKLALEECRAFEKVFGRKPDIPEFRDLTHAHGALLDGGINLDQLPEPFQVDGLRKGLEFPSMVALKLWLQEYAIVHHRPYRVVNSAANRRYTVKCENPRCKWKVHATKRSSGTWRISRVGKEHSCATAEGSGSHRQLTSKFIANRLCNAIKLQPTLSASALALYIFEVFQYRVKYGKAWRAREEAMKLIYAIKQRNPSMVYHIDTHPDRVVNVDGVTKKIFMRAFWCFGPSIEAFKHCRPVLAIDATFLTGKYGGALMTALSAGAEDQLVPLAFALVEKENSRDWCWFIDLVRRVVVGPHREVCIISDRHAGIMNAMMTPVPGLPSVHHRWCMRHFSANFHKAGADKHQTKELLRICQIDEKWIFERDVEALRQRIPEGPRKWLEDELLDKDKWSRAYDRNGRRWGYMTTNMAEQFNSVLVGVRKLPVTAIVSFTFMKCNDYFVNRHDEALKRVQLGQRWSTKVDSKMKVQESKANKHTARCFDKQKKTYEVTERGGITRGGVRFGARAFKVEGEGNSCSCQRPLLYHMPCSHLIHVYLIHAIDKESPNRMPYQFSSRAVVNTWASRFEPYLDPTQWPSYDGEEFVADPNLKIKTRGKRRSKRFKNEMDSGLGGYGRKPPSCVQLDAAPVQNRCSLCHQEGHKKTKCPKRPKKKKSKKNLSARHRGAAIGAGRVLQPLRVRAHAPPVFDDRYIPYLRAAGLLGVALVVSRGMPVFNAPALTALVDRWRPETHSFHLPSETPGWHAQMQQLFGIPLNIEQGQGGKKKQNGIPLSWLSQNFSHLDDDAEPWRVECYARAYILHLLGGVLFPDAGGDIASAIWIPLVANLGDLGRFSWGSAVLAWTYRQLCEACCRQAPSSNMSGCVLLIQMWMWLRLPVGRPKWRQSFTPWPYNEPDMEKTVAYLFESTATAHAHRDVAYKHYVNEMDCCSLNMYDRVRTKKVKDWGLEHNRYIDEWRTAGRNDRYIETIHQNHLFSEYLRWLHRTYRLFLRPTWTEADIEDDRDSDEGRNPYDVRTRVGYQMEHAPLRDRVSRELLRSVNEMGHALQAPRGGEDTENTLRNVLEKVRQRCRKLAARLGCRSVGLDDVYQPGRLPPPLPQSARPSTARHSIRIEEREGVGGSSSSRIKQGRGKGKAPAPPSDDDDDEDEEDEDYVAPDAEEIDMSQFPDAPQGTQPTQYNLRSTRAAKKREAEGGANHPGAEVGKGGAXQCREAEGFRAGGGRRXLPWRRASSSGTNSAAPVSLATLPRRRTLPPSASPLLATSSAVASTSHILATRRRLRWPPPPYSPTSVTNFAN

SEQ ID NO: 165422 - protein, 141 aa, Oryza sativa
  Clone ID: PAT_MRT4530_64229C.1.pep
MLSRARVLLEEGKPSLALQAILLAIRSQGGEQALMQTLNRARELYRQRSQPSPSVDDLASLLAQCAIAESQSTNTNPQQVPGSDPVMMLDSDEVCILAESGRKQIILDAFADGSSFICLKCGGLFSTSRKDEHLAYWCGTA

SEQ ID NO: 165423 - protein, 43 aa, Oryza sativa
  Clone ID: PAT_MRT4530_6422C.1.pep
MPSSVSHPAAARHRYPLTYDGPKGKPVTGEGIPVTGNSIEARQ

SEQ ID NO: 165424 - protein, 1502 aa, Oryza sativa
  unsure (1)..(1502): unsure at all Xaa locations
  Clone ID: PAT_MRT4530_64230C.1.pep
MAAPATLLLMDRLVRVYYGGRVVEPYVGAHVEFEDMSLKTILFPTHPTLDELRSRVKEVLGWTEDNVEIRFYGRYDVGQGHKYILNVIGQLEWEVYFDLVKESQFRSLEVFTSKLVRTVENLDLNKSPSYHYVEKNFVTYSSRRERGASKTELVREDLEEEGEKKRPLFGNELGEAGPSKRHCGSDDMDAARKMKRELVQEGLDLSEHLSESVHWSLYGGNPEYPTQLLTGGHDSVSVEVNREEVDEEASVEQYDVEFAKDSDDDRPFPPLTNNDKLALEKCRAFEKEYAIVHHRPYRVVNSAANRRYTVKCENPRCKWKVHATKRSSGTWRISQVGKAHSCATAKGSGSHRQLTSKFIANRLCNAIKLQPTLSASTLALYIFEVFQYRVKYGKAWRAREEAMKLIYAIKQRNPSMVYHIDTHPDRVVNVDGVTKKIFMRAFWCVGPSIEAFKHCRPVLAINATFLTGKYGGALMTALSADAEDQLVPLAFALVEKENSRDWCWFIDLVRRVVVGQHREVCIISDRHTGIMNAMRTPVPGLPPVHHRWCMRHFSANFHKAGADKHQTKELLRICQIDEKWIFERDVEALRQRIPEGPRKWLDRNGRRWGYLTTNMAKQFNSVLVGVSKHPVTAIVSFTFMKFNDYFVNRHDEAMKRVQLWERWSTKVASKMKVQKSKANKHTSRCFDKXKKTYEVTERGGITRGGVRFGARAFKDEGEGNSCSYQRPLLYHMXCSHLIHVYLIHAIDEESPNRMPYQFSSRAVVNTXASRFEPYLNPTXLPPYDGEEFVADPNLKIKTRGKRRSKRFKNEMDSGLGGSRRKPPSCVQLDAAPVQNRCSLCNQEGHKKPNCPKRPKKKKSKNKIXSVREILQPLRVRTHAPPVFDKRYIPYLRAVGLLGVALVMSRGMPVFNAPALTALVDRWRPETHSFHPPSGENPGWRAQVEHLFGIPLNIKXGQGGKKKQNGIPLSXLSQNFSHLDDDAEPWRVECYARAYILHLLSVVLFPDAGGDIASVIWIPLVANLGDLGHFSWGSAVLAWTYRQLCEACCRQAPSSNMSGCVLSIQLWMWLTLPVGRPKWRQXFTPWPYNEPDMEKTVAYLFESTATAHAHRDVAYKHYVNEMDCLQPQHIEWLPYHTNEASSLTLNSMCNRDSDYFMYQCPLICFXAVEYHFPHRVMRQFGKKQDCLVEDISTGVELHKYDRVRTKKVKDWGLEHNRYIDEWRTAGRNDRYIKTIHQNHLFSEXLSWLYRTYRLFLRPTWTEADIEKDRDSDERRNPYDVRTRVGYQMEHAPFRDRVSRELLRSVNEMGHALQAPRGGEDTENTLRNVXGKILALCRDRSIQNGRPRSIGLRPAHGRGRRXVSDDVTTGGGGSAARACMLAGERRRFGTNGEHQRVERXRGELTGDQRSSGRSTDGDGDDEETAAVFGSTAAMVLRRSSATAKGRTRTATRRRPRRRSSRREAEGGASHPGAAVGEGGASQCREAEGFRGGGGRRQPPWRCGL

SEQ ID NO: 165425 - protein, 1575 aa, Oryza sativa
  Clone ID: PAT_MRT4530_64231C.1.pep
MTMRPVVPKAAWPMSGFTESYPKHLGWTEDNVEIRFYGRYDVGQGHKYILNVIGQLEWEVYFDLVKESQFRSLEVFASKLVRTVENLDLNKSPSYHYVEKNFVTYYSRRGGGASKSELVREDLEGEGEKKRPLLGNDLWEAGPSKRHCGTDDVDAARVMKRELVQEGLDLSEHLSASIHWSSYGVNPEYPTEVAGQYVNPDDYFYVELSGGHDSVSVEVNRDDVDEEASVEQYDVEFAEDSDDDRPFPPLTNNDKLALEECRAFEKVFGRKPDIPEFRDLTHAHGALVDGGINLDQLPEPFQVDGLRKGLEFPSMVALKLWLQEYAIVHHRPYRVVNSAANRRYTVKCENPRCKWKVHATKRSSGTWRISRVGKEHSCATAEGSGSHRQLTSKFIANRLCNAIKLQPTLSASALALYIFEVFQYRVKYGKAWRAREEAMKLIYGEWGEAYVRLPTLLQAIKQRNPSMVYHIDTHPDRVVNVDGVTKKIFMRAFWCFGPSIEAFKHCRPVLAIDATFLTGKYGGALMTALSADAEDQLVPLAFALVEKENSRDWCWFIDLVRRVVVGPHREVCIISDRHAGLPSVHHRWCMRHFSANFHKAGADKHQTKELLRICQIDEKWIFERDVEALRQRIPEGPRKWLEDELLDKDKWSRAYDRNGRRWGYMTTNMAEQFNSVLVGVRKLPVTAIVSFTFMKCNDYFVNRHDEALKRVQLGQRWSTKVDSKMKVQESKANKHTARCFDKQKKTYEVTERGGITRGGVRFGARAFKVEGEGNSCSCQRPLLYHMPCSHLIHVYLIHAIDKESPNRMPYQFSSRAVVNTWASRFEPYLDPTQWPSYDGEEFVADPNLKIKTRGKRRSKRFKNEMDSGLGGSGRKPPSCVQLDAAPVQNRCSLCHQEGHKKTKCPKRPKKKKSKKNLSVREVLQPLRVRAHAPPVFDDRYIPYLRAAGLLGVALVVSRGMPVFNAPALTALVDRWRPETHSFHLPSGEMTITLQDVAMILALPLRGHAVTGRTDTPGWHAQVQQLFGIPLNIEQGQGGKKKQNGIPLSWLSQNFSHLDDDAEPWRVECYARAYILHLLGEVLFPDAGGDIASAIWIPLVANLGDLGRFSWGSAVLAWTYRQLCEACCRQAPSSNMSGCVLLIQMWMWLRLPVGRPKWRQSFTPWPYNEPDMEKTVAYLFESTATAHAHRDVAYKHYVNEMDCLQPQHIEWLPYHTNEASSLTLNSMCNRDSDYFMYQCPLICFWAVEYHLPHRVMRQFGKKQDWPVEDISTGVELHKYDRVRTKKVKDWGLEHNRYIDEWRIAGRNDRYIETIHQNHLFSEYLRWLHRTYRLFLRPTWTEADIEDDRDSDEGRNPYDVRTRVGYQMEHAPLRDRVSRELLRSVNEMGHALQAPRGGEDTENTLRNVLEKVRQRCRKLAARLGCRSVGLDDVYQPGRLPPPLPQSARPSTARHSIRIEERDGVGGSSSSRIKQGRGKGKAPAPPSDDDDDEDEEDEDYVAPDAEEIDMSQLPDAPQGTQPTQYNLRSTRAAKKREAEGGANHPSAEVEKGGASQCREAEGFRAGGGRRQLPWRRGP

SEQ ID NO: 165426 - protein, 109 aa, Oryza sativa
  Clone ID: PAT_MRT4530_64232C.1.pep
LRRVPAPRIVLAAAWGRLGLTRSGARQCSRRGCRAGARVTGITAGRAPDLRLRPQQRRMLRQVISYIESSIAWSCTLTREILGEFLVMHLLSCSSRLIVKLDGSNIWVC

SEQ ID NO: 165427 - protein, 1176 aa, Oryza sativa
  unsure (1)..(1176): unsure at all Xaa locations
  Clone ID: PAT_MRT4530_64233C.1.pep
KSLQFRSLVVFASKLVSTVENLDLNKSPYHYVEKNFVTYSSRHGGDASKTELVREDLEGEGEKKRPLLGNDLGEAGPSKRHCGSDDVHAVREMKRELVQEGLDLSEHLSESVHWLSYGGNPEYPTEVAGQYVNPDDYFVVELSGGHDSVSVEVNREEVDKEASVEQYDVEFAEDSDNDRPFPPLTNNDKLALEEWRAFEKVFERKPDIPEFRDLTHAHGAILDGGINLDQLPEPFQVDGLIKSLEFPSMVTLKLWLQEYAIVHHRPYRVVNSAANRKYTVKCEKPWCKWKRNPSMVYHIDTHPDRVVNVDGVTKKIFMRAFWCVGPSIEAFKHCRPVLAINATFLTGKYGGALMTALSADAEDQLVPLAFALVEKENSRDWCWFIDLVRRVVVGQHREVCIISDRHTGIMNAMRTPVPGLPPVHHRWCMRHFSANFHKAGADKHQTKELLRICQIDEKWIFERDVEALRQRIPEGPRKWLDRNGRRWGYLTTNMAKQFNSVLVGVSKHPVTAIVSFTFMKFNDYFVNRHDEAMKRVQLWERWSTKVASKMKVQKSKANKHTSRMAKEGQPPTYPALEEYYEARHRGAAIEAGRILQPLRVRTHAPPVFDKRYIPYLRAVGLLGVALVMSRGMPVFNAPALTALVDRWRPETHSFHPPSGERGKKKQNGIPLSXLSQNFSHLDDDAEPWRVECYARAYILHLLSVVLFPDAGGDIASVIWIPLVANLGDLGHFSWGSAVLAWTYRQLCEACCRQAPSSNMSGCVLLIQLWMWLRLPVGRPKWRQSFTPWPYNEPDMEKTVAYLFESTATAHAHRDVAYKHYVNEMDCLQPQHIEWLPYHTNEASSLTLNSMCNRDSDYFMYQCPLICFXAVEYHFPHRVMRQFGKKQDCLVEDISTGVELHKYDRVRTKKVKDWGLEHNRYIDEWRTAGRNDRLFLRPTWTEADIEKDRDSDERRNPYDVRTRVGYQMEHAPFRDRVSRELLRSVNEMGHALQAPRGGEDTENTLRNVLEKVRQRCRKLAARLGCRSVALDDVYQPRRLPPPLPQSARPSTARHSFRIEEHEEVGGSSSSRIPQGRGKGKALAPPSDDDDDEEEDEDYVAPNAEEIDMSQLPDAPQRTQPTQYNLRSTRAAKKREAKGGASHPGATVEERGASQCREAEGFPGGRRRAALXPWRRGP

SEQ ID NO: 165428 - protein, 763 aa, Oryza sativa
  Clone ID: PAT_MRT4530_64234C.1.pep
MAAAAAAAASATAAISGALLPHAVACHRLPPRPQLLAVSSSFRRLSLTASPRRASRLVPRADASAEAGEPEPAAEAEAEAVAASTDAEVEEGEAEAAVAVAEEEQEEEDEPPPPSKPPVKFGEIIGILNKQFIEEAEKVKTLPDLRPGDIIELRMQRPNKRRLSLFKGIIIAKHKSGVHTTIRVRRIIAGVGVEITFPILRYSPRIKEIKVIRHKKVIPCLIVGKMIGTSSASSWKERPDFTLNEDNEGKGVAMGGGGTLISIYPEDLTFLFELDKPCYCNLKVVNNSEHHVAFKVSYKCIVYVECHVGGQLLSNKVWTDYGSLNQDGSRTFRILFLGIPVIGPENPRPVKTTSPRKYFVRPNANIVQPWDSCTITITLQAQKEYPQDMQCKDKFLIQSTRVAASTDMDEIPPDTFNKEVDKVIEEIKLKVVYTVPSGSSDDSGITSLGSRSFKSLSDDFTMLKNASIEEIQTIQRLKDERDNMLQQNQQMQRELDVIRRRRSRKSDTGFSLTFAAFVGLIACCLNAMVAIKRYSVQLNAKKCDAHRGNSSISSSILTPNFSHGKRAGMLGNLRSTSHSILCFGGDGIRSPMSTFLDFRLDAQLVEGPSVQLGVAISLVGPGTHPYRGGGSGRRIGGGGWRGGGVQEEAATGDDCRYCAGTLPPLVVLLLRRHVASEAGSGVRGLRSARLKLATQAAPSLSSRTLVGHGDDGNGGYGGVAPVPPTSRRWDAADPNTILRVLCHRDDEVASQFLKRTFQLAERR

SEQ ID NO: 165429 - protein, 1511 aa, Oryza sativa
  unsure (1)..(1511): unsure at all Xaa locations
  Clone ID: PAT_MRT4530_64235C.1.pep
MVAPATMASCPCHRDTRTVVAMDRLIRVYYGGRVVEPYVGAHVEFEDMSLKTILFSTHPTLDELRSRVKEVLGWTEDNVEIRFYGRYDVGQGHKYILNVIGQLEXEVYFDLVKESQFKSLEVFASKLVRTVEKLDLNKSPSYHYIEKNFVTYSSRRXGGASKTELVREDLEGEGEKKRPLFRNDLGEAGPSKRHCDSDDVDVATEMKRELVQEGLDLSEYLSESVHWSSYGGNPEYPTQVAGXYVNPNNYFVVKLSGGHDSVLVEVNREEVDEEASVEQYDVXFAEDSDDDRPFPPLTNNDKLALEECHAFEKVFGRKSDIPEFRDLTHAQGAILDGGINLHQLPEPFQVDGLKKGLEFPSMVALKLWLKEYAIVHHRPYRVVNSAANRRYTVKCENPRCKWKVHATKRSSGTWRISQVGKAHSCAAAEGSRSHRQLTSKFIANRLCNAIKLQHTLSASALALYIFEVFQYRVKYGKAWRAREEAMKLIYAIKQRNPSMVYHIDTHPDRVVNIDGVTKKIFMRAFWCFGPSIEAFKHCRPVLAIDATFLTGKYSDAFMTALSADAEDQLVPLAFASVEKENSRDWCWFIDLVRQVVVGPHREVCIISDRHAGIMNAMRAPVPGLSPIHHRWCMRHFSANFHKAGADKHQTEELLRICKIDKKWIFERDVEALRQRIPEGPRKWLEDELLDKDKWSRAYDRNSCRWGYMTTNMAEQFNSVLVGVRKLPVTAIVAFTFMKCNHYFVNRQNEAVKRVQSGERWSAKVASKMKVQKSKANKHTSRCFDKQKKTYEVTEKGGITRSGVRFGARAFKVEGEGNSCSCQRPLLYHMPCSHLVHVYLIHAIDEESPNRISYQFSSRAVVNTWASRFEPYLDPTQWPPYDGEEFVADPDLKIKTRGKRRLKRFKNXMDSGLGGSRRKPPSGVQLDAVLVQNRCSLCHQEGHKKPKCPKHPKKKKSKKNRSVREVLQPLRVRAHAPPVFDDRYIPYLRAAGLLGVALVMNRGMPVFNTPALTTLVGRWRPETHSFHLTSGENPGWRAQVEQLLGISLNIEQGQGGKKKQNGIPLSWLSQNFSHRDDNAEPWRVECYARAYILLLLGGVLFPDARGDIASAIWIPLVANLGXYKHYVNEMDCLQPQHIGWLPYHXNEASSLTLNSLCNRDSDYFMYQCPLICFWAVEYHLPHRVMRQFGKKQDWPVENISTRVELDKYDRVRTKKVKDWGLEHNRYIDEWRTAGRNDRYIETIHXNHLFSEYLHWLHRTYRLFLCPTWTEADIEEDRDSNEGRNPYDVXTRVGYQMEHAPLRDRVSRELFRSVNKMGHALQSSRGGEETENTLRNILEKVRQRCRKLVARLGCGSVGLEDVYQPRRVPPPLPQSAPISARTSIARHSIRIEEREEVGGSSSSRIPQGRGKGKAPAPPSDDNDDDNDXDEEDEDYVAPDAEEIDMSQLPDAPQGTQPTQYNLRSTQAAKKREAEGGASHPSATVREGGASRGPEVEGPRRRGGGASRCPEVEE

SEQ ID NO: 165430 - protein, 233 aa, Oryza sativa
  Clone ID: PAT_MRT4530_64236C.1.pep
MGGGGTLISIYPEDLTFLFELDKPCYCNLKVVNNSEHHVAFKVKTTSPRKYFVRPNANIVQPWDSCTITITLQAQKEYPQDMQCKDKFLIQSTRVAASTDMDEIPPDTFNKEVDKVIEEIKLKVVYTVPSGSSDDSGITSLGSRSFKSLSDDFTMLKNASIEEIQPIQRLKDERDNMLQQNQQMQRELDVIRRRRSRKSDTGFSLTFAAFVGLIGLLVGLLMSLIFSSPQPAA

SEQ ID NO: 165431 - protein, 59 aa, Oryza sativa
  Clone ID: PAT_MRT4530_64238C.1.pep
TPPPFFFFFFLIYIKFFFFLKNKIFFSFHNNKKFFFFLKKYLNERVGRPLYSITSSLHA

SEQ ID NO: 165432 - protein, 109 aa, Oryza sativa
  Clone ID: PAT_MRT4530_64239C.1.pep
MAALNGKVVVAVMVVAMVAVIFNSFVFCQGFNEINCREMETINVLQGIFRNWIFVGILTATVIFQVIIVEFLGTFANTVPLSGELWLLSVVIGLISMNIFGFLRGFQLI

SEQ ID NO: 165433 - protein, 60 aa, Oryza sativa
  Clone ID: PAT_MRT4530_6423C.1.pep
KNIGEVQKLMDFTSSSVSTTTDKMDAVDLFIELLGYNYAEEHIVFFKLFGACSIFITENN

SEQ ID NO: 165434 - protein, 33 aa, Oryza sativa
  Clone ID: PAT_MRT4530_64240C.1.pep
VVLLATGLWVLLVLSPASHTRGPSAGLTKAADA

SEQ ID NO: 165435 - protein, 87 aa, Oryza sativa
  Clone ID: PAT_MRT4530_64241C.1.pep
RNKQQELSCGRNSGPPYVPTTVLASSAFKRSNQWQNHEIDKKRKQHHNCTTLALMKLPPTQQKQPNNHLQGRLLLTTKKSEHLHGRV

SEQ ID NO: 165436 - protein, 111 aa, Oryza sativa
  Clone ID: PAT_MRT4530_64242C.1.pep
LASCHVSASHWRGSHLANWHVSASLHFSSSETSNQVLIAQGWPSSPKTTDIMKYSFVPPTKLQSWTIAKKKKKLQSWRVRLLPCKAEISFLNIPTVLFCFIIDELLFVEYA

SEQ ID NO: 165437 - protein, 182 aa, Oryza sativa
  Clone ID: PAT_MRT4530_64243C.1.pep
RRWRWCRHAQGGGERRTALRRDSSQVAAVGREQGGGSSSVRGEQRPGTGGSGMCDDGSSRRQVSGGAGGGHGGSGTAKADGGRASGAGRQAAAAPLPLDPAEGRGTAAAGRQRATDASPSATAPAAASGRGGRRRAAGGGEAAVAARGGRAPPPPLLEGRAPPLPLGLWGRGAAAAAWARGL

SEQ ID NO: 165438 - protein, 219 aa, Oryza sativa
  unsure (1)..(219): unsure at all Xaa locations
  Clone ID: PAT_MRT4530_64244C.1.pep
GRNLGLGRKSGLALDPSWADFDPANAGRPISRVLIGRPSVEIRETKPPPSPQPPXNPSPFASLPSLSSTPSLRAPDAPVPKRRRRHLSPQATAAAATPLSPSDCGGGDASTPVPKRQRRRLSPRAQAAVAAPSPXSSGGGGALPPRAATAASPPPAAXAASSPTTGGGGGGSARGGVGGPLASSGGGAPPLCRIQREGSCGGLASLRRRRRLRFDGDLS

SEQ ID NO: 165439 - protein, 451 aa, Oryza sativa
  Clone ID: PAT_MRT4530_64245C.1.pep
MVQLQNFFFFITSMVVPRGTAAPVLLKWFVSRDVPTGASSSNGTIIPIPISLFPFLVYLHSRKFIRSMDRAKSGVLVKASRPILLPDKIGRSSSARNALFRFVPVLHFLIIESMGDLSYLESFCGLLCLQFFRTLFSLPRDRSAKRERALRSKGQTLRPKGNEQQNDKMRCPGHPHIERRVEGFGPVAFPAPPSSSGACLGPPEIGLEALALPTSRLLMAVGHDYYKKVKMNLSISHGGVCIFMLGVLLSNTNKIQFTQRLPLGSELHMGKERCCLRGLDHLHGPTSHSICGNLMIYKPSPTSERFMFEHDESLRADLLPINFPASYENGKLEDFLHRWMKNHEHKNFRFSMFPERRYFFSIRETRSTTEVAIHTNPFTDLYASIGTGSSRTGGWYTTIMKLPFLFSIRIGFLLASSGGSRSLLRQLQKDKLHWNRESFVHNCIKGVKIVA

SEQ ID NO: 165440 - protein, 90 aa, Oryza sativa
  Clone ID: PAT_MRT4530_64246C.1.pep
HILGQPFCDNHPDQNRERVVLMPMWLAQRITIFFELVSDGDGVEPRVKPSQTQFAGRPAALQIGRRGGGREERKGCARPPATQSTSCPSC

SEQ ID NO: 165441 - protein, 56 aa, Oryza sativa
  Clone ID: PAT_MRT4530_64247C.1.pep
KGWFNLPNPGLGDRETKKTPPGKGFNFKKRKGQIFGKKVFYPRKIGPLVTKPPLKP

SEQ ID NO: 165442 - protein, 64 aa, Oryza sativa
  unsure (1)..(64): unsure at all Xaa locations
  Clone ID: PAT_MRT4530_64248C.1.pep
AIYLFLYATFYFFTKLXITKXVSAVLYFGYMLTASYAFFALTGTIGFYACFLFTRLMYSSVKIE

SEQ ID NO: 165443 - protein, 195 aa, Oryza sativa
  Clone ID: PAT_MRT4530_64249C.1.pep
FFFFFFCSIQHTHSHFICIFPTPAQFNTHHSHTPPLSHHTVVPVLCFFGQNPPSSSQCASAFTMHQCASLLHQPPQSVSLVASPTNHPSAGCSVGTHPSHFVCPAHWALPPQQLCAPAHLGIVHTLLLCAQHQFATIQCVCFFVASVVTSVAVHTSWCSVPGPSRTLRHCASSFTSFLCVPFAVLPLFASCPLAF

SEQ ID NO: 165444 - protein, 88 aa, Oryza sativa
  Clone ID: PAT_MRT4530_6424C.1.pep
DRAGKNGTKQIIGVKPPSPFEKTTLHKHLLHPAAGNIRFKGSNFGKYLNTRPNGSYFKIQLTPPRVSLKQPPLKPGGHFFAFLGAAAI

SEQ ID NO: 165445 - protein, 83 aa, Oryza sativa
  Clone ID: PAT_MRT4530_64250C.1.pep
PKKGGGGAKSPPPGKKNPGIPPLSPFGYKRAQLSRNSRAGTPPPGGVPFGPPPKKRIPPAFLVGDPKIFKKGFKIPKPQAQSA

SEQ ID NO: 165446 - protein, 55 aa, Oryza sativa
  unsure (1)..(55): unsure at all Xaa locations
  Clone ID: PAT_MRT4530_64251C.1.pep
SEQIPLLHQVTEDXLKQKQKQSTACKIKRPLTNGEHTKQGVLHHXIXDKQLNTAI

SEQ ID NO: 165447 - protein, 64 aa, Oryza sativa
  Clone ID: PAT_MRT4530_64252C.1.pep
CFHTRDQFTGFVSPFVFIHTIFKRVARATKSKDVVKVALSTPWWTMGCFYLNPTKLSGWENVQI

SEQ ID NO: 165448 - protein, 143 aa, Oryza sativa
  unsure (1)..(143): unsure at all Xaa locations
  Clone ID: PAT_MRT4530_64253C.1.pep
LGEGGPRWTESTDRGGAXTTWCTRGANAAHTRRPRGSHAGSQTDGSDLPPGRSDVGCGSRPXARGHGSNWPGGHGAWRRGAXTQRRREAATGGDRPAAEGGGVAATRAAIAVAKRLGGSAAAKQRGREGXHRGRSTTASDGGR

SEQ ID NO: 165449 - protein, 493 aa, Oryza sativa
  Clone ID: PAT_MRT4530_64254C.1.pep
MEMATSAGEGTSGGGGGGGGAVPEAGGPEIAFFDVETSVPQRAGQGYALLEFGAILVCPRRLVVVGSYATLVRPGDLGVVSAASVRCNGITRDAVAAAPAFRDVADAVYSVLHGRVWAGHNIVRFDLARIREAFAEIGRPPPEPKGMIDTLPLLTQKFGRRAGDMKMASLANYFGLGRQSHRSLDDVRMNLEVLKYCATVLFLEASLPGVLTVENLVERAITRSQANGAASPEVPKPVARSSPDSSKRQRTISRVDNAIQAGGNQQSIDPATNKEPIELISNIEEMTLGSGIQIDASSSGFSGFLEPDDVSTESIQISVPSSYRLTRKTSIKHKGSPIQLCCAGLRIQFGVSTKFLDSAGRPKLNILVDIPENLSKILEFCDGIAQKSSQDSGSTSEWRPLIKKYGYVNCPTVRLHIPTIVSGEAATYGTEIYQKEASGNIQKLVFSKVDVAELDSWFVRGNMVDAFFSLELYDYEENAGIRLVAKKLVVQSK

SEQ ID NO: 165450 - protein, 1555 aa, Oryza sativa
  unsure (1)..(1555): unsure at all Xaa locations
  Clone ID: PAT_MRT4530_64255C.1.pep
MDRLVRVYYGGRVVEPYVGGHVEFEDMSLKTILFPTHPTLDELRSRVKEVLGWTEDNVEIRFYGRYDVGQGHKYILNVIGQLEWEVYFDLVKESQFRSLEVFASKLVRTVENVDLNKSPFNHGVEKNCEAYYSRRGGGASKSELVREDLEGEGEKKRPLLGNDLWEAGPSKRHCGTDDVDAARVMKRELEQEGLDLSEHLSASVHWSSYGVNPEYPTEVAGQYVNPDDYFDVELSGGHDSVSVEVNRDDVDEEASVEQYDVEFAEDSDDDRLFPPLTNNDKLALEECRAFEKVFGRKPDIPEFRDLTHAHGALLDDGINLDQLPEPFQVDGLRKGLEFPSMVTLKLWLQEYAIVHHRPYRVVNSAANRRYTVKCENPRCKWKVHATKRSSGTWRILRVGKEHSCATAEGSGSHRQLTSKFIANRLCNAIKLQPTLSASALALYIFEVFQYRVKYGKAWRAREEAMKLIYGEWGEAYVRLPTLLQAIKQRNPSMVYHIDTHPDRVVNVDGVTKKIFMRAFWCFGPSIEAFKHCRPVLAIDATFLTGKYGGALMTALSADAEDQLVPLAFALVEKENSRDWCWFIDLVRRVVVGPHREVCIISDRHAGIMNAMMTPVPGLPSVHHRWCMRHFSANFHKAGADKHQTKELLRICQIDEKWIFERDVEALRQRIPEGPRKWLEDELLDKDKWSRAYDRNGRRWGYMTTNMAEQFNSVLVGVRKLPVTAIXVSFTFMKCNDYFVNRHDEALKRVQLGQRWSTKVDSKMKVQESKANKHTARCFDKQKKTYEVTERGGITRGGVRFGARAFKVEGEGNSCSCQRPLLYHMPCSHLIHVYLIHAIDKESPNRMPYQFSSRAVVNTWASRFEPYLDPTQWPSYNGEEFVADPNLKIKTRGKRRSKRFKNEMDSGLGGSGRKPPSCVQLDAAPVQNRCSLCHQEGHKKTKCPKRPKKKKSKKNLSVREVLQPLRVRAHAPPVFDDRYIPYLRAAGLLRVALVVSRGMPVFNAPALTALVNRWRPETHSFHLPSGEMTITLQDVAMILALPLRGHAVTGRTETPGWHAQVQQLFGIPLNIEQGQGGKKKQNGIPLSWLSQNFSHLDDDAEPWRAECYARAYILHLLGGVLFPDAGGDIASAIWIPLVANLGDLGRFSWGSAVLAWTYRQLCEACCRQAPSSNMSGCVLLIQMWMWLRLPNEPDMEKTVAYLFESTATAHAHRDVAYKHYVNEMDYLQPQHIEWLPYHTNEASSLTLNSMCNRDSDYFMYQCPLICFWAVEYHLPHRVMRQFGKKQDWPVEDISTGVELHKYDRVRTKKVKDWGLEHNRYIDEWRTAGMNDRYIETIHQNHLFSEYLRWLHRTYRLFLRPTWTEADIEDDRDSDEGRNPYDVRTRVGYQMEHAPLRDRVSRELLRSVNEMGHALQAPRGGEDTENTLRNVLEKVRQRCRKLAARLGCRSVGLDDVYQPGRQPPPLPQSTRPSTARHSIRIEEREGVGGSSSSRIKQGRGKGKAPAPPSDDDDDEDEEDEDYVAPDAEEIDMSQLPDAPQGTQPTQYNLRSTRTAKN

SEQ ID NO: 165451 - protein, 88 aa, Oryza sativa
  Clone ID: PAT_MRT4530_64256C.1.pep
LRDSGPHGDGLLHHLPGYSRRANVHRQADREAGVANYGYPNGSKGGRIKGMHEWLNRGGQDSRDHKVPATTSPWYDLTTQIENLLRAK

SEQ ID NO: 165452 - protein, 822 aa, Oryza sativa
  Clone ID: PAT_MRT4530_64257C.1.pep
DMEEWKRDLIFIQPWCNSPFLWCDKMEAAITMDENLGRSGSFRAAMSIFGESINGRKADKNRGTVPAQEVLSAVTRQLAQSGLDKLNERKAYVDKERAGAESELSRARAMAKELERQIEQTTAKATSQRSELQAMWAARTRRKGTDAPGAERDARYAEVVQELDQAKKELLRLRLEVRSAAEAKAKAERDIVASACTIQSSLRAIDEMKRRVDEANEEHVLVELARIEAERERREIEAQRGAEAERFAADIEAARARVRALQKEASRAREMEAKLAVTNSDVEVLQAEMELVRAMEKSHAKSDEAAEDAARRKKEEAQDKALLKTAEAELDAAKKELETIKAGSFQFMTSMDCTRTEIMRVAEEIRLLKAKEKKADAQVQQLNTKLLKAKARLEAVTAADERSKAIVSNLAAAMKQLKAETEAARMEEDLTKLEKRCVIAEAENIEKEIATTEGRIKQSVKELDAAKALEAEAMRKLRDTVESTMQARASSAARRQGTMTISRFEYEYLTGRAALVRVVTDKKVAAAQAWVQALKASEKEAAARAEAAEREVREMEARAAQVAAEAEKTAAEQKELEQELYDLNAAAERDGLQCAYPRRRSSRVSATSRRSKPRRSSVSAGAWNPRSPSFTIKRKRKISDDFYHVLGDTREVSCDTYQVSDDFSHVSSDTCEVSDDTYQISDDQNILDPISSLLSVFLLSVRLGDAARNGDGGGAARDGDGGGAPGDGERGGVDGDGSDATGDEKAALRMGTGTGTAATRLGTGTAVAPTWLGQVGCSPTPMQMAPLSRAAFPNPRRCRPCPQPRRHLIADPHLHPPRRPPP

SEQ ID NO: 165453 - protein, 1425 aa, Oryza sativa
  Clone ID: PAT_MRT4530_64258C.1.pep
KNFVTYYSRRGGGASKTELVREDLEGEGEKKGPLLGNDLWEAGPSKRHCGSDDVDAAREMKRELVQEGLDLSEHLSASVHWSSYGVNPEYPTEVAGQYVNPDDYFDVELSGGHDSVSVEVNRDDVDEEASVEQYDVEFAEDSDDDRPFSPLTNNDKLALEECRAFEKVFGRKPDIPEFRDLTHAHGALLDGGINLDQLPEPFQVDGLRKGLEFPSMVALKLWLQDYAIVHHHPYRVVNSAANRRYTVKCENPRCKWKVHATKRSSGTWRISRVGKEHSCATAEGSGSHRQLTSKFIANRLCNAIKLQPTLSASELALYIFEVFQYRVKYGKAWRAREEAMKLIYGEWGEAYVRLPTLLQAIKQRNPSMVYHINTHPDRVVNVDGVTKKIFMRAFWCFGPSIEAFKHCRPVLAIDATFLTGKYGGALMTALSADAEDQLVPLAFALVEKENSRDWCWFIDLVRRVVVGPHREVCIISDRHAGIMNAMTTPVLGLPPVHHRWCMRHFSANFHKAGADKHQTKELLRICQIDEKWIFERDVEALRQRIPEGPRKWLEDELLDKDKWSRAYDRNGRRHDEALKRVQLGQRWSTKVDSKMKVQKSKANKHTARCFDKQKKTYEVTERGGITRGGVRFGARAFKVEGEGNSCSCQRPLLYHMPCSHLIHVYLIHAIDEESPNRMPYQFSSRAVVNTWASRFEPYLDPTQWPPYDGEEFVADPNLKIKTRRKRRSKRFKNEMDSGLGGSGRKPPSCVQLDAAPVQNRCSLCHQEGHKKTKCPKRPKKKKSKKNISVREILQPLRVRAHAPLVFDDRYIPYLRAAGLLGVALVVSRGMPVFNAPALTALVDRWRPETHSFHLPSGEMTITLQDVAMILALPLRGHAVTGRTETPGWHAQVQQLFGIPLNIEQGQGGKKKQNGIPLSWLSQNFSHLDDDAEPWRVECYARAYILHLLGGVLFPDAGGDIASAIWIPLVANLGDLGRFSWGSAVLAWTYRQLCEACCRQAPSSNMSGCVLLIQIWMWLRLPVGRPKWRQSFTPWYYNEPDMEKTVAYLFESTATAHAHWDVAYKHYVNEMDCLQPQHIEWLPYHTNEASSLTLNLMCNRDSDYFMYQCPLICFWAVEYHLPHRVMRQFGKKQDWPVEDISTGVELHKYDRVRTKKVKDWGLEHNRYIDEWRTAGRNDRTYRLFLRPTWTEADIEDDRDSDEGRNPYDVRTRVGYQMEHAPLRDKVSRELLKSVNEMGHALQAPRGGEDTENTLRNVLEKVRQRCRKLAAKLGCRSVGLDDVYQPGRLPLPLPQSARPSMARHSIRIEEREGVGGSSSSRIKQGRGKGKAPAPPSDDDDDEDEEDDDYVAPDDEEIDMSQLPDAPQGTQPTQYNLRSTRAAKKREAEGGTNHPDAAVGEGGASQSREAEGFRAGGGWRQLPWRRGP

SEQ ID NO: 165454 - protein, 112 aa, Oryza sativa
  Clone ID: PAT_MRT4530_64259C.1.pep
MLVPEGETNPHMITPTGTGAHAPSDPKKATTTAVRMTRPNHTRTDRNNVERRLVEKQTNNRGGVKKTNPTPTRSSYANHAAIPRDKRAETHHTREQQGTDEDIKTKRIERQD

SEQ ID NO: 165455 - protein, 30 aa, Oryza sativa
  Clone ID: PAT_MRT4530_6425C.1.pep
VLIQDILICDRHGSGQCDPPGSSYKNSCIN

SEQ ID NO: 165456 - protein, 750 aa, Oryza sativa
  Clone ID: PAT_MRT4530_64260C.1.pep
MDRLVRVYYGGRVVEPYVGGHVEFEDMSLKTILFPTHPTLDELRSRVKEVLGWTEDNVEIRFYGRYDVGQGHKYILNVIGGASKSELVREDLEGEGEKKRPLLGNDLWEAGPSKRHCSTDDVDAARVMKRELVQEGLDLSEHLSASVHWSSYGVNPEYPTEVAGQYVNPDDYFYVELSGGHDSVSVEVNRDDVDEEASVEQYDVELAEDSDDDRPFPPLTNNDKLALEECRAFEKVFGRKPDIPEFRDLTHAHGALVDGGINLDQLPEPFQVDGLRKGLEFPSMVALKLWLQEYAIVHHRPYRVVNSAANRRYTVKCENPRCKWKVHATKRSSGTWRISRVGKEHSCATAEGSGSHRQLTSKFIANRLYNEPDMEKTVAYLFESTATSHAHRDVAYKHYVNEMDCLQPQHIEWLPYHTNEASSLTLNSMCNRDSDYFMYQCPLICFWAVEYHLPHRVMRQFGKKQDWPVEDISTGVELHKYDRVRTKKVKDWGLEHNRYIDEWRTAGRNDRYIETIHQNHLFSEYLRWLHRTYRLFLRPTWTEADIEDDRDSDEGRNSYDVRTRVGYQMEHAPLRDRVSRELLRSVNEMGHALQAPRGGEDMENTLRNVLEKVRQRCRKLAARLGCRSVGLDDVYQPGRLPPPLPQSARPSTARHSIRIEEREGVGGSSSSRIKQGRGKGKAPAPPSDDDDDEDEEDEDYVAPDAEEIDMSQLPDAPQGTQPTQYNLRSTRAAKKRYTPGSQAIRRQRKK

SEQ ID NO: 165457 - protein, 456 aa, Oryza sativa
  unsure (1)..(456): unsure at all Xaa locations
  Clone ID: PAT_MRT4530_64261C.1.pep
MEARRVSANPRPSCVRRVLARKRRRPEATANSARKLQRREISALPCRAFSASTTRERFRNIQLQEEFDTHDPKEMGSLLPYLMKRSEIIEIVGASDIIFALSQSGVCAAFSRVSNQRICFLNGRPDEVIRSLFYNKNNDSLITVSVYGSENFSALRCRTTRIEYIRRGKPDAGFPLFETESLKWPGFVEFDDVNGKVLTYSAQDSTYKVFDLKNYTLLYTISDKNVQEIKISPGIMLLIYSRKKGCIPLDILSIEDGKRLKSFKHLLHRNKKVDFIEQFNEKLLIKQEGENLQILDVRNITSIDGTRSELLTXPSAFIFLXYEMHLYLTFRSRSVSVWNFRGELVTSFEDHMLWHPDCNTNSIYITSNQDLIISYCKADPNDPSSEENACSINISEILTGKCLAKIKAGNLNKQRVSKFQSTPSEALGDITALYYDEEREEIYTGNRLGLVHVWSN

SEQ ID NO: 165458 - protein, 446 aa, Oryza sativa
  Clone ID: PAT_MRT4530_64262C.1.pep
MAAAAAVAAVAAAAAAAEPTVSKSAPELVPPAGPTPRGALPLSSIDKTAAVRVSVDFIQVFPPATGGPAADGQEDAVARMRDGFARALVPYYPVAGRIAEPAPGDVVVDCTGEGVWFVEATASCTLADVNNLERPLLIAKEHLLPRPPPEEKLEDLILMAQVTKFTCGGFAVGICFSHLVFDGQGAAQFLKAAGEMARGLPAPSVPPVWDRDAIPDPPKPPPRGPPPSFTAFNFVTQVVDVSPESIARIKEDFSASPTGGGQACSTFDAVTAVVFRCRALAASSLPDDAEVRLGFAASTRHLLAGVLPAVDGYYGNCVYPVGIARHRGAVRGAALAEVVGVVREAKEALAARFTDWLGGGGGGDHYDVPLDYGTVTVSDWSRVGFNEVDYGFGEPGYVFTLNDDVNIVASVIYLRPPAPKRGIRLMLRCVEEPHAAAFADELAKFA

SEQ ID NO: 165459 - protein, 53 aa, Oryza sativa
  Clone ID: PAT_MRT4530_64263C.1.pep
MWASSRPDPAAAGLVPSKSDDGRSFLRQLSSGGHLLPGVGLALYRPSSTSNSG

SEQ ID NO: 165460 - protein, 73 aa, Oryza sativa
  Clone ID: PAT_MRT4530_64264C.1.pep
MDLYLMFHSVLMHVAAALVVLVYIPLSMPVKLFLWAFVKPLRKESLRGKVVLITGASSGIGEITYKPNASWMQ

SEQ ID NO: 165461 - protein, 685 aa, Oryza sativa
  Clone ID: PAT_MRT4530_64265C.1.pep
MAEAFELSEDTLRSTRESQQKLSVRLITTTAVPTSPSTGGSVVAAGSDGGMMWKRQTRSRFRGMMEEMQRIRRSLIAKAAGLVAVMNAYILFITRRAMRRHNHRFRALQPTFRRSIETISRYFAEVLFSIGELRNEMIKPPSSEPHSKITSNRRFNPYFKDCIGAIDGTHVLARVPSTISAAFRGRKKETTQNVMAAVDFDLGFTYVLAGWEGSAHDALILADALERDDGLSVPSGKYYLVDAGYAARPGFLPPYRGCRYHLKEYDRRNYPRDSRELFNLRHSSLRVTIERAFGALKNRFRILYNKPFHPYKTQVKLVLACCILHNWILQFGMDDHVPLESDWNSDSDDEEPDDLDEDNRGMAQIRDDLAGAMWNNRGMAEAGGGNGGHGGHHGALHWTTNMSSLMLRRMVELIATGVRTDKGFNEAHLNQVARSLSDHYGIEISGTQVYNHLRKWRQRWVRITRLKDLSGALWDDQTSTIILEEEHYMGHVKEHPKDAEFLNVPLENYTQMAIIFSNRQATGRFAMGSNEALGNPAGEADSGLGPLDGTIGDGIAAGPSGVGAEGPGIAARASGVGPTDEDSTSDKKRKRASALNEGEVALISNMTDSVNNMASAIGATAHTEVHPDLCNTVMDLPGFSEDQLDLILAYLTKEKAESLVYIQKNEACRARWVRKFLNEHHPESI

SEQ ID NO: 165462 - protein, 63 aa, Oryza sativa
  unsure (1)..(63): unsure at all Xaa locations
  Clone ID: PAT_MRT4530_64266C.1.pep
VHACAQDQSTLLYHLGAMGNYVLSAQSENADTLTIPTKXDSRLKIEPRHLAVTLETESTPRVY

SEQ ID NO: 165463 - protein, 37 aa, Oryza sativa
  Clone ID: PAT_MRT4530_64267C.1.pep
SLHLLFSRGKFFNILSPSFPAKLNEQGLQWHLPVGLD

SEQ ID NO: 165464 - protein, 85 aa, Oryza sativa
  Clone ID: PAT_MRT4530_64268C.1.pep
APLLSEAIVCFNDLINIYEAIVSMTLYQGKHKDILFPVSCDLLFCCELVKVYITPYHDILFSLNITNASTFQHMYHIPSDYLFFA

SEQ ID NO: 165465 - protein, 125 aa, Oryza sativa
  Clone ID: PAT_MRT4530_64269C.1.pep
MLEKLWDDVVAGPRPETGLEKLRKAATTRPLVINKDGDGEASGAAYKRTQSMPTTPTTPVTPSSSSPTTTATTTPRGSNVWRSVFHPGSNLATKSLGANLFDRPQPNSPTVYDWLYSDETRSSHR

SEQ ID NO: 165466 - protein, 119 aa, Oryza sativa
  unsure (1)..(119): unsure at all Xaa locations
  Clone ID: PAT_MRT4530_6426C.1.pep
IKKIDKFFYKKKRLIFTNQKATCLFIKTTTPASFLKKKPYLKKNSNNQPIWAGYNEKEGEVDPSTSYEKKVQIYPILVLLYKMEPNALPAYXCFFWEGNNKLAAGMIIGPIMKGGLLMV

SEQ ID NO: 165467 - protein, 72 aa, Oryza sativa
  Clone ID: PAT_MRT4530_64270C.1.pep
ERPHSLIAYCLSRVSTLKKQGKGLRGCTRGGPLLPARSGGWWACMGLSSFFTMPVCSCFSVTHSRLFILDDF

SEQ ID NO: 165468 - protein, 125 aa, Oryza sativa
  Clone ID: PAT_MRT4530_64271C.1.pep
MLEKLWDDVVAGPRPETGLEKLRKAATTRPLVINKDGDGEASGVAYKRTQSMPTTPTTPVTPSSSSPTTATTTTPRGSNVWRSVFHPGSNLATKSLGANLFDRPQPNSPTVYDWLYSDETRSSHR

SEQ ID NO: 165469 - protein, 670 aa, Oryza sativa
  unsure (1)..(670): unsure at all Xaa locations
  Clone ID: PAT_MRT4530_64272C.1.pep
MAATDSRRLADLDVDELDRLLPLIKPRRRGLQIPPTIAQSPLDNSKKDSEKALRICFLDCFAGLVILPAEQEQLVVLKAILDSFSEATGLKINFHKSTFLPINVLHDEAVRLAGTLGCPIASFPQPYLGLPLSVTKLCLADFQPLIARIDERLAGWRGHLLSSDGRLTLINSVLSALPSYMMGAILLPKGVLXAIDKCRRAFFWTGDEHCHGDNCKIAWDIVCSPKEKXGGAGIKNLEVQNNDEDSASWIDCFQTERVYSAFSDLDDDELDRLLPLIKVTHFAAHRTSAPGGCGCPCAATRRMEEGQASSERTPNPPTVAQSSLDNSKKDSEKALRKRSIKMAMKIINYSEDCMRKIVELNATLPLDQHFFPACIWPRDLEDLRFSKIGFYVDYRLNDTSPTTWGCKRFAHEDKYVASTMLRINGLVFTGDFPHGRSMHVYGFVAVRDDKEPLRNYIFNVSREKACQLNLDSPSLEISPPMRGISVWDSALIEFHLKVKGSDSDSSSDDDILINACMEFDYETIEHDKKLISRIDGPFGPLDMRYIFLKNGIEATIDIDLGSTSEAYDILLVAFSGEDSMTLYKDRVGQHTKFTAVVIVPLDELLHIKAFGTYGSSHFDGNIAVPVLKHGSCKKPFWFQLAEKKSGHKNLPRACLEVTFSTMGYYNTGEM

SEQ ID NO: 165470 - protein, 128 aa, Oryza sativa
  Clone ID: PAT_MRT4530_64273C.1.pep
FVMIARVKPEGMVELVGHFFYGAETTFVGGATVALGKIEFPLVKMIFGGSAWSACKNIDDFHRPLGAGGRFGCLQKRVLAAWKKCFSSSDRSMHTFIIVVLSNRFANLWKKMTIIVRNPTAHVMNYGV

SEQ ID NO: 165471 - protein, 311 aa, Oryza sativa
  Clone ID: PAT_MRT4530_64274C.1.pep
PRVRRVVQYPVRAFYLDGFNLMAHNLSSGADNLYKKLYSTIPSNMECHPKNIVYSPKQHMFLVVFELSGPNGVAHEVVLYWEQTDLQTVNSKGSSIKGRDAAFLGPDDNQYAILEEDRTSLNLFNLKAVATKEALENNAAVLEENTFADNVTNPTERQGPMQFTFESEVDRIFSAPLESTMLYVISGKHIGLAKLLQGYRLSADNGVSITTKTEGKKFIKLKPNESVLQVHWQTTLRGPVVGILTTQRVMIASADLDILSSSSTKYDRGLPSISFDLSLASTFRVLFSYFVVQIPGIMVLAVANCHFLLIT

SEQ ID NO: 165472 - protein, 134 aa, Oryza sativa
  Clone ID: PAT_MRT4530_64275C.1.pep
PGKPEGAVAAPRLDDPAAAPDELIVVFVRHRWSRAPPHGRLPAAAVFQIHAVPPSSRVPPPPPIPEERRAPAGGGRRGAYAGEGRRGFGRGEGFEGGEIWGFAGSGVVRDLWVPLAHHLVGSTQCLHYEERVFI

SEQ ID NO: 165473 - protein, 128 aa, Oryza sativa
  unsure (1)..(128): unsure at all Xaa locations
  Clone ID: PAT_MRT4530_64276C.1.pep
PEKQWSPXXSSTTAVAALPGAARASSFLGGAGRXGRLLLKXAESXSARASFAVRAAAPDXPIWFPGSTPPPWLXGXLPGDFGFXPLGLGSDPXXLXCXXXAXLXHCRXAXLGAAXIFIXXFXNKIWXL

SEQ ID NO: 165474 - protein, 83 aa, Oryza sativa
  Clone ID: PAT_MRT4530_64277C.1.pep
IKPRNDLASFDNASILPARLLGYTACKLIRVDRVAFDCITKEMVASFLREISFMRVVTYYTIFNIFFLCHRSVSWVKLIGNSS

SEQ ID NO: 165475 - protein, 127 aa, Oryza sativa
  Clone ID: PAT_MRT4530_64278C.1.pep
SFWPTTTQAERCWRHGKRFTTEWVHQNHLTIAFLFTILHAPKWVFKRIDRFRRSFLWKGEDPDLDRFSRALQLRWLWFKWKEVDKPWVGMNVPCDEMDTRLFSSSKAHLPPMSLILYGNPQITIRVF

SEQ ID NO: 165476 - protein, 44 aa, Oryza sativa
  Clone ID: PAT_MRT4530_64279C.1.pep
RFGMVGISLQPSLGSDPRRPAKTWIQRRPGWFGRTLGWPNWPKL

SEQ ID NO: 165477 - protein, 138 aa, Oryza sativa
  Clone ID: PAT_MRT4530_6427C.1.pep
MSVRQSGPQFVPRAAWENRGRTSSSSRWPVRKPASPNCTTASRSSPPSTSQCRSVSIHRQRSILTAGDRFAPPELNPPPAFDLRRQRSVRAAGERFATPEIDSRRPSSFGNEEGGEAWRPEEEEGGRRCLGCAARDNS

SEQ ID NO: 165478 - protein, 153 aa, Oryza sativa
  Clone ID: PAT_MRT4530_64280C.1.pep
MPVDEKAILEKKIAAAKVKMEKLQRTTREMEIKLVIWDLMSGRRKNLDDLSLDFVDDLQKAIKKRIQEPSCPAPRVRGIEMSDGPRVSAFQVAAMGQPYKELGKGYLVDSQRGMKSMEMRSSRWNLTREERGLIYGGWVRPDDGLETRNGVGE

SEQ ID NO: 165479 - protein, 164 aa, Oryza sativa
  Clone ID: PAT_MRT4530_64281C.1.pep
MNRRCKNQRCKLCHPSEQKSKSHQVWNVETETDVYEDPCPAKNDVENTPVDNNGTDKSEVHRVLRSHNSKSKDDQKDKWMVSTFREEKTKEPIRYQDLTRICQIQHTVTLSPNSEQLKDKTPKEIVEYKKGLHKTKLLTIAQYIGQAFMKFQHKRIIMVAYNFK

SEQ ID NO: 165480 - protein, 753 aa, Oryza sativa
  Clone ID: PAT_MRT4530_64282C.1.pep
MERTKKNATVPPPPRLAARLLASSTSGPSGAGGGAAGRSGGGRSGAGKERRRPEWGGKERARHPDEEAKEQEVRGHGVGGSRRGAARHDEACPRDLPDGPHHLQLPRHLPVARLDGVENGRVPVVDPPEAAPCRRVAERDNGLLRTAASGATVPSVAATLSEMVARKLSVDSDEDKDSFMHLVSRYLIREEKEMIDWNKVERPTPEMVVPYDSLVQAPRDIPEIRNLLNKLAVLKLNGGLGTTMECVAPKCTIEVRSGLTFLDLAIMQTEIVEKYTNIEIHTFNQNKYPRIITEKFLPLSSEGSTGSHCWYPPGHGDVFFSLCKSGILDTMLSQGKEYVFIASSENLGATVDIEIESLTSTEILNHLIHNKNEYCMELLEIFQVPYENVAFGYRRVNLKAIKRLVKAEALKMEIIPNLKEVDGVKVLQLEKEAGSAIQCFEKAIGVTVPRSRFLAVKNTSDLFLILSDLYIVMDGTVTRNPARDNSTNPLIDLGPEFRKVDSFLDRFKSIPSIVALDSLKISGDVWFGSRITLKGEVTIAAQLGLKLDILDGSVFDNKHSTHSSGAIKYTMKLDEGADCASIDSALNRLNPGSTLILKKDDFYRYIDPIQARNRAMFHSESNCIITATLKDNWFAKLVQGKLWLIILVFHQFKLLSRRRLRWGERRRRTLRSIHQDIQSYLDNYSDSDMWHLIVHSVARVISNVLEDVNRKYMKNHYLGFLAIHSTVFAIEVIGSYAVELNYDIEHYAEPPEL

SEQ ID NO: 165481 - protein, 514 aa, Oryza sativa
  Clone ID: PAT_MRT4530_64283C.1.pep
TKKSNLSYPLDNDDDDDTGEESDAVVPDGVEEVELAKIDVEIKEREWKILLDDIRTLSVGSEISADETQTPKSDDATWIVTGSRASLVKCLKKELVNVRNGRKEVSSMLRVAMHKAAQARLMEKEKNKSPSFAMRVSLKINKVVWSMLADGKSFAEAEINDMIYDFDRDYKDIGIAHLTTKLFVLKNGLANAKSDTVLAPWNPPSEWGKNAMLRVNARQGAPTGGNSVIESLLVDIYPLKIYLTEAMYRMMWGYFFPGDEQHPQKRQELFKVSTTAGTRRVKKSTSIAETNSPSKQSSKDSMLLQKPELRRTSSFDRTWEETVAESVANELVTQFQSQSNAPPESQDAPKEAKLVRSARSTREEKKNMDPNEVKQTRPQKMMDFRNINISQVELQLTYEGLPFAVSDVRLLMDTFHREDFTGTWASLFSRVKKHIIWGVLKSVTGMQGKKFKAKSTSQKEPTASLIAASDFNLSDSDGDEAGGSDQLPAFLKKPNDGAGDGFATSVKGLFSSQR

SEQ ID NO: 165482 - protein, 194 aa, Oryza sativa
  unsure (1)..(194): unsure at all Xaa locations
  Clone ID: PAT_MRT4530_64284C.1.pep
APEDVVGDQAGDGGLLRRQRRGVGDLQAAADEHQERAEKLPXAATRSSFGRIHDRYSSILHAIKSSHGKVARKLKVVRAIRKVSRACLVMACGAAAAASDAVAAHLLFFGLLVGVPGPLLPAPLRPPTLLPCPTPAAATPPRCSAAGTARPAAPAGERRGREREDRERGIEKRVVRMTGGVHVGLTIETDMWVL

SEQ ID NO: 165483 - protein, 42 aa, Oryza sativa
  Clone ID: PAT_MRT4530_64285C.1.pep
RPPAAAPWRRPSTTACARRPTDTASEVIHSCELFTVLMDAGE

SEQ ID NO: 165484 - protein, 53 aa, Oryza sativa
  Clone ID: PAT_MRT4530_64286C.1.pep
LFLAPTFFKITQYNADTHNARALTLRTQTLPYEHLRRLGRQILRDYEVTTPGR

SEQ ID NO: 165485 - protein, 244 aa, Oryza sativa
  Clone ID: PAT_MRT4530_64287C.1.pep
MPPPGRRLPSSLRRRRFSSPPGRAAATASSGPSSGGGRFEEAAMPPPLAPAPFLPPSAPVLLSSGPCGGDGVLRTEQRRRQIRRSGGGRTAAVGGRRRGGRWGRRDRRAPSGRIGGSVAGELQATRSGAAWQSSSRQPDRGRRGRRALGGRIGGGVAGELWEASPLSSRRQIEKAEAVARDELGVAQAAEGRPAVLGGGMHPRLPPPLSHAVAARRGRRRRAPRLAVDRAARAARFVDLLPICV

SEQ ID NO: 165486 - protein, 90 aa, Oryza sativa
  Clone ID: PAT_MRT4530_64288C.1.pep
SPGCRNSHEGYFGRNFIVIPITIRGLFAFTGLLIIVDQVVIFCMGVLLYCCFWYWWVFNFELLRGLQDSFMPIYHQFFWSGVVLLEDKML

SEQ ID NO: 165487 - protein, 118 aa, Oryza sativa
  Clone ID: PAT_MRT4530_64289C.1.pep
MSSSLSHLPPFLSLLLTLWPPNTSSATSNAACHDNFSVSLAPPHPSHVSFCVALFGAIASSIARRFTAAVAPSTSTVRQPPRKTGTTTAIAAAMPRTLPLARIKEVDSTLTPKQVIAW

SEQ ID NO: 165488 - protein, 82 aa, Oryza sativa
  unsure (1)..(82): unsure at all Xaa locations
  Clone ID: PAT_MRT4530_6428C.1.pep
EPTGHSSPPKNPPGGARLPTANAQLTRPRISIQFSALALCQGSIAQLFXPNVNPRHNPRQGGLRERGGDRLQAFEPLRQSGG

SEQ ID NO: 165489 - protein, 139 aa, Oryza sativa
  Clone ID: PAT_MRT4530_64290C.1.pep
MAALGSAAWWARTAMGDAVEEAGDGSAGVDGVVGERRGGGATAMAALCRRCGGGATAMAALCRRRGGGATAMAALCRRHGGGCDGCGRGGGCDGCGRYPPMCEDEPSSWVRIVAPLDLANWLILHVSVRVGVTATTTEF

SEQ ID NO: 165490 - protein, 189 aa, Oryza sativa
  Clone ID: PAT_MRT4530_64291C.1.pep
MFNRLFGKPKEQANASALATLDKLNETLDMLEKKEKVLEKKAAAELERAKEFSKAKNKRAAIQSLKRKKLYEQQIEQLGNFQLRIHDQMIMLEAAKATTETVDALRTGAAAMKAMQKATNIDDVDKTMDEINEQTENMKQIQDALSAPLGASADFDEDELEAELEELEGAELESQLLEPVAASPCASRA

SEQ ID NO: 165491 - protein, 148 aa, Oryza sativa
  Clone ID: PAT_MRT4530_64292C.1.pep
MTALVLTELHRMRDKKKASDTLAEDVAFIKKDLEFMESFLADAADAEKRSHTHHTTTTTTPSKSLRTWLRHIRGLSQDGNHYDVEDYLQEFCLRAEKPPRAKSKLLLPLDTITKQISRLRKEIEHVNKTSGIYCNALNFGPDAAQPMV

SEQ ID NO: 165492 - protein, 647 aa, Oryza sativa
  Clone ID: PAT_MRT4530_64293C.1.pep
MPDPLPSATSAFHSGGVIPNLRSSLAANPSGFLSTSTSSTVEETPYRTRPLSGGPLSKLQAPRSNFSLKDDMDVFSPLVDVQPFTPSSGSLWDDHGSDETKKDDKLGEKKLSTTRKFPFIEDNNEPHPISDWKSISNSRQDDASSATTTSMPSWKSELSITSPETATGNALSDRLTHRQQVSRFGASAFQTGSFAFAGLQDSAPTTGNSLKGSLTSNILMNLQNKGVLSNARPSLDISTSSLQSSLSSGLMAKTMPPVNSDQPGAAQSSSQWRPSTYTDRVSTSSVFSEGLASAFGSPKSKKTGAETKDELLSSLLSRQEAAAASSSANLVANNGVVPPQLPTSGLSADQQGASSFSLQYVQRMLEESLGSVQKSIHEDVRNLHIELLRQFHMQEALADCTSLMNCDFAFVSRRRCVEFGFNITGAAMFNRLFGKPKEQANASALATLDKLNETLDMLEKKEKVLEKKAAAELERAKEFSKAKNKRAAIQSLKRKKLYEQQIEQLGNFQLRIHDQMIMLEAAKATTETVDALRTGAAAMKAMQKATNIDDVDKTMDEINEQTENMKQIQDALSAPLGASADFDEDELEAELEELEGAELESQLLEPVAAPPVHPVQVPGTRIPTRPAPQKASAEEDELAALQAEMAL

SEQ ID NO: 165493 - protein, 76 aa, Oryza sativa
  Clone ID: PAT_MRT4530_64294C.1.pep
MSCASSTHHHSPQRTNKISNPWIAHQFSSICIVLYMSLVDIKHIHINTWCVLSSMLLFHRHTHTHTHCTGKHNGIP

SEQ ID NO: 165494 - protein, 123 aa, Oryza sativa
  Clone ID: PAT_MRT4530_64295C.1.pep
PNGSMACPVQREQEPRPAVYVPPLPRGGKPHLPAGELQRHRARDLALGGKNSGNRGPVPRTGGAIFPTGGWPPLKATPAARLPRSGGQPLPPGLSPTMVQHLSIAGRLLLHHPTVACQIRRPL

SEQ ID NO: 165495 - protein, 108 aa, Oryza sativa
  Clone ID: PAT_MRT4530_64296C.1.pep
MKNYFKFTLIQKESFISRINARFIVLLWGEKSCLNSEVVNGIPLYDFKDITQLGRESRNTLRHSHEQGQQVVFETITPDDVATLIYTSGTSGTPKGVMLTHRNLLHQI

SEQ ID NO: 165496 - protein, 858 aa, Oryza sativa
  Clone ID: PAT_MRT4530_64297C.1.pep
MLDAVVAAMCRAGHCGVRMALAETGWPNAGDLDQFGANARNAATYNRNMARHLASGAGTPRRPGMRMPAFVFALFNEDLKTGPATERHWGLFHPNGSAVYEVDLTGRRPPASYPPLPPPATNDAPYPGKLWCVVGAAAANETAVREQMEAACADEAALCAPVRAGGECYLPNTVAAHASYVFSAHWNKFSKVYGGWCYFAGLAMETTTDPICTVLKFMLSTKNNQNPTKTQGFDFRRRMKLENPVRRKCSPLLESALLPGGNGLTTHDWMAVPDIWRTAAEKYADRVALVDPYHEPPSELTYKQLEQEILDFSQGLRAIGVAPDEKIALFADNSCRWLVADQGIMATGAINVVRGTRSSDEELFQIYTHSESIALVVDSPQFFNRLAESFISRINARFIVLLWGEKSCLNSEVVNGIPLYDFKDITQLGRESRNTLRHSHEQGQQVVFETITPDDVATLIYTSGTSGTPKGVMLTHRNLLHQIKNLWDFVPAVPGDRFLSMLPPWHAYERASEYFIFTYGIQQVYTTVKYLKEDLQRYQPQYIVSVPLVYEILYSSIQRQISSSSTARKFVALALIKISLLYMEAKRIYEAGISGGGSLPMHVDKFFEAIGVKVQNGYGLTETSPVVAARRPFCNVLGTVGHPVKHTEIKVVDMETGEVLPDGSKGVVKVRGPQVMKGYYKNPSATNKVLDQEGWFDTGDIGWIAPHCPTGPSRKCGGMLVLEGRAKDTIVLTTGENVEPAEIEEAASRSDLINQIVVVGQDKRRIGALIVPNYDEVLATAKRKSILDGNNELAKDKVLNLLYDELRTWMVDCSFQIGPILIVDEPFTVDNGLLTPTLKLRRDKVTAKYHREIDALYK

SEQ ID NO: 165497 - protein, 83 aa, Oryza sativa
  Clone ID: PAT_MRT4530_64298C.1.pep
ADRPSTQQINPYAAAHRRRRTLAPSPPRPQPLSPSIAAFGERLEVEEEKRERERLTGLEGSSDSIDNINQSQDIEQGKLPYTF

SEQ ID NO: 165498 - protein, 981 aa, Oryza sativa
  Clone ID: PAT_MRT4530_64299C.1.pep
MRLFQSFFIPQLLQGAVVGGCYFQPRPGTAGQYIESHLRKKWEDWKKDWFYTALPDHPRLRLPVGPPERSAAWLAVSELGEEYDAVWDHLRGLRSLGLTGAMVFGDYFRRRIAPLQDRSHGAWEYTGPNDPMRTHVGERWDWGEEDAKMVIRRVLGLDSAEQTLIPDGILPLCCDRDRESILAMMSVVGAGRSRSCRGGTGGSTAGVGGGGATAGGSRTSGPGGGGSSRSPGPNRGPGDDSASDLKEKRKMSESRPPSPPRGGGAERVADRPPAGHKRPAGPEAGRKKKRLRKIGQTEPCRGSFIEPPKWTFNRPPRRVHAERHPGSGGEGGRGSDAEGQGGPEPEVEAEIGGGPEPEAEAKIGGGPEPEAEAESTRGPEAGGERDGRSPLHLGRPRGWSRRRGGARAAPSLVGIQQHSIITGAGRDFFFSDSGKYGAAPAGARRRRFHRPGGAQAQVQALAEERAALEAEWAQLAADRARVDEGRHAMDDMVRVGHKMRQAQLAKIQAREESLDSIMREVEEERQAALVALSVLDEALGDIRLQYEAHAEDLAKRIKDARGILDAAVAQERRVSEANASLRAQTAALEAERRALDERARSAQEFETTIRQRIEVLNQSQREQNARDQEQAQRAQELERRTQVLEERARLLDQRESTLAAHERTAAEVEASLRLREEVAAERDRITLAVKASADRRAEELRLREEACRERDVALAEREAEVNRREVASRQLGEQLAKREEAVAGREARHLESARAKRAAIAARASELEAREKDLAAGGQPGGAELGSQLATAQSTLADLERLVQDQAGEIAALRLTNEIGPGQLSDAVDRLERAGRRVSISVRRDSKLPPTLPALALRLDGLAADLERLEEEVSETVKSSSASLARAAVELVLVSHQVRDPDFVPWRALEDFPPGTEARAREQVREAADAIVSNFEGSAPRFTFGLASDEESGSGDDDDDFGGEDWDNVVSGASLGGPGTP

SEQ ID NO: 165499 - protein, 129 aa, Oryza sativa
  unsure (1)..(129): unsure at all Xaa locations
  Clone ID: PAT_MRT4530_6429C.1.pep
LSCKLQLRHHHLFLLRKLRLLPYLFLPSLPYLFLSSSLLFGLGGPGGGRRAGPGGGAAAGAARGAEGHGAARRRAAARRAEGGAAAGGGATAGGGAEGGAAADGGXAVAGWRGEEAAAAGRAAPPWFFF

SEQ ID NO: 165500 - protein, 495 aa, Oryza sativa
  unsure (1)..(495): unsure at all Xaa locations
  Clone ID: PAT_MRT4530_642C.1.pep
MAARVVTPRHINAVCNALNRSVTGRMTDRTGVVRLCAARVSGNVHALRSLGTLVTLNHNPKHRSRVFGFIAARTCINPLCLLSQKPRISPAALGGTXKGGPHGSLVEKITLRLLARXVGGAFVIFEVLSSAGMISIAPPMQGKAQPLQECRATPGRGLGPPPLPRVRLAARYLWRVFGMSNDPQKFRPSFTERYHGSVNTSESLXNHTTIIXAAWGDDRVKANFFPMALXGQARGSLMNLPPAXWLALVPPAAYSARPGSTDRPFKLQQLALAPPASYSAQLGFIAGEDCWLWKVQSSHSRENNRLNRXNRTRTEVNKRQGQVRYAAXGHRAKFLSPRHLGTAEGSGKXGWRVNVAKLPPANFQDDRTEDRTTYHXTRRVASTLTTWEKFWSGLTPGATIGDMGPGVPTYPHLWRPEXSRHAAFNAVCNALNRSVTGRMTDGTGVVRLCTXSCVRRRAAXHVPSNNDGERFSSYGRKLNACQPDLSYVEDCKLIM

SEQ ID NO: 165501 - protein, 156 aa, Oryza sativa
  Clone ID: PAT_MRT4530_64300C.1.pep
QVYTTVKYLKEDLQRYQPQYIVSVPLVYEILYSSIHRQISCSSTARKFVALALIKISLLYMEAKRIYEGTVLSNNPVKPSFIVYMVNWLSARIVAALLWPLHNLAKTLVYKKIHSAIGISKAGISGGGSLPMHVDKFFEAIGVKVQNGYGLTETSP

SEQ ID NO: 165502 - protein, 617 aa, Oryza sativa
  Clone ID: PAT_MRT4530_64301C.1.pep
MAALPAYLLLLLLILVILRPAAAPGAASQPPTSEPHLPPPLLAQKVQVWPKPTSISWPSAVYAPLSPSFSVRAVLSHPSLRQAVAFYTRLIRAERHAPLVPPANYTLSRVPVRTLTLSVSDPDVPLGPAVDESYTLSVLPDSGSADISAATPWGAIRGLETFSQLAWAGGGAASGGQPIVPSGIEISDRPHFTHRGILLDTARNFYPVRDILHTLRAMAFNKLNVFHWHITDAQSFPIVLPTVPNLANSGSYSPTMRYTENDVRHIVSFAASFGIRVIPEIDMPVYSRLSVARFGSGHTGSWAGAYPEIVTCANRFWAPHAEPALAAEPGTGQLNPLNPKTYRVAQDVLRDMVALFPDPYLHGGADEVNTACWEDDPVVRRFLAEGGTHDHLLELFINATRPFVAQELNRTVVYWEDVLLGPKVTVGPTILPRETTILQTWNDGPENTKRVVAAGYRAIVSSASYYYLDCGHGGWVGNDSRYDKQEKEREGTPLFNDPGGTGGSWCAPFKTWQRVYDYDILHGLTDDEAQLVLGGEVALWSEQSDETVLDARLWPRAAAAAETLWSGNKGSNGKKRYANATDRLNDWRHRMVERGIRAEPIQPLWCSLHPGMCNLSQ

SEQ ID NO: 165503 - protein, 817 aa, Oryza sativa
  Clone ID: PAT_MRT4530_64302C.1.pep
MVFGDYFRRRIAPLQDRSHGAWEYTGPNDPMRTHVGERWDWGEEDAKTVIRRVLGVDTAEQTLIPDGILPLCSDRDRESILAVMSAIGASRSRSRRGGTGGSAIGVGGGGLTTGGSRTSGPSGGGSSRAPGPSRGPGVDSASDPKGKRKMSESRPPSPPHRGGAERGADRPSAGHKRPTAPEAGRKKKRLWKIGQTEPCRGSFIEPPKWTFNRPPRRSDPLQGTKSERSERPGLGRSRAAGPSQPPGGAHGPHTESDPGFTSAGTRPAASDSGGDVPPEGGSETRIHAERHPGAGDEGGRSPEAEAGDGPEPEAEAKTAGGPEPEAEAESTRGPEVLAAANSTVQEGLNAQVQALAEERAVLEAEWAQLTADRARVDEGCRAVDDMVKVGHKMRQAQLAEIQAREETLDSVMRETEEERQAALIASSVLGEVLGDIRLQYEAHAEDLAKRVKDAAEFEATIRRRIEVLDQSQREQDARSQEQAQRAQELERRAQALEDRARLLDQRESTLAVHERMAVEAEASLRLREEAAAERDRITLAVKASAARHAEELWFREEACRERDAALAEREAEVNRRGHCRREARHLESARAECAAMAVRASELEAWEKDLEAGVQPGGADLVSQLTTAQSTIADLERLVQDQAGEIAALRLTNEIGPGQFSDAVDRLERARRRVGISVRRDSKLPPTQPALALRLDRLAADLERLEEEVGEIVKSSSASLARVAVELVLASHQACDPDFVPWRALEDFPPGTEAMAREQVREVADAIVSNFEGSAPRFTFGLASDEESGSGDDGDDVGGEDWDDVVSGAGLGGLGTP

SEQ ID NO: 165504 - protein, 218 aa, Oryza sativa
  unsure (1)..(218): unsure at all Xaa locations
  Clone ID: PAT_MRT4530_64303C.1.pep
MPLAGMALLQLREHCSLLPNPLRPARNPRKNRLLPPNSAKVPGFSRISIHGAPPAPEAAILEERVEVDVDVEAAVVPWRDAFLFPVAAAVVASWPLPSLAAEAGGKVSLESIVVAIDDFNNRNPFFVGRGVXVWLVAIPLVQEYFKKYKXAVSAIDAFRKLRDEPGAQLLDIREGGKSVRFMXASPNLRLVEKAPGXVEFDEKDQEGSVKEVLARFPD

SEQ ID NO: 165505 - protein, 897 aa, Oryza sativa
  unsure (1)..(897): unsure at all Xaa locations
  Clone ID: PAT_MRT4530_64304C.1.pep
MRLFQSFFIPQLLQGAVVGGCYFQPRPGTAGQYIESHLRKKWEDWKKDWFYTALPDHPRLRLPVGPPERSAAWLAVSELGEEYDAVWDHLRGLRSLGLTGAMVFGDYFRRRIAPLQDRSHGAWEYTGPNDPMRTHVGERWDWGEEDAKMVIRRVLGLDSAEQTLIPDGILPLCCDRDRESILAMMSVVGAGRSRSCRGGTGGSTAGVGGGGATAGGSRTSGPGGGGSSRSPGPNRGPGDDSASDLKEKRKMSESRPPSPPRGGGAERVADRPPAGHKRPAGPEAGRKKKRLRKIGQTEPCRGSFIEPPKWTFNRPPRRRGGARAAPSLVGIQQHSIITGAGRXFSSPTPASMEPLLQVLAAADSTVREGLXAQVQALAEERAALEAEWAQLAADRARVDEGRHAMDDMVRVGHKMRQAQLAKIQAREESLDSIMREVEEERQAALVALSVLDEALGDIRLQYEAHAEDLAKRIKDARGILDAAVAQERRVSEANASLRAQTAALEAERRALDERARSAQEFETTIRQRIEVLNQSQREQNARDQEQAQRAQELERRTQVLEERARLLDQRESTLAAHERTAAEVEASLRLREEVAAERDRITLAVKASADRRAEELRLREEACRERDVALAEREAEVNRREVASRQLGEQLAKREEAVAGREARHLESARAKRAAIAARASELEAREKDLAAGGQPGGAELGSQLATAQSTLADLERLVQDQAGEIAALRLTNEIGPGQLSDAVDRLERAGRRVSISVRRDSKLPPTLPALALRLDGLAADLERLEEEVSETVKSSSASLARAAVELVLVSHQVRDPDFVPWRALEDFPPGTEARAREQVREAADAIVSNFEGSAPRFTFGLASDEESGSGDDDDDFGGEDWDNVVSGASLGGPGTP

SEQ ID NO: 165506 - protein, 122 aa, Oryza sativa
  Clone ID: PAT_MRT4530_64305C.1.pep
MAQDAGDTVLPASRITTDRHLSLPRKIMSEGAVVRAGESRLRPRYPERSVHLLSFAMAGLIPPFFGFFHEVLDCYEIHALHLAPNAVMTLAIFAHLCEMFIGGQPPPSKPDTPEPISPMGAI

SEQ ID NO: 165507 - protein, 225 aa, Oryza sativa
  unsure (1)..(225): unsure at all Xaa locations
  Clone ID: PAT_MRT4530_64306C.1.pep
LHARSAQEFEATIRRXIEVLDRSQREQDERSQEQAQRAHELERRAQALEERACLLDQRESTLAAHERTAAETEASLGLREEATAERDRTTLAAKASEAXARRSYGSGKRRAEREAEVNRREVALRRLGEQLAKREEAVAGREARHLESARAECAAMAARAFELEAQEKDLVAGGQPGDAELVSQLTAAQSTLADLERLVQDKAGEIAXLRLTNEIGPGQLCYAVY

SEQ ID NO: 165508 - protein, 54 aa, Oryza sativa
  Clone ID: PAT_MRT4530_64307C.1.pep
VRFTHGNISCSHTIVFGRLLLTMWINGSRFVPRMAWPILMGDVPELLREDTLLS

SEQ ID NO: 165509 - protein, 91 aa, Oryza sativa
  Clone ID: PAT_MRT4530_64308C.1.pep
MAASPADKRPERVRSRQEIGARDETGIRTARDTDQQEKDDHTVINRSSQSVPLPCPILLQSFHHVPRYNLLSPNWSCTVTSDKYHHRLLVA

SEQ ID NO: 165510 - protein, 35 aa, Oryza sativa
  Clone ID: PAT_MRT4530_64309C.1.pep
HSSGHIYLECMLNSIALVKFSHSVMLYHYHALVYI

SEQ ID NO: 165511 - protein, 54 aa, Oryza sativa
  Clone ID: PAT_MRT4530_6430C.1.pep
ISKVICTVVLFSKMQMFHRTAILCHIVIRGCHVIQLRTGQRILFVRKPLRLKNP

SEQ ID NO: 165512 - protein, 131 aa, Oryza sativa
  Clone ID: PAT_MRT4530_64310C.1.pep
RARKIQRFLSQPFHVAEVFTGAPGKYVELKESVNSFQGVLDGKYDDLPEQSFYMVAGIEDLVGGGVIILPRATMPLAFSAVSVSACAGGRPLLWKVPSDPAPGLCSVQDRSVGRALPCAAAAAAAAACLAL

SEQ ID NO: 165513 - protein, 395 aa, Oryza sativa
  Clone ID: PAT_MRT4530_64311C.1.pep
MDFTQYRDCFAWEYFEMPGISRSIVEHRLPIKLGYQPYKQPPRRCKADMYDAIKAEIKRFYDVGFIRPCRYAEWVSNIVLVIKKNGKLRVCIDFQGLNKATPKDEYPMPIADQLVDAASGHKIISFMDGNAGYNQIFMAEEDIHDTAFHWPVVKSKEIADHIADLRKKGVAFKLYLSADEKSIGSVLIQEFEGKERAIFYLSRRLLDPETRGASFEFACTIKLYATNNQAEYEAVLKGLQLLKEVEADAIEIIGDSLLAISRLAREYECKKDTLMIYNEKCCELMDSFRLVTLKNVSREQNMQTNDLAQGASGYKPMVKDIEIEVATITADDWRRIDFQDELTADDYHNLMVDELEDLVQSRLRALEKVVRDKERTTLDYNKKVVPKSFSEEELV

SEQ ID NO: 165514 - protein, 86 aa, Oryza sativa
  Clone ID: PAT_MRT4530_64312C.1.pep
GTKWFSYIISYWHTQMGWSLFTLAYKGLIGWWEPGIYWEHFNTLPTTTTQLVLPNHTFQPQPLGWIRYLNFANATLGLSNDLLALY

SEQ ID NO: 165515 - protein, 1324 aa, Oryza sativa
  unsure (1)..(1324): unsure at all Xaa locations
  Clone ID: PAT_MRT4530_64313C.1.pep
MEFIRVKALFFSVGRVDAAASKDPLFVEVEADVWESEQGKFPRKNRLPQKKLLVHQRLGPIHENFFQDESANEGEKIGKKQWCPSAEFGVDQADVEEDIVEESLAKLVLSPEQAIFEKLEGAENRYLKPLYVKGFVNGKPISKMLVDGGAAINLMPYATFKKLGKTADDLIKTNMVLKDFGGNPSKTKGLNFFYFKSFFVPKCNFKIKISKSINMQQYSGTINSXLIQKLFNYKVVGRVEGYNFKKKFDLNEXSASLGTGMTQLNKFEDLNRRFVSLGTGKTQRYKFRXVMDFTQYRDCFAWEYFEMPGISRSIVEHRLPIKLGYQPYKQPPRRCKADMYDAIKAEIKRFYDVGFIRPCRYAEWVSNIVLVIKKNGKLRVCIDFQGLNKATPKDEYPMPIADQLVDAASGHKIISFMDGNAGYNQIFMAEEDIHDTAFHCPGAIGLYECVVMTWXLKSAGATYQLAMNYIFHDLIGLLVEIYIDDVVVKSKEIADHIADLRKVFERTRKYGIXINPTKCAFGVLGGQFLGFLIHERGIEVTQRSINAIKNIEPPEDKKKLQSLVGKINFIRRFISNLSGKMAPFTPLLRLKADQEFLWGAEXXKALDNIKEYLSSPPVLIPPQKGVAFKLYLSADEKSIGSVLIQEFEGKERAIFYLSRRLLDPETRYSAVEKLCLCLYFSCTKLRHYLLSNECTIVCKTDVVKYMLSAPVLKGRVEKWIFALTEFDLRYESPKAGKGQALADFIVEHHDDSIGSVDIMPWTLFFDGSVCTPXCGIGLVIISPRGASFEFACTIKLYATNNQAEYEAVLKGLQLLKEVEADAIEIIGDSLLAISRLAREYECKKDTLMIYNEKCCELMDSFRLVTLKNVSREQNMQTNDLAQGASGYKPMVKDIEIEVATITADDWRYDVYNYLKNPSQSAARKLKYKALRFFLLDYELYYRTIDGVLFKCLSTNQAKVEMGEVHEGICSTHQSTQKMKWLLRRVGYFWPMMLEDCFRYYKGCQDCXKFGAIQRAPASVMNPIIKPWPFRGWGIDMIGQINPPSSKGHKYILVATDYFMKWVEVIPLKKVDSGDAIQFVKKHIINXFGVPQTITTDQGSIFVSDEFVQFAKSLGIKLLNSSPYYAQANGPAXAYNKSLIKLIERKIADFPRXWHSRLAKVLWAYRMACHGSIQVPPYKLVYGYXAILPWETKIGSRRIDFQDELTADDYHNLMVDELEDLVQSRLRALEKVVRDKERTARHYNKKVVPKSFSEEELVXKVDLXPIGTRDNKFDKWSPNWEGPFQIYKSISKGAYMLQGLDGEIFGRALNGKYLKKYYPSVWIHS

SEQ ID NO: 165516 - protein, 185 aa, Oryza sativa
  Clone ID: PAT_MRT4530_64314C.1.pep
MVRYAATEIQPAKSARARGAYLRVSFKNTREPAQAINGWKLQRAVTFLENVKEHKEAVPMRRYAGSTGRTAQGKRFGVSKARWPIKSAEFLLGLLKNAEANADAKGLDTGALVVKHIQVNQAPKQRRRTYRAHGRINPYMSNPCHIELILTEAEEVVQKSDAVAEREHLSSRQRGARLRKAITSA

SEQ ID NO: 165517 - protein, 89 aa, Oryza sativa
  unsure (1)..(89): unsure at all Xaa locations
  Clone ID: PAT_MRT4530_64315C.1.pep
PVNPRLLMREQPQHSGXVANRLTQDQVAATFLPPQPPRQQPQGGNLNYQYQPPSPQAQYQPGGLTQPQFAPQYGXFEPLQQQSQGAAQQ

SEQ ID NO: 165518 - protein, 416 aa, Oryza sativa
  Clone ID: PAT_MRT4530_64316C.1.pep
MGGGGEGSGRRVGARLATGKGGGGSGRRAGGGRGAEVSRAPATLGNFDHSGWVLVECKVGDQGLVKVAALNPETAPVAPLELEFEENKNVVLSVRGQNSVHLSGYYICSYNGDYGENSKQATKETSLLKYASGLPCKPVLIGQFRRPVLACENCLISRVSKDDGAAENNDEKQGDEAKQSKNVQAELQPHIRVLDSDHGENSKQATKEMESNAMDEDASLGLEHTLGGNVVQAASQEENASQTHEDNDAADHIIQQTDPPILVSEDDGTAEDNDEAELQPRIRVLDSGMTIEDLAKGNVGAKIASCGKKVYVKYVCMLSNGDTVDPTGESSTCKFKLGAGEVISGWDLGIDGMRVGGIRRLGIPPHLGYGDVGRGNIPPNAWLNFDIELLKVKSGRKKARKVDFMYVALDRAYIQL

SEQ ID NO: 165519 - protein, 175 aa, Oryza sativa
  unsure (1)..(175): unsure at all Xaa locations
  Clone ID: PAT_MRT4530_64317C.1.pep
IARTSQPTALASTPLPVPSAMAPGQPVNPRLLMREQPQHGGQVANRLTQDHVAATFLPPQPRXQLIQQTPLRQQIVQPIQHQGSIGASAGFATPGGQPQVVPEHLVRNIQPNLHNYQGGNLNFQYQPASPQAQYQPGGLAQPQFASQYGQFEPMQQQSQGVAXQQPWADVIVDSD

SEQ ID NO: 165520 - protein, 173 aa, Oryza sativa
  unsure (1)..(173): unsure at all Xaa locations
  Clone ID: PAT_MRT4530_64318C.1.pep
TDVQPSTQAVPSVPSAMAPGQPVNPQLLMREQPQHGGQVANRLTQDQVAATFLPPQPVQQTPPRQQPLQPTQQTLLRQQIVQPIQRQGSIGASAGFATPGGQPXVQPDGTVIPQVVPEHLVRNIQPNLHNYXRGNLNYQYQPPSLQAQYQPGGLAQPQFAPQYGQFEPVQQQS

SEQ ID NO: 165521 - protein, 146 aa, Oryza sativa
  unsure (1)..(146): unsure at all Xaa locations
  Clone ID: PAT_MRT4530_64319C.1.pep
PTAPATTPLPASSAMAPGQPVNPRLLMREQPQHGGQVVNRLTQDQVAAMFLPPQXPIQQTLLRQQIVQPIQHQGSISASAGFATPGGQPXQPGGTVMPQVIPEHLVRNIQPXPQFASQYGQFEPMQQQSQGAAQQQPWANVIVDSD

SEQ ID NO: 165522 - protein, 66 aa, Oryza sativa
  Clone ID: PAT_MRT4530_6431C.1.pep
RMRAAASFHSPATTHTASSLPGRPTTLSCRQSYRRRTWTQSSVARSSSCDWCWCCSAACKAGCGAR

SEQ ID NO: 165523 - protein, 191 aa, Oryza sativa
  unsure (1)..(191): unsure at all Xaa locations
  Clone ID: PAT_MRT4530_64320C.1.pep
TSSAMAPGQPVNPRLLMREQPQHSGQVANRLTQDQVAAMFLPPQPVQQTPPRQQPLQPIQQTPLRQQIVQPIQHQGSISASAGFATPDGQPVQXFLNQVVPEHLVHHVQPDGTLMPQVVPEHLVRNIQLNLHNYQGGNLNYQYQPPSPQAQYQPGGLAQPQFASQYGQFEPMQQQGAAQQRSWADVIVDSV

SEQ ID NO: 165524 - protein, 86 aa, Oryza sativa
  unsure (1)..(86): unsure at all Xaa locations
  Clone ID: PAT_MRT4530_64321C.1.pep
RVDCLIQVPVLMNAVGGILXGLVTTYAGGVRKXGFVIVSALLVTALLQFIFDGKPPSLYCLIALPLVMTSIFIYQKYPYVDRKKKD

SEQ ID NO: 165525 - protein, 78 aa, Oryza sativa
  Clone ID: PAT_MRT4530_64322C.1.pep
MARAQSTETVKLAVMCNCRVKAARWISWSADTPAVEDFGIFFATAATLPSSAPSLDLAHDGLRSLTQGIIHLRRASSP

SEQ ID NO: 165526 - protein, 107 aa, Oryza sativa
  unsure (1)..(107): unsure at all Xaa locations
  Clone ID: PAT_MRT4530_64323C.1.pep
FXFFFFFFFFFFFFFFLXIFXVFFVCHGXXXADGNFSASHMDLSRLTRRVLPNKWQASPNAFSCVDXGLGXEPRYMLKKTRDFTAQFRFLKGQLCFELSLPGPGVAL

SEQ ID NO: 165527 - protein, 35 aa, Oryza sativa
  Clone ID: PAT_MRT4530_64324C.1.pep
SQEQVSLFYLKLFKTLHSFWPIVKFLMCSLLFNLP

SEQ ID NO: 165528 - protein, 109 aa, Oryza sativa
  Clone ID: PAT_MRT4530_64325C.1.pep
RTSRHYVQASSSQASATAKPSESDALQQNLLGEEERGENPYRLMGLTPTERSPPPATALAGVDPIRRAPGRCTMGYLQEARENHVKKKVEEGAAEDWGSSRVDLQACKL

SEQ ID NO: 165529 - protein, 70 aa, Oryza sativa
  Clone ID: PAT_MRT4530_64326C.1.pep
SPTRSEHHVLMEGFLLTLSMVTLRCESQELLPSTDLHNHQAHAPKDCTCCRACHWIALWRTERGEDTETL

SEQ ID NO: 165530 - protein, 56 aa, Oryza sativa
  Clone ID: PAT_MRT4530_64327C.1.pep
VGLHPPVTQLGSVLVRPGACLRVDAIPMGPRVTYITVCVLAPVLTISAHKVARHNS

SEQ ID NO: 165531 - protein, 390 aa, Oryza sativa
  Clone ID: PAT_MRT4530_64328C.1.pep
MANSGKKLMDGGGVAFQTLPRAAGDDNADDDYVRPPPRPLVSTVHDKPATHPQQVHISVVGANRMRICWVTDDDDGRSSPPSVVEYGTSPGEYTASATGDHATYSYSDYKSGAIHHVTIGPLEPATTYYYRCGAGEEEELSLRTPPAKLPVEFVVIGDVGQTEWTAATLSHIGEKDYDVALVAGDLSYADGKQPLWDSFGRLVQPLASARPWMVTEGNHEKEKTPPPPPVAGAGAGVRLSPSRFAAYNARWRMPREESGSPSSLYYSFDAAGGAAHVVMLGSIQLLLIDVINRGIMIDYKTRIYDNEANSQGPMYITIGDGGNVDGHSDKFIEDHELAHLSEFREMSFGHGRLRIVSETKAIWTWHRNDDQHATVRDVVVLESMAGAKTN

SEQ ID NO: 165532 - protein, 44 aa, Oryza sativa
  Clone ID: PAT_MRT4530_64329C.1.pep
PLSIVQCIMVAYFLCSGDSSYFRYHIFIAPPQGLLHLYKLISKE

SEQ ID NO: 165533 - protein, 201 aa, Oryza sativa
  unsure (1)..(201): unsure at all Xaa locations
  Clone ID: PAT_MRT4530_6432C.1.pep
SALRFSLDAAAPLLLFGRRLFGDRRAFFCLPPHVCRHDATALPAALARPLRRAGQKCHPPALVGRVPAGDPAPPPPPPRSSPPRXTPPPPPRSSPAAIARRLLAPPRRPPHESPRLLASPPRPRIPAASSLRAHPPSSRRGSEVVPFRCHPRCPRRRRGRPQPPPEPWSSPEPTSSPVAAGAEFFPIRIGSECTTYLPLWK

SEQ ID NO: 165534 - protein, 503 aa, Oryza sativa
  Clone ID: PAT_MRT4530_64330C.1.pep
MPTSPVTTTADGDGLAQLDIAISRRPSLLHPALLALLACPRVPPPLARLGATELAAVQHQPAIATIFLPNPSPSSHPILLPHTPPSVLPSWPRRRGDIFSNSSWASQPPPAGLAQLPPQVASHRGRASRRRPRLAIPVPQVLVDLNAMADPSRSTSSGAAKKPSPRNPRCAACKFLRRACSPEECRLAPHFPASQPERLQSVERVFGMRKVLELAHKAGPEYLDDILSSIVYEAEAWGRDPVWGPTGVVGALELEIGTARADLAVLQGQDQDQPPAVATLPEPELVVHPPTMAQDESKPSSTTSSSSGTTTTTTKKKNKPRCAACRYLSRSCWPECLLAPYFPAGQPPAQFGNVHRLFRLNNVLRMMEETRREERDDLMAAIVYEADAWARDPRYGVAGVVRSLTNELARVRLDEIAFHLLGTDETYDGYKEEDALAVDPVSGAQAGIGVLGGSGADLQENTGILLGADEPGPGELAVDPIKDVFDIDRLLAVDDDLSSGTQP

SEQ ID NO: 165535 - protein, 764 aa, Oryza sativa
  Clone ID: PAT_MRT4530_64331C.1.pep
MHDRMTNVSAAVQWWDEWQLRILVLCSLGIQWFLLLAAPMRKYTIPHWFRTFIWLAYISSDALAIYALATLFNRHANTTTAAKQHCVNGSALEVLWAPVLLIHLGGQQEMSAYTIEDNELWRRHTVTLVSQVTVAIYAFYKSWPANGGDRKLLVSAVLLFVIGVFSFTEKPWALRRASINRLAAVSSMVQGRKEVSKWRYCFTELEKDKRDILDRCCQLKKEKETPPPGVGTDVVKRSQQHILTDRDKVLLILSDMSLLAADSDLKQEQRRRRQCQSLMGEDDSKEEVEGDLLGTLSPRAEKGSKRWLRRAFALIYTRANVVLTPAYLAYHILLAPFLHITAIVLFAASSKRHHNTIDVKITYVLLCLTAALDILAEPIRQLLFKLMSMADVAALCETVPQYNNLIRSALQRTQPAGVLLKCAAHVGYTQGFFVCQRKNLYHMLAGLIFSDLVEANAKGLDFTSYRSFAPGRRNWVLNENLRKVCGLEVQGSLRGSFDRGVILWHIATDLCMRRMMAENTIDEIDRKFLECTEAISDYMAHLLNLRPDMLMTGSRQHLFTQAMEEVELILKDIESQQQQPHSLKKLGRDILAKKIIDKAKAEVNAEVNAAIDIEMVREQEREIRVDEPPPPKYPLVHDACRLAEELMDKMGRRTRCQVMYRVWVGMLFYSASMCRGYLHAKSLGEGGEFLSFVWLILSLKGAKTLADKLQMPEPEPEPEREPEPKSGPYSPSQEIVQGEPTATVATTADEGEDLSFLLPHSPRS

SEQ ID NO: 165536 - protein, 111 aa, Oryza sativa
  Clone ID: PAT_MRT4530_64332C.1.pep
MSNKATDSSQLIEQKFAMAKQSSHEAAIAGLKAAAVTAVCTAIPTFASVRMSKWAKANLGNPVAKTVIITYAAGMAYFIAGEKKVVELSRKHSLEAAKARAKSEYTLTKSN

SEQ ID NO: 165537 - protein, 81 aa, Oryza sativa
  Clone ID: PAT_MRT4530_64333C.1.pep
SSFWVALQARLLCIIFTNMSITGDNNNTGDKEKEPPVNTNGGNTEGEGAAVAGPPPPPLPSHASLPAGREGVAACRLPWLH

SEQ ID NO: 165538 - protein, 75 aa, Oryza sativa
  Clone ID: PAT_MRT4530_64334C.1.pep
NLIKKKKKPINGARCSWLEIYELREFFTSSFSVCTSISCNKKKGEILLIRLNFSRHKSKRPSPKIIIVHYDTQKL

SEQ ID NO: 165539 - protein, 313 aa, Oryza sativa
  Clone ID: PAT_MRT4530_64335C.1.pep
MKHVLQYVAGTQNFGIQFSRKKQEIPQLIGYSDSDMAGDINDRKSTSGVLFKLGESLLSWQSQKQKIVALSSCEAEYVAATTGACQGVWLARLIGELRACDPQCVILKVDNKSAINLCKNPVLLDRSKHIDTRFHFIRECVDQKRIEVDYIRTEEQIADVLTKPLGKNRFLELRRKLGMVEAPPMPKRRRPGTKCEAYQKYACRKRLADERARVKGRFVSSSGGNDNNAPAHELPPSLVNLSDGAAAAAIIPTRSVPEWWPEMQASLARDEMCGGAGMNLHLCDANEMEQVAAYVGVSSMDLCAYLHCSWPPV

SEQ ID NO: 165540 - protein, 48 aa, Oryza sativa
  Clone ID: PAT_MRT4530_64336C.1.pep
APGVKCIGVQKGACPGVSVIATILQQEHFWGFVFNNRWLRFRHTSCTQ

SEQ ID NO: 165541 - protein, 163 aa, Oryza sativa
  Clone ID: PAT_MRT4530_64337C.1.pep
MDLGQKKEIGQAFGLHPLCSSDNRQHLLELKDVMVIETTGDRNILKSFRGGFGVEIRELCRVIFLAESSCSASIPLQSKSGELDRELKAITFSTTVVVVLAPMPCSLLGQAASKGRGIPRGLLKLKGWEVTHAQPVFVNIPSKVPSRNHSDLSDANASILEAD

SEQ ID NO: 165542 - protein, 160 aa, Oryza sativa
  Clone ID: PAT_MRT4530_64338C.1.pep
MRAPSFFFLSLLLLLLLIHISIHCNAADSQLGSEKVTNLLFYLHDTLSGKDPTAVPVAQGPQRESKVVGNAQGMYISTAKKGLTLVLGIDFELTDGPYKGSSFVVYSRNPVMQGNGRELAIVGGRGLFRMARGFALLQTVYLDNVNGDAIIEYNVTLLHH

SEQ ID NO: 165543 - protein, 143 aa, Oryza sativa
  Clone ID: PAT_MRT4530_64339C.1.pep
MASASSSSLSSRRNRLVLPLIVCPSCNVKTIVRCTAKTDANRGRVFYTCPDHEKDGSGCNFWYWEQGYINFLKRNGFIEDGTKGKSALRVDLEQDDFGRQDELEKNLIAVVPIARELLLAVKGMLVLGLFGVVILVLPPFFNR

SEQ ID NO: 165544 - protein, 638 aa, Oryza sativa
  Clone ID: PAT_MRT4530_6433C.1.pep
MADTKAEAKAETIGGGGGGSGSFSEQAFVEKLNKLNNTATRIQSILSSAALSNWCIFHRKRARKVVDTWEKQYNSANKDKKVSFLYLSNDILQNSKRKGGEFVNEFWRVLPGLLKDFYVNGGEDGKKVVGRLIDIWDERKVFGTRIESLKNDILGGSTHTMGNNVNSSNPSPNPSSVSKAARKDSGTVTRKLTVGGMPEKIVTAYQSVLDQHFDEDTALNKCNNAVSVLDRMDKDVDDACTQGQRGGKIVVSPFQPQYHPETPQNPQIPPPSQELNAILPPLRAVDEAGCKIVAYVGRHIVGIQQGSSLISDLQGQETVLKQCIEQLESVNMARITLINKLRKALGEQVARAKAEHAMQLKQRLGSALNNGAGSSSSPLMVTLPPGQTAAMMQNSAAMPIFPQFQPLHPATSLPATSSAVGDEPKKTAAAMADKLASLSAPEKVLSSIFSSLAAEQARNSGSTSGDLSAGPPGFESNKKPRLDNPIHASDMSAPPFFGQLPQVQPQIGATAALGGTQPPTQANQAAGSFPPPPPPLPLMPQFVQNTGGMFGMGPFGMVSGSAPPPPPLPNIMSAGFPRLSVPPPLPLPTQSQNQSQPQQQQSPQAPQQSPTSTGFFQPPGAGFFPPVQVQQSPSAQRQ

SEQ ID NO: 165545 - protein, 186 aa, Oryza sativa
  Clone ID: PAT_MRT4530_64340C.1.pep
MRAPSFFFLSLLLLLLLIHISIHCNAADSQLGSEKVTNLLFYLHDTLSGKDPTAVPVARAENAVPKPDNPVPFSTIYVVDDLLTEGPQRESKVVGNAQGMYISTAKKGLTLVLGIDFELTDGPYKGSSFVVYSRNPVMQGNGRELAIVGGRGLFRMARGFALLQTVYLDNVNGDAIIEYNVTLLHH

SEQ ID NO: 165546 - protein, 41 aa, Oryza sativa
  unsure (1)..(41): unsure at all Xaa locations
  Clone ID: PAT_MRT4530_64341C.1.pep
KFSNLELKVFESELKVFKSELKVFKYGXKAYTYMKKFGKKN

SEQ ID NO: 165547 - protein, 520 aa, Oryza sativa
  Clone ID: PAT_MRT4530_64342C.1.pep
MEPSALATLLSMALAAFLLLGLIKRKGSRRGYNLPPGPTPWPVIGNFNLIGALPHRSIHELSRKYGELMLLRFGSFPVVVGSSVAMARLVLKTHDAVFIDRPRTASRKHTTYGYADITWSPYGAYWRQARRICVTELFSARRVASFEHIRADEVRALVRGLFAAASSGRSGAVHLNRDHLSTLSMNVITRMVLGKRFFGEGADAAEGPVSTLSEFKWMLDELLLLNGVLNVGDWIPWVDWMDLQGYVRRMKKVGKMFDAFMEHVLDEHSERRRREGEAFVARDMVDVLMDLADDPSLEIKLGRVGVKAFTQDLIAGGTESSSVTVEWALSELFKNPAIFATATDELDRVVGRCRWVTEKDIPNLPYLDAIMKETMRMHPIVPLLIPRVARDDAAVAGYDIPKGARVLINVWTIGRDPELWDAAEEFMPERFIGSRIDVKGQDFELLPFGSGRRMCPGYNLGLKVMQLSLANLLHGFAWRLPEGMKEEELSMDEVFGLSTTRKYPLQVVVEPRLPVQLYSL

SEQ ID NO: 165548 - protein, 669 aa, Oryza sativa
  Clone ID: PAT_MRT4530_64343C.1.pep
MARGATWTRRLHLHGLFLAVLLLLTLPAGSTAAAGGGGGTVIGIDLGTTYSCVGVYRNGHVEIIANDQGNRITPSWVAFTGGGERLIGEAAKNQAAANPGRTVYDAKRLIGRRFADAEVQRDMRLLPFAVVDKGGKPHVRVEVRGGDVRLLSPEEVSAMVLARMKETAEAYLGEEVTRAVVTVPAYFNDAQRQATKDAATIAGLAVERILNEPTAAALAYGVGKEGAGGKNVLVFDLGGGTFDVSVLAIDGGVYEVLATNGDTHLGGEDFDQRVMEHFVELVRRKHGRDIAGDARALGKLRRECERAKRALSIQHQVRVEVESLFDGVDLSEPLSRARFEELNNDLFRKTMAPVRKAMADARLSNADIDEIVLVGGSTRIPKVRQLLRDYFGGKQPNQGVNPDEAVAYGAAIQANIVGGDTDNKTRDMVVLDVTPLTLGLETAGGVMATLIPRNTPVPTKRAQLFSTYKDKQTTVTVKVFEGERSMTRDNRLLGRFDLAGIAPAPRGAPQIEVAFEVDADGILSVSAADRATGRSERITISGDDRKTSREEIDRMLGEAEEFADEDRRHRERAGARNSLEAYVYGVKNAVVGGEMAGAMDGGEKEKVEAAVMEAYEWLDGNQDVGKEEYEEKLRELEDVCNPVMSAVYQRSGGSRRDGDGGGDDDHDEL

SEQ ID NO: 165549 - protein, 71 aa, Oryza sativa
  Clone ID: PAT_MRT4530_64344C.1.pep
QRPKFCDSHLEYGSFPHTIDARITTTPIALCATTSCPNKLKGYYRCMCYRSEGMKPTLRLRSAICSSSELS

SEQ ID NO: 165550 - protein, 90 aa, Oryza sativa
  Clone ID: PAT_MRT4530_64345C.1.pep
TVSRTSKLTNAHIYETAYLLTHIRGKMNDATQRRHLRGTLLTTTNITNHISIDAIRHKGALGHTLHGLLTGELDQNALPANDDILPTIKH

SEQ ID NO: 165551 - protein, 92 aa, Oryza sativa
  Clone ID: PAT_MRT4530_64346C.1.pep
ALTLAPGAGDSRVCGGRSGSARLSFQSGRVQSRRALEMQVRSSVAIDKETAVSDPTPTLLRHDGSGAGSLSVRQRAEAMIHQVQGEVCPALE

SEQ ID NO: 165552 - protein, 149 aa, Oryza sativa
  unsure (1)..(149): unsure at all Xaa locations
  Clone ID: PAT_MRT4530_64347C.1.pep
RFGFEFSSEAGFPFPCFVSHRSPALLYGILFLSGLASWRKLPRFPEAFFVSLLAGVFAVFVPGRCRWGRRCVRRLLVCPSLVVFXPPPPXXILCRVXASADSFVERXXPPSRLFSPRRAGGVXWVRRGVVVPSLPVFGXXGSPPPXAFL

SEQ ID NO: 165553 - protein, 167 aa, Oryza sativa
  Clone ID: PAT_MRT4530_64348C.1.pep
MVGDGIVDARGESWEAEQLYMCNDSVQPTTVGINPMITISFPGKQLRDAIQVPATSGQMRRRAGAAVAAASLGGGGVELWWRRRSAAGWLPSGATLGSGVVAVGMVAVRMAALGGGARRQGAGACLEGSIHPERNISGSDRGERVQVEEGADRGAAMVLAMASWYDI

SEQ ID NO: 165554 - protein, 49 aa, Oryza sativa
  Clone ID: PAT_MRT4530_64349C.1.pep
VVFPALATNLCLAKPYKSDKFGFPPRSSSIKSDIHLCLRDLIIDISFSI

SEQ ID NO: 165555 - protein, 455 aa, Oryza sativa
  Clone ID: PAT_MRT4530_6434C.1.pep
MADTKADAKAEAKAETIGGGGSGSFSEQAFVEKLNKLNNTATRIQSILSSAALSNWCIFHRKRARKVVDTWEKQYNSANKDKKVSFLYLSNDILQNSKRKGGEFVNEFWRVLPGLLKDFYVNGGEDGKKVVGRLIDIWDERKVFGTRIESLKDDILGGSTHTMGNNGNSSNPSSHPSSVSKAVRKDSGTVTKKLTIGGMPEKIVTAYQSVLDQHFDEDTALNKCNNAVSVLERMDKDVDDACTQGIQQGSSLISDLQGQETVLKQCIEQLESVNMARITLINKLREALSEQEAKSELLRNQLHNHMLDLSISYAMSVTQLQWNVKVARAKAEHAMQLKQRLGSALNNGAGSSSSPLMVTLPPGQTAAMMQNSAAMPIFPHYQPLHPATSLPATSSAVGDEPKKTAAAMADKLASLSAPEKVLSSIFSSLAAEQARNSGSTSGDLSAGPPCFEIKK

SEQ ID NO: 165556 - protein, 716 aa, Oryza sativa
  Clone ID: PAT_MRT4530_64350C.1.pep
MVDDIKFQLISKYHPIKYNPTDIELKDILIEQIEYLLSKSGISIDKFNLPQMTVRYKLDSTNTLIQDELNYNANDLEEQANKLYLQLNDDQKKAFHLIVNSVINKESNFFFVSGHGGTGKTFLWNTIVSFLRAKKEIVLTVASSGVASLLLPNGRTAHSRFRIPVDIDELSLCDIKHGTKLAELLIETSLIIWDEALMTNRQCFEALDRTLRDILSEKYINAIDKPFGVFTHGQLYVAISRMNIIPIAELRPGRYDYMICVRISRIWEFRGTNEDDNIKHLDLVLLDQKGDAIYAEIPPDAIPLLNQYLQEGNIVYISKITVNNAKPSYRAVDVIGKIIAVSNAAMISTSSSDYRMRRIVKLQDLSGKTIDLSLSGKRAVEFDGETILEVGQNNHIIAIFVGTSMKILKGTYEFLSGTTACRWYINENDIPEIKMFQKCLPPHADPIQKLYLQSDEDMQRSIEHKTLAELKEIDPFVDKDEKYQCTATIIGIQERKTWCYQACKLCNCKMIWDGSILKCKKENCPCRQYEYKYKIPFIANDGTASLELVLFEKKGTELIGRTAETMKRQYDINQTPPEIKAWIGHKFTFIVKVLPNITINADEPSFEVLTIKERFGRQHSSQGFKATKNLPISSSSSQQLHNLPPLVPILSKKIQHEIEPPQDIQSMEVEPYNLETSTLSGKRAYEDPNSTDQENDEEESTDYGFIQTKGKKKRST

SEQ ID NO: 165557 - protein, 1788 aa, Oryza sativa
  unsure (1)..(1788): unsure at all Xaa locations
  Clone ID: PAT_MRT4530_64351C.1.pep
MIKFCIDSTNIFNYSYLILCLYSFLTLAIFCAYIIRSVNMPSKRKQDPIKIAEYDKSDCKKRRYIRLQILREKKRKREEEKNMVHNNNKKCNKDEEETSKNSNIRDIIYTEKQKNIKNKRKIQYNLDYLEKIAKKKCLEIDHISSYLSTSHGMVSFTPEYIKYLKESYENKSFIGMPEYKCKHCNAIFWFEERNKRETKKRKGEIIYXNCCKNNKIKIPPFQNPPETLARLLNNKEDNLSKHFMQKIRQYNSLFSFTSMGGTIDKNINNGDGPYVFRVNGQIHHRIGCLLPKPNEIPKFAELYIFDTKNEIENRIHALNKEEMGSTDINPYIVEQLKKMFDEYNPLVKTFRYARDLFEENKGVDFSIRIIGADKGDPIQYEMPHTEDLAILIVGELNLENYKRDIIVQNKNNGLQRISIFHPAYMALQYPLLFPYGERGFQLGIPYYNSNTNKKSKKTRSTITVHEYYKYHMHYRPNQPNPYLCYGRLSKQAIVDARAIEDEDRLMFIAKNQNKLRAECLQGIFDAVQKGLTEGNQIGKKIILPSSHVGSKRYTMQNYYDGIAICRVYGPPHLFITFTCNPRWPEITMTILENEQPNDRPDIIVRVFHIKLEQLIEDIQSGTIFGPTTAILYSVEFQKRGLPHVHILVWLDKKPSEITIEMIEKWISTEIPDPREDPLGYILIAEHMMHGPCGAKNENCPCMKKGKCSKFYPKEFNDQTNFTENGFAQYKRRNTNIYIRKDNHNLDNRWVVPHNLFLLKRYQAHLNVEFVNQSRMLKYLCKYVNKGGDKAKIIFQRIKQGIDHSENEQTEKIDEIXEYLECRYICDQDGMWRLLGYEIHYHWPPVERMPVHLPLMNXVKLTKDTKLKNIIENPDNQRTMLTEWFMANQLHEEARNLTYCEFPQKWKWDKKERKWVKRQHGFKIARLYYVKPTEGERFYLRMLLMIVKGAKNYEDIRTYNGIIYKTFKETCAARGLLMDDNEWYKTFDEAASWATSPQLRSLFIILLLYCNLEDERKFFETNWAKMVDDIKFQLISKYHPIKYNPTDIELKDILIEQIEYLLSKSGISIDKFNLPQMTVRYKLDSTNTLIQDELNYNANDLEEQANKLYLQLNDDQKKAFHLIVNSVINKESNFFFVSGHGGTGKTFLWNTIVSFLRAKKEIVLTVASSGVASLLLPNGRIAHSRFRIPVDIDELSLCDIKRGTKLAELLIETSLIIWDEALMTNRQCFEALDRTLRDILSEKYINAIDKPFGVFTHGQLYVAISRMNITPIAELRPGRYDYMICVRISRIWEFRGTNEDDNIKHLDLVLLDQKGDAIYAEIPPDAIPLLNQYLQEGNIVYISKITVNNAKPSYRAVGNPYMIKLNKRTCIIEAKDQPMDFPKYTFDLVSFDKLHDFTSKTDRFLDVIGKIIAVSNAAMISTSSSDYRMRRIVKLQDLSGKTIDLSLSGKRAVEFDGETILEVGQNNHIIAIFVGTSMKILKGTYEFLSGTTACRWYINENDIPEIKMFQKCLPPHADPIQKLYLQSDEDMQRSIEHKTLAELKEIDPFVDKDEKYQCTATIIGIQERKTWCYQACKLCNCKMIWDGSILKCKKENCPCRQYEYKYKIPFIANDGTASLELVLFEKKGTELIGRTAETMKRQYDINQTPPEIKAWIGHKFTFIVKVLPNITINADEPSFEVLTIKERFGRQHSSQGFKATKNLPISSSSSQQLHNLPPLVPILSKKIQHEIEPPQDIQSMEVEPYNLETSTLSGKRAYEDPNSTDQENDEEESTDYGFIQTKGKKKRST

SEQ ID NO: 165558 - protein, 76 aa, Oryza sativa
  Clone ID: PAT_MRT4530_64352C.1.pep
WIDSLKTAKIWLGSKIGWGLDPLQEPHKPDLHRYLYWYHYAYIDEIFMTIAMTATLLYEPLNVLRRRILHCDSLYA

SEQ ID NO: 165559 - protein, 504 aa, Oryza sativa
  unsure (1)..(504): unsure at all Xaa locations
  Clone ID: PAT_MRT4530_64353C.1.pep
ANYFEVVRCDDGRWSGDGPGHDVPRRAQLRGSPAAERRRQEPRLRRARAADVVGGAVRDGGGNLTENDVSDEEIEAEDLARRMWKDRIKLRRIKERQDRLALALQQAELDKSKGKPISDQAMRKKMSRAQDGILKYMLKLMEVCNARGFVYGIIPDKGKPVSGASDNIRAWWKEKVKFDKNGPAAIAKYESENLASADAPSSGIKSQHSLMDLQDATLGSLLSSLMQHCDPPQRKYPLERGTPPPWWPSGNEDWWIALGLPRGQIPPYKKPHDLKKVWKVGVLTGVIKHMSPNFDKIRNHVRKSKCLQDKMTAKESLIWLGVLQREERLVLSIDNGMSEVTHHGALEYRNGDTHSSSNEYDVDGFEEAPLSTSSGDDEQHAPTRRERAKVKRPNQVVPKKAGTKEPPKRKRPRHSVTVIEQEVQRADDASEHSRNMIPDMNRLDQQTLHRLQXGADDEADGAVAARRLRLLPPPPHPQLPVSKMLFIQLNYMANPISMQHLFSR

SEQ ID NO: 165560 - protein, 162 aa, Oryza sativa
  Clone ID: PAT_MRT4530_64354C.1.pep
MSHGSSPEPEEICGTQVSASSPPFPNFFTPACDELDLELTRPAVAVAMVDGRRAPAASCREDVRAPVRRHAMPSISVRNFAEREGCRDGRPACSSWGVRRRRRSACLSVTDTTTAFSFVPVAIRTSVKVVGNDQLLQCHHHASSDVVAASCHPPLGWQGPFL

SEQ ID NO: 165561 - protein, 71 aa, Oryza sativa
  Clone ID: PAT_MRT4530_64355C.1.pep
SDISGRREKLPEKHTGTTTALRQGLSPLICICPDIKAAKNCLRLYRVGAFCRSPRQWHHNHHLQLNLHPRV

SEQ ID NO: 165562 - protein, 135 aa, Oryza sativa
  unsure (1)..(135): unsure at all Xaa locations
  Clone ID: PAT_MRT4530_64356C.1.pep
WGGDGAPDGETRCFAAGLAGPPATRSLRAAFSPSGRPSTPRTLTTGKRGRPRGLGFVTFSSDQSMRDAFEGMNGRELDGRXIPVNEAQSRRSGGGGGGYGGGGGGYGGGRGGGGYGGGGGGGYGRREGGYGGGGG

SEQ ID NO: 165563 - protein, 66 aa, Oryza sativa
  unsure (1)..(66): unsure at all Xaa locations
  Clone ID: PAT_MRT4530_64357C.1.pep
MMDAVGKTYTGMTAHLXGGPSDTIDTAKAEIQDKEGIRPDQQRLIFAGKQLEDGRTLADYNIQKES

SEQ ID NO: 165564 - protein, 70 aa, Oryza sativa
  unsure (1)..(70): unsure at all Xaa locations
  Clone ID: PAT_MRT4530_64358C.1.pep
RIRHELAGKTRGKGXFXFLEKXGANVXGXXPIYSXXEWSPXGETYLXGNTXLLIWXXXXPXVLXGGALXX

SEQ ID NO: 165565 - protein, 139 aa, Oryza sativa
  Clone ID: PAT_MRT4530_64359C.1.pep
MESMGGDDTTRLAQPGCEVIGELEISPPTLSLILLLPTTAPPLSLVHREALHVTEHRGIRAGRDGVGIDLVDHVSTASFVITVVGSPSPLRPSLACHRRCSSQKEREREEKREREKGERDEEERMWAHISVGPTNVFFV

SEQ ID NO: 165566 - protein, 258 aa, Oryza sativa
  Clone ID: PAT_MRT4530_6435C.1.pep
MAAASLSRLSHRAAAPSLRRLLSATASAPSPAAASPPPTAPSSAAAAAAGADRVRWDYRGQRQLVPLGQWMPKVAVDAYVAPEAVLAGQVTVYDGASVWSGAVLRGDLNKITLGFCANVQERCVLHAAWSAPTGLPADTLVDRYVTVGAYCLLRSCTIEPECIIGQHSILMEGSLVETNSILEAGSVLPPGRRIPTGELWAGNPARFVRKLTNEEIMEIPKLAVAINDLMQSHFSEFLPYSTAYLEVEKLKKSFSIPL

SEQ ID NO: 165567 - protein, 325 aa, Oryza sativa
  Clone ID: PAT_MRT4530_64360C.1.pep
MAAALFDELGQQATNLKEFFIRCTSCLKTVEDLPFLSGFLQVEGCEGLERISNLPQVRELFVNECLNLRHVEELGGLEWLLLEKGMQEISQLWIPGLPEQHRQLHGDEHELESPVWEHAQATGWATVGLTKPTLVDKKISGSEQVAGEQVVTVADGDMVLSAQPEKEMTAAMLLKSSGHAGSHYPVTGSNEAVAVGLAPNMTPIRRSDRSNSETALGIASADDDSLLKAMKRKAAINLDDQFAPYGARPALLASPQGTPNEPFTSSCSASQLSFCSSLNRIEVSLGNNSSEVDFSIKALKHINVDKLKVIPKANSSFSLNQCRHG

SEQ ID NO: 165568 - protein, 225 aa, Oryza sativa
  Clone ID: PAT_MRT4530_64361C.1.pep
LLASVLISTDSLCYICISITQLTTRPVSSIISQGVRSKLMAAVGLLVLVGLQVVVGSMAAQEAGDAPASITGPCSRTGDKKACVELLSGIPEARKATTVGPLAELYLQAIANHTTEAKAMATKLLATMKGKGVPPVCLQQCTASVDTLSNALAAFFSASADVNKKYRDLDGFLVGFLKQPPICMSACPIRSCDMEEVTIADKFHQAWKMLGVAHDLITQILGTKS

SEQ ID NO: 165569 - protein, 77 aa, Oryza sativa
  Clone ID: PAT_MRT4530_64362C.1.pep
MACDHGEANQAGSGNQGPPYGYSASDNVGISGGLDELAMIQGGGANLSSSGNTTPSQKESNHSNEYGHACVQVTSDV

SEQ ID NO: 165570 - protein, 124 aa, Oryza sativa
  Clone ID: PAT_MRT4530_64363C.1.pep
IGLTFYLHRYSRVVSLPGRCSGVDLVSGYSVALCHLGGCRVVFNNVDVVSRLLSIIIWAYMLQVSRGEPLMMTAQYGHSSTIVYIPKKLSWGGYSSVFSPGWTMTGCRKELGNPKWSLEAPGGH

SEQ ID NO: 165571 - protein, 34 aa, Oryza sativa
  Clone ID: PAT_MRT4530_64364C.1.pep
MATDLSQSLDLSIYQHRCKYDIGSKINDMSSAPS

SEQ ID NO: 165572 - protein, 131 aa, Oryza sativa
  Clone ID: PAT_MRT4530_64365C.1.pep
MEVSGPCCAWAEVAARGLARHFTVPIVGRHIKPMRPCHFPSTPMGAHGASPRQDRARVASPLSPNLRACMLPRRLALRPNPISLRSGRRATRLPHANPLALTRPRLPNGNRTRFKSEHCSIMDVGISYNHR

SEQ ID NO: 165573 - protein, 94 aa, Oryza sativa
  unsure (1)..(94): unsure at all Xaa locations
  Clone ID: PAT_MRT4530_64366C.1.pep
RSLSLSLSLSLSLYFSPSPRSTRLSPNPSRARSPPPXPPPXPPGGPTDTDPPAMAFRXLLSAAVRRRSXXAARGGXPXECARGXHRGRXRGPGV

SEQ ID NO: 165574 - protein, 821 aa, Oryza sativa
  Clone ID: PAT_MRT4530_64367C.1.pep
MAALPLATAEVCDANADLIMNGELRALQPIFQIYGRRQVFAGPIVTLKVYEDNVLIREFLEEKGHGRVLVVDGGGSLRCAILGGNPVQQAQNNGWAGIVVNGCIRDVDEINGCDIGVRALNSHPMKANKKGIGEKHVPVTIAGTRICDACDAALPPPDLYTLIKHKFSSMSTPSSFEATEEATLLGAKRKSSLDPPSAKRPRSPILPLVRSPRVRLRMHHLIEHMHANLSPTADVMKNWKFDQEVLRKELLRMIVFQELPFSIVEHVGFRRFVASLNPYFKVISRTTLRNDCMAAYEDRKLALFDVLKSSNSRVSLTADMWTSIQNLGYLCVTCHYIDNEWKLQKRIIKFALVPTPHDGITMFSEMLKAIQEWHIENKLFSVTLDNASVNDTMMTHLKTNLVGKTMLPCDGVLLHFRCAAHIFNLIVQDGLKTMSNAINSIRESVKYVRSSQSRGQRFEEMIAQVGIKTNRRPSLDVSTRWNSTYLMLESSLLVRMAFEALDRHDINYLHQPFDYQWTMAEKLCALLKVFYEATVAVSGTLYPTSTCYFHELWKIKMVLDKEATNEDVTIASIVKEMKEKFKKYWDAQYLQICFPVIFDPRYKYKFIEFRLKSAFGAAATHYLKEIKSNMQKLFDEYSAKYGGSNNINSQPETSVEQNVDASNQFVDWRQFLHDKSRSKVKSELSRYLADVPQEGDFQDGHDFDILNWWMVNKTKYPVISRMAHDVLAIPATSVASEAAFSTGERIISDYRSRLSSSTVEALICLQDWMRAEGLGDFFARDLAESDDQNVQHSGNIEKDRKSSWSWKQLFVTLSIGTVGLS

SEQ ID NO: 165575 - protein, 110 aa, Oryza sativa
  unsure (1)..(110): unsure at all Xaa locations
  Clone ID: PAT_MRT4530_64368C.1.pep
RNQINPAMVQLLHTTDSPDEEIISGLCIISTSADDWSYYHDYYRMHYVAINITEKQTASARLACEAPGNLAMHHTHGILQLVKFSLTGRXTTLXEHSNTXPTFLGIRCYA

SEQ ID NO: 165576 - protein, 438 aa, Oryza sativa
  Clone ID: PAT_MRT4530_64369C.1.pep
MWKEFDPICTNDKLSHAKCIHYNKVFVASRSSGTSQCLRHLKVCKVRLRMHHLIEHMHANLSPTADVMKNWKFDQEVSRKELLRMIVFQELPFSIVEHVGFRRFVASLNPYFKVISKLALFDVLKSSNSRVSLTADMWTSIQNLGYLMAFEALDRHDINYLHQPFDYQWTMAEKLCALLKVFYEATVAVSGTLYPTSTCYFHELWKIKMVLDKEATNEDVTIASIVKEMKEKFKKYKYKFIEFHLKPAFGAAATPYLKEIKSNMQKLFDEYSSKYGGSNNINSQPETSVEQNVDASNQFADWRHFLHDKSRSKVKSELSRYLADMPQEGDFQDGHDFDILNWWMAAFSTGERIISDYRSRLSSSTVEALICLQDWMRAEGLGDFFARDLAESDDQNVQHSGENAYTPLVTGNIEKDRKSSWSWKQLFVTLSIGTVGLS

SEQ ID NO: 165577 - protein, 103 aa, Oryza sativa
  Clone ID: PAT_MRT4530_6436C.1.pep
MEVEVVEMNRLLGLLVLVAVCLQEQLLLQSVVAPVPGGPAERSPEVEPLFLACSAARDEKMEESTFSGADKDASLSAIAAAVFLGSSPTALDVAGSEVAGCSG

SEQ ID NO: 165578 - protein, 808 aa, Oryza sativa
  unsure (1)..(808): unsure at all Xaa locations
  Clone ID: PAT_MRT4530_64370C.1.pep
MVLDKEATNEDVTIASIVKEMKEKFKKYWDAQYLQICFPVIFDPRYKYKFIEFRLKSAFGAAATPYLKEIKSNMQKLFDEYSAKYGGSNNINSQPETSVEQNVDASNQFADWRQFLHDKSRSKVKSELSRYLADMPQEEALICLQDWMRAEGLGDFFARDLAESDDQNVQHSVCGSIGHSGNDCPETREEAMYMGNNNNNGYRPQGGKGWNQPRPYYQGGNNNGNFSNQPTLKDLVFAQAKTTDALSKKLAANDKTDFFPEMDAADGMEEAGLIKSTGTLTSLKARFWTCTKVNQILQAKNQSPSTVKPPNPPGTKHPSSEVGAKNIVPITIDKLSPEQRQEFERMMSSVQDKFMNSFKETLSGTIIQKYKLKVVAADEPGTSSSKHGKAKGSADNSSDKGGEPRDGEVEDVEEEDAEEQEPLKFNNFQDQVDYVVQHALINQSGVLXLVTGNQQHTANAPPVQPTTSVSAPAPXAADGATDTSKAENTYCSAKSXIGAQFVPEQQMYNVQQPPENYLGDNLNFQYQPRSPQMQGVPQQKPWADMIADVMREQFGLXDIGNLYRHPYPEWFERXFHYLTDSQLADLTFQGLIAPIKEKFSSQEFESLSHLAQKVTLHKQRFAEAKKNFKKINHAYPYMYDSEEEDDSEVAAAEWARSKKVVPCQWVKNSGKEERYGFDITKADKIFDLLLQEKQIQLPADETTSGEEDKANQHWQNHAAMEVKKPVGSHGKRGDTSQRRMRRPVGEDVDAQQRQHNKSAVQAEAPVGGGEGKPVGEDAPNNGGIIGQPCRRGHQSAATKASRSVNVTS

SEQ ID NO: 165579 - protein, 56 aa, Oryza sativa
  unsure (1)..(56): unsure at all Xaa locations
  Clone ID: PAT_MRT4530_64371C.1.pep
QCGLLLTXGTMXMLNHPMFXAKICALQXFXSNLXSKKXSFEXXSAIDAHSXXRLXW

SEQ ID NO: 165580 - protein, 290 aa, Oryza sativa
  Clone ID: PAT_MRT4530_64372C.1.pep
RPGRAGPRQDDWTMAEKLCALLKVFYEATVAVSGTLYPTSTCYFHELWKIKMVLDKEATNEDVTIASIVKEMKEKFKKYWDAQYLQICFPIIFDPRYKYKFIEFRLKSAFGAAVTPYLKEIKSNMQKLFDEYSAKYGGSNNINSQPETSVEQNVDASNQFADWRQFLHDKSRSKVKSELIRYLADMPQEGDFQDGYDFDILNWWMVNKTKYPVISRMARDVLAIPATSVASEAAFSTGERIISDYRSRLSSSTVEALICLQDWMRAEGLGDFFARDLAESDDQNVQHSGI

SEQ ID NO: 165581 - protein, 183 aa, Oryza sativa
  Clone ID: PAT_MRT4530_64373C.1.pep
MKEKFKKYWDAQYLQICFPVIFDPRYKYKFIEFRLKSAFGAAATPYLKEIKSNMQKLFDEYSAKYGGSNNINSQPETSVEQNVDASNQFTDWRQFLHDKSRSKVKSELSRYLADMPQEATSVASEAAFSTRERIISDYRSRLSSSTVEALICLQDWMRAEGLGDFFARDLAESDDQNVQHSGI

SEQ ID NO: 165582 - protein, 151 aa, Oryza sativa
  unsure (1)..(151): unsure at all Xaa locations
  Clone ID: PAT_MRT4530_64374C.1.pep
TRALPRSGGSAARRGRAAVARRRGGPPPAAEERRQFGDEAALRWRRRSGGGGCXGAAARRRGGAAGGAAARPTMRRTATGGRCGGLHTSGGGSMTRRPSAGGGGAATAEERRLGXRRGGERSGGWTVRRGGPPLVADAEGCGGAATARRRG

SEQ ID NO: 165583 - protein, 168 aa, Oryza sativa
  Clone ID: PAT_MRT4530_64375C.1.pep
MAALPLATAEVCDANADLIMNGELRALQPIFQIYGRRQVFAGPIVTLKVYEDNVLIREFLEEKGHGRVLVVDGGGSLRCAILGGNPVQQAQNNGWAGIVVNGCIRDVDEINGCDIGVRALNSHPMKANKKGIGEKHVPVTIAGTRICDGEWLYADTDGILISRTELTV

SEQ ID NO: 165584 - protein, 140 aa, Oryza sativa
  Clone ID: PAT_MRT4530_64376C.1.pep
MAQELHCKYADLTLWNQNGIAANVCLDHYKLGRNGEDYPEGAASKKLCRNGFTTYMQAGPEPSLIYAFLVNEAEDVVVDEQLRLEERDELVEGLCATSSIVSATVESGVQKHLEPMSHVLPSEEASALPPGRRQHQHDLL

SEQ ID NO: 165585 - protein, 64 aa, Oryza sativa
  Clone ID: PAT_MRT4530_64377C.1.pep
SGTQGARAQQLIVGWLYSVVDQIKGRVTRPGGRRCSVCFGGLHLWPHCGSRGGQGAAWCGRHCG

SEQ ID NO: 165586 - protein, 106 aa, Oryza sativa
  Clone ID: PAT_MRT4530_64378C.1.pep
KVLFLELENVKGAVEAEVVEAIPSFEVRFDDALLAVSWAVDLASAIASPVPNNKLLAGFATVFVLSDLVAATIEVLEPKLNVGIAGIGDETGGLVLDGANVVDTVA

SEQ ID NO: 165587 - protein, 473 aa, Oryza sativa
  Clone ID: PAT_MRT4530_64379C.1.pep
YVSSVTKPTTLDITNLEGGNERERTEDVHKSSDKVLPSAAPFHFASAASTTASLSNGFSLPSSSKLSNVTPIDKPEVSLAPSTVSTTFAPSSTSPPVSSPIPAIPTFNFGSSTSMVAATKSDSTNTVAKPASSLLFGTGDAIAEAKSTAQDTANKASSNLSTTPISSNISSSPVTSSSAFSSIATFSSSMVAASNDGIASTTSASTAPFTFSSTGASSSGSGSVAFGVGTASTGSGITSFGTGASSSWPSTVSFGLGASSSGTGALLFGAGASSSGTGALPFGAGASSSGTGALSFGAGAGTSSSGPGTVSFGAGTSSGPGTVSFGVTTSSSGSLFGNSPFGSGTTFSGPGSGFAFSSPSSSAGSSLTMASTSMFSTSSTASSSPAFSNPFGSSSSPPSMFTFGQSASSGGGFSFGAQSSPAFSSQAPVFSFTSASMNSSTPQPAFGMTNANTSFGMGSPSSTSTSTDIWFLT

SEQ ID NO: 165588 - protein, 191 aa, Oryza sativa
  unsure (1)..(191): unsure at all Xaa locations
  Clone ID: PAT_MRT4530_6437C.1.pep
PAATEAHSSGLPRTTAQVREGEEDKGRGGAYLASHGEALSLPRRRHAPAWGCVAVASAFIDEAAAAGRGLGHGARFMSKQGRVTYYKLAEPXPSHKPKPHPTPTPNPLPTPEPQPTPEPEPDPTPXPRPEPQPAPKPVPKPYPEPTTLPPPETPTVSGPIPLPKRDPHKNERAGSCLTLEVLMPSVEVNRA

SEQ ID NO: 165589 - protein, 124 aa, Oryza sativa
  unsure (1)..(124): unsure at all Xaa locations
  Clone ID: PAT_MRT4530_64380C.1.pep
IISLAVVLKRFDWKNLALPKLXNGFEENPLFPSWLNNKKAPTIRLSKNLHNLNDNWNPPFCGALTAGGVWFTPSCTVTFASSLGPDLLVFFLSFLATLAVFSRKVLNGGFLFGFQFKVLRPLNP

SEQ ID NO: 165590 - protein, 277 aa, Oryza sativa
  Clone ID: PAT_MRT4530_64381C.1.pep
MSTHSTELVKGSHEFTVAGYSLQKRNGTGHFVRSGSFEVGGYSWAIRFYPAGSTKEEERHVSVFLELGSTVVEKVTARFRFRVNGATASSWGQFNDFTLSSKTWGYQKFMEIEPVESEYLINDCLTMHCDVEVVKELKTGATMSRFITVPPPAICCHLEQLLESKEGCDVTFQVERSDYDAHRVVLSARSPVFRAQFFGPMADTGGGDRPTQTVFIPGRNIIGVVILHETLYELHRKGIPMHFRKHSNKYWKVIEERIEKKLSSWKDRIIITMVGSR

SEQ ID NO: 165591 - protein, 430 aa, Oryza sativa
  Clone ID: PAT_MRT4530_64382C.1.pep
MAAALAIVVTRKKKYLEAAPSHLAAGGSPRVGTAEHDWLWDCRGIGGGGRDYAREMEVAVRVVQAACTLCQRVQSSLLLPASASASGSVHSKIDRSPVTVADWGVQAIVSWLLSDCFQDENISIVAEEDDETLSSSDGAALLESVVAAVNGCLIEAPKYGLRSPEKELKAHDILQAIRRCSSIGGPKGRFWVLDPVDGTLGFVRGDQYAVALALIEDGEVVLGVLGCPNYPMKKEWLNYHQRYYRLMSKVSPPTSGSWHKGCVMYAHRGCGQAWMQPLVHDFGKLDWRNSREVRVSTVSDPISATFCEPVEKANTSHSFTAGLAHSVGLRKQPLRVYSMVKYAAIARGDVEIFMKFARAGYKEKIWDHAAGVVIIREAGGVITDAGGRPLDFSRGVFLEGLDRGIIACSGPLLHHRIVGAVDASWNSSTL

SEQ ID NO: 165592 - protein, 64 aa, Oryza sativa
  unsure (1)..(64): unsure at all Xaa locations
  Clone ID: PAT_MRT4530_64383C.1.pep
FKKRLYISDLMKRQKIPFLKKVIXHCMFCDIKRVPLVKYACCALAESAGFGRSHGWEDFXHNIE

SEQ ID NO: 165593 - protein, 113 aa, Oryza sativa
  unsure (1)..(113): unsure at all Xaa locations
  Clone ID: PAT_MRT4530_64384C.1.pep
LFFVEKKFRKRAQGKPIHWGKKINNYISYIRTKATGKTNQLIKNLASKRRARFLDETKNQPKTFTNWRSIPSKWNANFAGTFGKNAMFHALGTLDSAFGGFXLKPTVLHASWT

SEQ ID NO: 165594 - protein, 103 aa, Oryza sativa
  Clone ID: PAT_MRT4530_64385C.1.pep
AQHCSSRRPARAVVSWPSSCRMIAPCRLGTSRTSPPPSWGPAPVGVSNHPVGGGMEWAWVGPSLWYTGTGGTDPALGRGCVHPMDDQFVMFIEPFTGGVQMSL

SEQ ID NO: 165595 - protein, 109 aa, Oryza sativa
  unsure (1)..(109): unsure at all Xaa locations
  Clone ID: PAT_MRT4530_64386C.1.pep
AGWHAFFIAVISTFMTILEDDSDHKLLXEKALIGQINIEDMSGKAKDVISEEGSTKEMKDSDDDVGMVIGGYAQDLYNHSGLEELMQDQDALEKSLKTSPEGFRGTVLR

SEQ ID NO: 165596 - protein, 79 aa, Oryza sativa
  Clone ID: PAT_MRT4530_64387C.1.pep
MRRACLGFTSRVRITQADPNGVAFIHGDGVVLLKMLTGKLPANTVPGFDGVDLSQWVRRGAGVDGRGVRRQHRRLGMRR

SEQ ID NO: 165597 - protein, 89 aa, Oryza sativa
  unsure (1)..(89): unsure at all Xaa locations
  Clone ID: PAT_MRT4530_64388C.1.pep
HAVVXVHRHAAHXPPRRRLFSSXASPPASESFGYRWLDRSPITKNNRNKRASAAAFIPEHAGAARLHQQQANNNNSSPDAAXCRAECGE

SEQ ID NO: 165598 - protein, 269 aa, Oryza sativa
  unsure (1)..(269): unsure at all Xaa locations
  Clone ID: PAT_MRT4530_64389C.1.pep
VNAIDKKCRAFQWTGMDAVQGGRCIMSWTSVCRPRAIGGLGIVDLXGFILHLRXLWLQRSGHLYWADLKAPSRDMSASFIFFVPGNDTSLFXRNQWIEGRSVASLVPGLLLAVPPHLRASRTITSALSNNLWVGDIRGVLTVPIISQFLVIWDTVFCVQLXRWTSDWCYLAYQTFFLGQHSFACANLLCQAKGPAKCKLFLXLAFQKCRWMTNLLLKRGIDSHSVCPLRAQEMETVNHILLDCVFAHQVWHPHSRSGGRLLGPACQSTS

SEQ ID NO: 165599 - protein, 232 aa, Oryza sativa
  Clone ID: PAT_MRT4530_6438C.1.pep
MARITLINKLRKALGEQEAKSELLRNQLLVARAKAEHAMQLKQRLGSALNNGAGSSSSPLMVTLPPGQTAAMMQNSAAMPIFPQFQPLHPATSLPATSSAVGDEPKKTAAAMADKLASLSAPEKVLSSIFSSLAAEQARNSGSTSGDLSAGPPGFESNKKPRLDNPIHASDMSAPPFFGQLPQVQPQIGSTAALSTQPPTQANQAAGSFPPPSLPLMPFVQILEECLEWDLL

SEQ ID NO: 165600 - protein, 172 aa, Oryza sativa
  unsure (1)..(172): unsure at all Xaa locations
  Clone ID: PAT_MRT4530_64390C.1.pep
APPPPTPQSPDHPNPSPDATPPPAAGPAPRTPRRRLPATSPWATPPPPPPPPPPPRPPSPSPAPAPAPPPSPSPSPSPSPSPRCSPPPXPPRPPQPPPPPPSSPSPALHPSPSXPQPPPPPASLSPSRCSPLSRCRQPRGDEEGRLPPSLSSLLPPPPFGCPSPRVPESWSA

SEQ ID NO: 165601 - protein, 48 aa, Oryza sativa
  Clone ID: PAT_MRT4530_64391C.1.pep
LGLLMLILSFHISLREIIRLRTSLIRTEKNRVFNYTVHTVEHMINNRG

SEQ ID NO: 165602 - protein, 112 aa, Oryza sativa
  unsure (1)..(112): unsure at all Xaa locations
  Clone ID: PAT_MRT4530_64392C.1.pep
LESNPPHGTLLSPPPTTMAMXTQXSAAKCHLLAAWAPAKXLIHPLHAHLEGTHLXQXGGGGSXXRGGDXGEEASPXGVXCRXXXDXNTSFPILGGRTGGLLRKGAGGGVLRH

SEQ ID NO: 165603 - protein, 76 aa, Oryza sativa
  Clone ID: PAT_MRT4530_64393C.1.pep
MPSSEVPELAAASLVVGCLDPGRMTSELVSAQLLPGGAEQALSVQLGDLSHLAYSHANQALFSPMAQHTKSCFHSE

SEQ ID NO: 165604 - protein, 534 aa, Oryza sativa
  Clone ID: PAT_MRT4530_64394C.1.pep
MSFVGERGPHAPKATHTLRLLLMAISKAWISLLLALAVVLSAPAARAEEAAAAEEGGDAAAEAVLTLDADGFDEAVAKHPFMVVEFYAPWCGHCKKLAPEYEKAAQELSKHDPPIVLAKVDANDEKNKPLATKYEIQGFPTLKIFRNQGKNIQEYKGPREAEGIVEYLKKQVGPASKEIKSPEDATNLIDDKKIYIVGIFSELSGTEYTNFIEVAEKLRSDYDFGHTLHANHLPRGDAAVERPLVRLFKPFDELVVDSKDFDVTALEKFIDASSTPKVVTFDKNPDNHPYLLKFFQSSAAKAMLFLNFSTGPFESFKSVYYGAAEEFKDKEIKFLIGDIEASQGAFQYFGLREDQVPLIIIQDGESKKFLKAHVEPDQIVSWLKEYFDGKLSPFRKSEPIPEVNDEPVKVVVADNVHDFVFKSGKNVLVEFYAPWCGHCKKLAPILDEAATTLKSDKDVVIAKMDATANDVPSEFDVQGYPTLYFVTPSGKMVPYESGRTADEIVDFIKKNKETAGQAKEKAESAPAEPLKDEL

SEQ ID NO: 165605 - protein, 110 aa, Oryza sativa
  Clone ID: PAT_MRT4530_64395C.1.pep
SCLREVSEDWTFTLAANKLWYKRLIEIGVLSYPWCECVTVLPVCAADSALAASILQERKLNRSRRCASHLSCAYRSMSQDLRHVLHSGSGQFVLVRDALLCRVTGTTGPL

SEQ ID NO: 165606 - protein, 150 aa, Oryza sativa
  unsure (1)..(150): unsure at all Xaa locations
  Clone ID: PAT_MRT4530_64396C.1.pep
MRILALVVAAAALLAAAATAHEHHGEAPTCAGGGSGRVLAEFRPGEVTLDGHPADWDGVEASEFALLPALDPDEDKAYAGGKVFVKAVHDGVNIFFMLKGDGDYTYTKGENXKCPFCWSDGSNMERKAPNYYMGGWKDMPGSCTSTSCRG

SEQ ID NO: 165607 - protein, 242 aa, Oryza sativa
  Clone ID: PAT_MRT4530_64397C.1.pep
MGRPGYLTLPILSVLAAIGYVYYTTVFVAVARWLGLATAAGAANAAAITALAAACVATYAVAVCRDPGRVPPSFAPDVEDAESPLHEIKRKILIIGSAMYSVPVDEHSSNDSSRTSIIICGIILCPLTLALTVLFGWHIYLILQNKTTIEYHEGVRAMWLAEKGGNLYHHPYHLGVYENLISSINILHILIEGNKGTTEYLTFEKQCRRLSPFPLYKTSKLLPLPIHPVETERKQNMRMSIH

SEQ ID NO: 165608 - protein, 240 aa, Oryza sativa
  unsure (1)..(240): unsure at all Xaa locations
  Clone ID: PAT_MRT4530_64398C.1.pep
MPPPPPPPPEWADLPVDAVLAVFERLGAAEVLMGAGVVCRSWLRAATREPRLWRRVDLTACFDPTVDMEAMARAAVDRAGGRLEHFAAERFVTDELLLYVAKRTSCLKSLRLRDCIKISEKGLVAVGKTSPCLEELELTTCTISILLKAVGEAFPNLKCLRLNHRXXLMGSXDEFRDNFHALGIACSMHRLRHLQIFANRLRNNALAAILDNCPHLESLDLXRQCFTXDVDGRSESVCKL

SEQ ID NO: 165609 - protein, 168 aa, Oryza sativa
  Clone ID: PAT_MRT4530_64399C.1.pep
MAGLPFPSDSDTALEAFLADIGFGAPCPEAAPAPSPSHPDTTAAAATDEPVMAGDDQADEERRRRLRRRISNRESARRSRARKQRHLDELRAKASALRATSRDLVARLRGARARAALVALTNAQLRDEAGKLALRLAAARRVIALRQLYSAAAAGGGFEMQALASLIA

SEQ ID NO: 165610 - protein, 45 aa, Oryza sativa
  Clone ID: PAT_MRT4530_6439C.1.pep
NRAWPRPWATASGVEVPASVPHRLRSVLFAFYPLSRFEHSSSDFS

SEQ ID NO: 165611 - protein, 76 aa, Oryza sativa
  Clone ID: PAT_MRT4530_643C.1.pep
MDEVWGHLSTINRILESHDLHLPHIKKHGSGSGTGEESFVPNQDQSTSGSGVLRNNELEFLDFDIHRSSSLVLVIP

SEQ ID NO: 165612 - protein, 44 aa, Oryza sativa
  unsure (1)..(44): unsure at all Xaa locations
  Clone ID: PAT_MRT4530_64400C.1.pep
TIWITGMSSSSTFIYAPMRSLLPHVXQCHPRSASAVDLFPEGLN

SEQ ID NO: 165613 - protein, 332 aa, Oryza sativa
  Clone ID: PAT_MRT4530_64401C.1.pep
MPPPPPPPPEWADLPVDAVLAVFERLGAAEVLMGAGVVCRSWLRAATREPRLWRRVDLTACFDPTVDMEAMARAAVDRAGGRLEHFAAERFVTDELLLYVAKSLSSHCLKSLRLRDCIKISEKGLVAVGKTSPCLEELELTTCTISILLKAVGEAFPNLKCLRLNHRWFDVQFDEFRDNFHALGIACSMHRLRHLQIFANRLRNNALAAILDNCPHLESLDLRQCFNVDVDAEVRAKCARLKDVRFPNDSTKDYEYETFIETPSLDSLPLPFPAAVPQWPFHGNDEDDDNDGDQDDDDDGDQDDDDLGGHRVTEYGFIIGDYHVRGRIIHHE

SEQ ID NO: 165614 - protein, 35 aa, Oryza sativa
  Clone ID: PAT_MRT4530_64402C.1.pep
MGSRTQDQWRIQHGSGGTPLLFISRSATAQDLRCY

SEQ ID NO: 165615 - protein, 66 aa, Oryza sativa
  Clone ID: PAT_MRT4530_64403C.1.pep
TIYMSTAKEQGHLFVGHLEQLAASDKLPTDAVFAIVVVSKISRLLSISFLREIFSPPKTKSSLAYN

SEQ ID NO: 165616 - protein, 195 aa, Oryza sativa
  Clone ID: PAT_MRT4530_64404C.1.pep
MVHVSFYRNYGKTFKKPRRPYEKERFDAKLKLVGEYGLRCKRELWRVQYALSRIRNNARHLFTLDEKNPRRIFEGEALFRRMNRYGLLADGQNKLDYVLALTVENFLARRLQTLVFKAGMAKSIHHARVLIRQRHIRVGRQIVNIPSFMVRVESEKHIDFSLTSPFGGGPPGRVKRKNQKKASGGGGDGEEEDEE

SEQ ID NO: 165617 - protein, 67 aa, Oryza sativa
  Clone ID: PAT_MRT4530_64405C.1.pep
RLNDPEAEKQQQELLIKCISEDMGFSIARPIAAYLIYRCLIHWKSFEEDRTTVFDCIIQKISAATEV

SEQ ID NO: 165618 - protein, 195 aa, Oryza sativa
  Clone ID: PAT_MRT4530_64406C.1.pep
MVHVSFYRNYGKTFKKPRRPYEKERLDAELKLVGEYGLRCKRELWRVQYALSRIRNNARHLLTLDEKNPRRIFEGEALLRRMNRYGLLADGQNKLDYVLALTVENFLARRLQTLVFKAGMAKSIHHARVLIRQRHIRVGRQIVNIPSFMVRVESEKHIDFSLTSPFGGGPPGRVKRKNQKKASGGGGDGEEEDEE

SEQ ID NO: 165619 - protein, 488 aa, Oryza sativa
  Clone ID: PAT_MRT4530_64407C.1.pep
MWVGDENGDAGTFSPISLSSENGGLVSFFVVAVLIGPRWKKGNDGKDFSALAAANPMSVIVAELKASFISSKPVAVLSGPGGGAILGVEPEQAVILNRAAFGHAVEIAAAQKHWFQLSPEEVFYLCHVLNCIRVESHDKKQMSDKQLWNHFRSMSESFPEMYKAYSHLRFKNWVVRSGLQYGADFVSYRHHPALVHSEFAVVVVPEGAAFGNRCGRMEVWSDLLCALRASGSVAKTLLVLTISSGSCELSSPDCLEQLVVHERTITRWIPQQCREQRSEASRDEANREELISKKESVEFNLWDGKTFKKPRRPYEKERLDAELKLVGEYGLRCKRELWRVQYALSRIRNNARHLLTLDEKNPRRIFEGEALLRRMNRYGLLADGQNKLDYVLALTVENFLARRLQTLVFKAGMAKSIHHARVLIRQRHIRVGRQIVNIPSFMVRVESEKHIDFSLTSPFGGGPPGRVKRKNQKKASGGGGDGEEEDEE

SEQ ID NO: 165620 - protein, 278 aa, Oryza sativa
  Clone ID: PAT_MRT4530_64408C.1.pep
MRERGIVRTGSAADATGSAADTAATAATTTLTPLSLSGTTDLVRIGAAEEEEPQEGSAAGDSAAAAMLVTIWELQVCMIWATRDNTAKLNLAYGKTFKKPRRPYEKERLDAELKLVGEYGLRCKRELWRVQYALSRIRNNARHLLTLDEKNPRRIFEGEALLRRMNRYGLLADGQNKLDYVLALTVENFLARRLQTLVFKAGMAKSIHHARVLIRQRHIRVGRQIVNIPSFMVRVESEKHIDFSLTSPFGGGPPGRVKRKNQKKASGGGGDGEEEDEE

SEQ ID NO: 165621 - protein, 379 aa, Oryza sativa
  Clone ID: PAT_MRT4530_64409C.1.pep
MRTTRRHPLHDAIDAARWDAEPPLGRLVVVAHAAFLHAGFVPYSAGGSSSASRRPLPDEIGAVASSLSLRYTVPELLRRTTTQRRRSRAETAVLRLCAHGDHVVFYGYLTGDANQVQRLQTTRHWACIDALSVASVLLSGDLDATAHALADDGAGLWKKLAGGLARRLFVDMCRKNSRLLPPRLTSLPPDLQEDILRRLAVEDIAAMYFTCTGLRDLIAGSEVLNNNFQWGELWMNFAWSQGYLRRWLPSPARVVVGRRSQTTSFVAGDGEDRCRWRDPTKQMIERFVEKRIVRVIVHMLQSGIEMSVISDHETIHECPPTCPHGSKPFLKSLRNGTSLHLVANWQLINCHSIVRQMISFHGIKWYIIASRTLSYLLKD

SEQ ID NO: 165622 - protein, 96 aa, Oryza sativa
  unsure (1)..(96): unsure at all Xaa locations
  Clone ID: PAT_MRT4530_6440C.1.pep
MGLSSLGFLLLSKPGGPAERSPEVEPLFLACSAAREEKMEESTFSGADKDASLHACRSTLEDPRVPSSNSXHPPFASWRNSEEARTDRPSQQLRSL

SEQ ID NO: 165623 - protein, 603 aa, Oryza sativa
  Clone ID: PAT_MRT4530_64410C.1.pep
MEETRAKRVDASARMRAVPIAVTPEGFWCCPSPAALHKSLKNNPHHHGGGGNHKPPPPTPPPQQHKTTTPSAPPSRAPSVLSEPVAGDAPDEPPPQPAAAEAEAERHKICVGFGQPETSDVTVVLYGKEGIAVRMSVHGDVLRRSSAFFAEKLSSSSSSSGSGGHGHGSCLEIHDCDDAEIYVETVGLMYCDEAKHKLLKQNVSRVLRIMKVAESLGFHACVKSCLDYLEAVPWVGEEEDNVVSSIRHLQSKAYGVSPLLKRITSDNLKSPTDTLALIMEMVLKSTDDRARREMKALVLNLLKDSNHCTDGSSDISSELLYSSCQGCLDRLRLLFSEATGQEFSVELTRQITLETDNLLWLVEILVNQRICDDFVALWANQSKIAELHGKLPVASRHTVSCITARLFVGIGRGEMLPSKNTRLLLLQVWLQPLIDDYSWLQCSCRSFDRKLVEEGIGQTILTLPLEDQRSMLLAWLGRFLKLGDNCPNLQRAFEVWWRRTFVRPYVSQARILFIQKMCYIPNSQHYSVGCNSVLQSQHDESFAVKMESDSVKIFSGEHLEKEKHVPYQGEITILNKLKRVKIQLSDPFVRRMVEKNVNNFSLS

SEQ ID NO: 165624 - protein, 157 aa, Oryza sativa
  unsure (1)..(157): unsure at all Xaa locations
  Clone ID: PAT_MRT4530_64411C.1.pep
IGGKSSNKWRFRHRVVLNFEEIQELIDLGLLSSVTLLNEIEDTIXWRRNNVATYSAKSPYLFQFIGSQQDKVFLLNWKASALPKQKFLGWLILHHKVLTAENMLIRHWECDWICPLCRGEFEDTDHLFRQCDFLKETWNLVSTCMQQIKTLWRELML

SEQ ID NO: 165625 - protein, 1549 aa, Oryza sativa
  Clone ID: PAT_MRT4530_64412C.1.pep
MAAGADAHREVVVAHKLRDLLFQEPHRPPSGLNQSPDFSLADVVEVVFAHELDHAQQRWEARRDQAGRRGMVTKTRSQESMDGVEELTEMRVEIATIKKDLGALKGLKNEMAEVKKLLKVMCASLGEGDPEKRPETGEASERVSGAPHDVNATTALADIIDGSGPMLTGTAPIMSQGGGFFIEPNVTQPRMSNCMASMPFVAGSNAVYAEAIIKGPRLEISLFEGDDVIGWLKQCEKFYELTGTPHEQWVNLALAHLSGRAAWWFRGVGIPWQLISWPQLAAMMCDRFCEASDHEAVEQLQNVKQANLSVTQYIDKFEECVDLVRREHPYLQEQYLNSCFIGGLRGDIKHDVSGQKPQGLLQSYWYAKNYERAANAKRAIYNFNRNRNQQQFAGNQGRPMGPRNQLRGEVDKKEEKKCWFCKEPWFPRHQCKVKQALHALLVEDEEQGEDSEGNAEEVIQEEEPPVEQEKPVQEGAKVELMCISQNALQGTTRPDTFLVMILINGRRAVGLVDSGSTGTFMDQEFALKSKCPIHQTLAKKIVVAGRGELLSEDQVPEIKYQIQGEDFSNGFNLIPLKGYEIILGADWIFTHSPITLDLKQRELVITKEKQKIILQDFTKPGKRARVGEKKMGKLIRKGAVGCVIQIHTISVEKENEKHVIPPEIQEILLKFPQVLKEPQGLPPRRKCDHTINLKTGSDPPNLRPYRVPHYQKESMENIIAELIQSQEIQISDSPYSSPAVMVRKKDGSWRLCVDYRQLNGQTIKNKFPMPIIEDLLDELHGSRVFSKLDLRSGYHQIRMHPDDVHKTAFRTHLGHYEYNVMPFGLTNAPATFQALMNQVLAPYLRKFVLVFFDDILIYSKNKEEHLEHIKLVMQALLDNHLVIKLKKCEFGLDRIAYLGHIISSEGVATDPEKVEGIRRRKIPNNITELREFLGMAGYYRRFIKGYGVICRPLHDMLRKDAFQWGPEQTTAFEELKLRLSTSPVLTMPDFSQPFVIEADACNTGIGAVLMQTGKPIAYLSKALGPKAAAQSIYEKEAMAILEALKKWRHYILGNKLVIKTDQQSLKYMMNQRLVEGIQHKLLLKMMEYDYSIEYKAGKENLVADALSRGKISEAVPAESCQAITVVIPEWVTDIKRSYEGDVLAHKIISLIGTDMDPEQLYKEESGLLKYKGRIYVGSVTKIEHVHIPGLLSPLEVPDMAWSHITMDFIEGLPKSKGKDVILVVVDRLTKYAHFIALSHPYTVEQVVEAFMDNIHKLHGMPLVIVTDRDRIFTSNLFQELFKARRVNLRFSTAYHPQTDGQSERVNQCLESYLRNMTFKEPQNWYSWLALAEWWYNTTYHTAIQMTPFKALYGYTPPQINEFSVPCNVSAEARVSLEEKEAIIQNLKSSMDAAQKRMKHYADRNRTERELQVGDMVYLKLQPYRQNALGVRGSLKLRSKFYGPFRVEQKIGQVAYKLQLPEGANIHPVFHVSQLKKHLGRHAVPMPNLPLVGPDGQIKAEPVAILQRRMIPRRGEPVVQWLVLWRNLSPADATWEDATFIRATFPNFEP

SEQ ID NO: 165626 - protein, 107 aa, Oryza sativa
  unsure (1)..(107): unsure at all Xaa locations
  Clone ID: PAT_MRT4530_64413C.1.pep
YSRRISITKRAASHSTRCTRKYRAHPQRNPLQSRSRHTSQASPPGFLSPSTYNCVLLLGATHNTFNLCSSIQTTESAQKNSRVHLGVQDSGTSRGTRVLIPAHXFLX

SEQ ID NO: 165627 - protein, 58 aa, Oryza sativa
  Clone ID: PAT_MRT4530_64415C.1.pep
LLCIYMVTKLIGHSYYYDHAMDTRGALPLNVLCDITRVWLWNTLPGQVTFRWIGHKLG

SEQ ID NO: 165628 - protein, 172 aa, Oryza sativa
  Clone ID: PAT_MRT4530_64416C.1.pep
MPSSFSFPSSSPSLSLISLSPLGLSLGRSAGETAMGSGGGGWERGRIKDRQYLLVPEGTDHPPHAALSSPSPSPPHVFHRIRVAACALRVLRNLQPAAATIWSKLGDGEGPRVLLYYTSLRVVCGTYEDCRAVRAILWGLRAAVDERDLPMDPTFLPELAALLPQRRHMTLP

SEQ ID NO: 165629 - protein, 63 aa, Oryza sativa
  Clone ID: PAT_MRT4530_64417C.1.pep
AQVKSSPLKTLKFGGNSNLNWVIILKGWPIIKTYALIPGPSEPKTYYLDSTRINVSIPWIRKY

SEQ ID NO: 165630 - protein, 184 aa, Oryza sativa
  unsure (1)..(184): unsure at all Xaa locations
  Clone ID: PAT_MRT4530_64418C.1.pep
MVVSATTSTPALSAPHSLSTHSAALPSCSPPPASTTTAPAPPPAPRRPPXPPSARPPPLPPPSAASAHPPPPPPPSATTAAGTRRRQAATSSLPPPPSPPPPPLKLRLLRGLLLLWGVAAAAAAGHRRRGRRVPPGPPAARLPAAVPLLVGYGDGGGGGMLGRAMATVALVGLEEREVARGGLG

SEQ ID NO: 165631 - protein, 44 aa, Oryza sativa
  Clone ID: PAT_MRT4530_64419C.1.pep
HNIIGQHHQKQLIGSQAQFYRVFHKRKQHSSAPIIGSCPSIIYP

SEQ ID NO: 165632 - protein, 128 aa, Oryza sativa
  Clone ID: PAT_MRT4530_6441C.1.pep
MEATAGSRGEPRTRVGGGGGSCEQPTGNKGGGTWSEAAARSSFPSSPPSRRHGARTHLRCCGLSLPLPCAEPTDRFPLLVSRRCQPPAPARCCPLPATHACSRVAAATALLHSVVGRPLRLCLSELIS

SEQ ID NO: 165633 - protein, 177 aa, Oryza sativa
  unsure (1)..(177): unsure at all Xaa locations
  Clone ID: PAT_MRT4530_64420C.1.pep
WWCPPHRTPSARTAPHSHRALHLPASTTTAPAPPPAPRRPPRPDLRPPTVCAAALRRLRPPSASTAAFRYHRGRNAPPASSHVVPPSSSVATAAAAQATAAAXVSCCCGAWLLLRQPVIAVEAGGFLRGLLLLVYPLLCLXLVGYGDDDDDDMLGRPMATVALVGLKKRKVTRGGLG

SEQ ID NO: 165634 - protein, 105 aa, Oryza sativa
  unsure (1)..(105): unsure at all Xaa locations
  Clone ID: PAT_MRT4530_64421C.1.pep
MALVSASSSTTAVAGXXXRRRASSFLGGXGRSGXXLXRQAXXSSXRASXAVRAAAPERPIWFPGSTPPXWLDGSXPGXFXFXPLVFGSXPEXSLRWNVXAELVXF

SEQ ID NO: 165635 - protein, 223 aa, Oryza sativa
  Clone ID: PAT_MRT4530_64422C.1.pep
TAYRPRRSRAVAHTRPQSGHGTATDTGKNGQLTRCSSVVTRQTYDGGTVTPTHHQGEIFENGFTSARAAKRSAYQNAADKSVRQQNATHLAGRFGLCTSVRRPGTPAIRDTPDLSPPAVEDTHRPWEGDHSDPTGAGLPPPATRLPTAAAVSRLASLPELPPPATSAGVGPGTCLSQRPPPAHSPTQIDRPTTVSVLVNPPEGAPGIYIPPGSLLPVVLNNRE

SEQ ID NO: 165636 - protein, 134 aa, Oryza sativa
  Clone ID: PAT_MRT4530_64423C.1.pep
GGQGARRGDWARVGGEQRGDGARSEAAAAVEAERASAGGDRGGVGAAGVDVVKPEERLEHAPPAEAGARAASASDSEQYRLAARDMALATSNDRMSTFRHPPPPPPHAPPLPLLVTGFIFLDDDVAMDNTLCTA

SEQ ID NO: 165637 - protein, 414 aa, Oryza sativa
  Clone ID: PAT_MRT4530_64424C.1.pep
MAATAAAEAEAAAGDEAWCRETVPRVMELVSPRLPQRDACALLAVSPWCHRALVANPKLWEVRYRVASLPSTFFVLPLLALGLDSRGVLLRCFALLRKWSLAWASSLEWPPRYCHLKIINLEFAQDIDDRHFVRLKEMGCTSLQELELLNINACQKVSDKGIETITSLCPNLRALSIYWIVGLTDLTIRHIVQNCKHIVDLNLSGCKNISDKGMQLVADNYEGLKKLNITRCIKLTDDGLQEVLQKCSSLESLNLYALSSFSDKVYKKIGSLTNLTFLDLCGAQNVTDDGLSCISRCVCLTYLNLSWCVRVTDVGVVAIAQGCRSLQLLSLFGIVGVTDVCLEALSKHCSRSLTTLDVNGCIGIKWWEVDLFVSGPDALECVYPAVFEFLGFYNIFRGSIQELAHLLRNNISFA

SEQ ID NO: 165638 - protein, 136 aa, Oryza sativa
  Clone ID: PAT_MRT4530_64425C.1.pep
ESLNLYALSSFSGKVYKKIGSLTNLTFLDLCGAQNVTMDGLSCISRCVCLTYLNLSWCVRVTDVGVVAIAQGCRSLQLLSLFGIVGVTDVCLEALSKHCSRSLTTLDVNGCIGIKKRSRDDLIQLFPLLRCFKVHS

SEQ ID NO: 165639 - protein, 38 aa, Oryza sativa
  Clone ID: PAT_MRT4530_64426C.1.pep
HPDTCIQNPILVQGCSWHGKNSNNVESVYRLLRRSTPV

SEQ ID NO: 165640 - protein, 63 aa, Oryza sativa
  Clone ID: PAT_MRT4530_64427C.1.pep
APTRARTLFYWHNRLENTRIAFSDAILMRDRASRRADLTCHNLFYIPHPYYGRRPEQSDSWLH

SEQ ID NO: 165641 - protein, 327 aa, Oryza sativa
  unsure (1)..(327): unsure at all Xaa locations
  Clone ID: PAT_MRT4530_64428C.1.pep
MAASDVHHGGATPAAAATAVPCVTLNSGHAMPVLGFGTGSSTPPADLAATIAHAVRLGYRHLDTAAVYGTEGAVGAAVAEAVRCGAVASRGELFVTTKLSMADAHPPRVVAALRESLSRLGLDYVDLFLIHWPVAIGKKDAAGELTWDDLSXRGLVPFDMEGVWRGMEECHRLGLAXMSRLLALAAVPPAVNQVEMNVGWRQEKVREVCGEGGVVVAAYSPLGAHGAHWGSDAVMNSGVLHDVAAARCKTIAQVALRWLYEQGVCMVARSFNEGRMKQNMDIFDWELSDQDKAMIAGVPQRRACHGNYFVSPDGPYKSLHDLWDGEI

SEQ ID NO: 165642 - protein, 334 aa, Oryza sativa
  Clone ID: PAT_MRT4530_64429C.1.pep
MAFSPVGSGPGDPPYRGGGGAIFQSAGLHGRGRASTRGVATRTPPHRALPPHTSRLDARAWPSPSGLMSSSHQPPEPGDQRPSPVRPRVTVVAASRAPPSLQSSPSLGEVAIVVAVASPSSSAPPPSLSIAGTPPSSSSRRSPPLLPRRRRRPLIFRRCFGHRRAPPSFRSSSLLGEAAIVVAKSSPSSSAASPPPKTAGAPSPPSTRSPPPLLPRRRRRPLLFHRCFGHRALAPCRLAPPSSPSLQPCAAVAPVGRRRHHRVRKVVAVPVHRFAAAEDRRSAITIVDPISAAASSSSPASSIDLPPLLWSPSTRLRSGGDKPTGVAGESMPCL

SEQ ID NO: 165643 - protein, 67 aa, Oryza sativa
  Clone ID: PAT_MRT4530_6442C.1.pep
RHHRRRLGTTCSLANDAAVFGSAVTAMLRRETAATKGWTRRCSSSRSRRWRRQLKAVAATATRRGWT

SEQ ID NO: 165644 - protein, 110 aa, Oryza sativa
  Clone ID: PAT_MRT4530_64430C.1.pep
MLGGYDKRSGGGVGNNGFGLGGACQPPCLLHLRAVELVLATTDLDLDELVGLSVPLTGPPYLLPLHTHSRASPPPSWTTPVLPLRALFGLPVPSPAYSFHSSASPRPPSP

SEQ ID NO: 165645 - protein, 415 aa, Oryza sativa
  unsure (1)..(415): unsure at all Xaa locations
  Clone ID: PAT_MRT4530_64431C.1.pep
SRVNKTEYTETVHGSTEADPVCQPRRVADKRTPLDTTRVAHVETMRLPSGHTNTVTTRTXANDCRHRYTGTGADNRTTGXGRHRKDEDRAARERDPYHHVTRRGNDHDERARRRQTGTTETNGEGTASAAILGRRRDAAGTRLDDAEPRTKTLTAIATLTKHRGWTRTARRRDERHDDRERREDDDDDDRGRRGGDEGSRQWLHGDGDDVEHAAAMTMTEAAPRNGRPKGRRRRRGWRXGTGDGVPAKQRSGRGRRRCHGVDEGDGDVGRRSDEGQQPAGGSTVAPMPLVAGGDASPVVSAXNGGDAGGGEAAATPLAATARPDDAPARRERRLEAAGAKEREGRRRERSSGGLRGKRRASRGRXGHCDAGGGDGEEEAGEGEGEKEREEERTSAAGRGREREALGQTWPKGKRR

SEQ ID NO: 165646 - protein, 791 aa, Oryza sativa
  Clone ID: PAT_MRT4530_64432C.1.pep
MESSPACDGNGASATFGGKRAAAEVALAAAAVARRGGEPSSDGVRPKVGSGRRRQEKGETSGRDKKPSMSPPPSCLTFLGSGLLRLSSLFLTARHLLAANSYASHLVCVDDPCTDQERVGFATHQLVGPASEWWDSYEASRPEGHTITWNEFSSVFRRSHVPAGMITLRKREFRYLKQGDLTVTEYLHEFYRSAHYAPEDVETDEDKQEKFLQGLKDELAVQLLLEDYEDFEKLVDKAMQLESEHSRMTNCKRRMVNNPVFPGGNQRQRTEPLQITGSSVVYQEFLPQGDERNADNHNSNTNADDTTNNHGSGPISDHSNKACNVSSIHQDVNDSINVGTQNDNLSNFDSEKDSNGDSNYGTTDANVSKDFQPPIPTPRHNDHPQMDSSAKKTLICYNCKEPGHFSRDCPQPKRNLRHHSGHYARRRQHRRHLLHAGLPSVSRGDPRNYVPAVALPFPSRRPPPAAFLSSPERRPAAPSSPSASQLPPLPRSALRFAGKSPETRPRRRPVASPPLLRLRPPLPRPRSAGRRRHHLPRLHDAALIPGITSASPELRRNTVARAGFSFLLGGISSGCPGRRARASADVAVSSLGVAASPSTPACPRFRRNVAANLSVRLTGVVRPPVPPRRASVGHLHHHLRHRSGKVVLGIVSPPSKPLRGPSSSSPIVLVVDVPFILARLVVSRRRLRHRHRCGVFRVVPVSVQPLPAALVAPSPVPVVVVVVVLSSFPVAAAPVIVFVLASASSSLVPAASRLRPRIAAEAVPSPFVSVVPVCLRRARSSLSFPRLVAWW

SEQ ID NO: 165647 - protein, 424 aa, Oryza sativa
  Clone ID: PAT_MRT4530_64433C.1.pep
MAETLAEDAADAPLDAAAIRSRLERLALSRRGEEEVASAAAAAADAVRRLPSVEDVEPLQGLEFDAWASSAAPMESDFDAFMEWLSKEVSLAEEENRKLSVEISSVAETTLKACSSQFSLQHLTLCYLDSIQLDADIAELESSLKKIDSQGLKHLEASHIAELSVSTDSCRDQIKFDKDYKYEVLELNQQLEKYENDLKLLENQKSAEAMWELESMLSEANVLDFKDNCLRVFLKEAVLTPECLMYGKESDCSVNSFVSDHELLIEVGENMEPKKVQIFPDDTCVDILLDKLKASRETISTTSLGWIIRQFQHHIIINTLRRSLVKDANNSRHSFEYIDKDGTILAHLAGGIDAFIKISADWPLSSCGLKLISIHSSRAQSADISLALLSKTKELANGLELQTRRHLVKFVDAIEDILFREMRS

SEQ ID NO: 165648 - protein, 1708 aa, Oryza sativa
  unsure (1)..(1708): unsure at all Xaa locations
  Clone ID: PAT_MRT4530_64434C.1.pep
MIQEGALQWIVLCEGYCHNSFSRYRGGIEAHGDMMWGCVLWVQWYTSDQSKTIRIAVPAVMAPGLEWYIPGLKIELCSRDGCSEWLGLCNRIPHDRHEEKCRVKVTLNSNSEDIPSVMFEAGGRNYIHACQEVARIAIGELRDRYSDQLADTEYRYHSRQPQGSDRGSYLETEGIENDATTRHLVEMLWAMDETRAETVLAAQDREDRNRGKICKLEDKVDRLEKELAALKGEAPPQKARICLTARKRALFVPRYQLAPKVRVVEKEVTPALADPPVVNMVVTRSNGNGPNNNNNNNNNGENPTLAQVLAQQAQLMNMMMQQLQNQQNQGNNHAPPQNKLAEFLRVRPPTFSSTTNPVEAGDWLHAIEKKLDLLQCTDQEKVSFASHQLHGPASEWWDHFRLNRTTAEPITWLEFTAAFRKMHIPSGVVSLKKKEFRSLTQGSRSVTEYLHEFNRLARYAPEDVRTDEEHQEKFLEGLNDELSYPLMTGDYHDFQKLVDKAIRQEDKYNRMEQKKRRIAQFKTQQGNNQRPHLTLGPQSMPQGGYSSVVRPQRQFFNNNAGNNIRNQVPRPVAASTQQQPAKREQGSKPVVCFNCGDPGHYADKCPKPRCVKVVPAQSNSTVSASKARVNHVAAAEAQGAPDVILGTFLVNSVPATVLFDSGATHSFLSMSFAGNHGMEVEDLRCPLMVSTPSNQALSLQRSPSVRIEIQGVPFLANLILLESKDLDVILGMDWLARHKGVIDCANRKVTLTSNDGRVVTVHALSSESLRSILNQITLEEIPIVREYPDVFSDDLPGMPPKRDIEFRIDLVPGTTPIHKRPYRMAANELAEVKRQVDDLLQKGIDDLFDQLKGATVFSKIDLRSGYHQLRIKEEDIPKTAFTTRYGLFECTVMSFGLTNAPAFFMNLMNKVFMEYLDKFVVVFIDDILIYSRTKEEHEEHLRLALEKLREHQLYAKFSKCEFWLSEVKFLGHVISAGGVAVDPSNVESVTNWKQPKTVSEIRSFLGLAGYYRRFIENFSKIAKPMTRLLQKDVKYKWSEECEQSFQELKNRLISAPILILPDPKKGFQVYCDASKLGLGCVLMQDGKVVAYASRQLRPHEKNYPTHDLELAAVVRALKIWRHYLFGTRTEVYTDHKSLKYIFTQPDLNMRQRRWLELIKDYDMGIHYHPGKVNVVADALRRKGYCNATEGRQLPLELCKEFERLNLGIVSRGFVAALEAKPTLIDQIREAQINDPDIQEIKKNMRRGRAIGFLEDEQGTVWLGERICVPDNKDLKDAILKEAHDTLYSIHPGSTKMYQDLKERFWWASMKREIAEYVAVCDVCQRVKAEHQKPAGLLQPLKIPEWKWEEIGMDFITGLPRTSSGHDSIWVIVDRLTKVAHFIPVKTTYSGSRLAELYMARIVCLHGVPKKIVSNRGSQFTSNFWKKLQEEMGSKLNFSTAYHPQTDGQTERVNQILEDMLRACALDFGGSWDKNLPYAEFSYNNSYQASLQMAPYEALYGRKCRTPLLWDQTGERQVFGTDILREAEEKVKIIQERLRVAQSRHKSYADNRRRDLSFDERDYVYLRVTPLRGVHRFHTKGKLAPRFVGPYKIVSRRGEVAYXLELPQSLAGVHNVFHVSQLKKCLRVPTEEANLEQIEVQEDLTYVEKPIRILEIDERRTRNRVIRFCKVQWSNHSEEESTWEREDELKSAHPHLFTSSSESRGRDSV

SEQ ID NO: 165649 - protein, 43 aa, Oryza sativa
  unsure (1)..(43): unsure at all Xaa locations
  Clone ID: PAT_MRT4530_64435C.1.pep
AQLIISQMASGVPWQKAGSRSCRVXATGQPAYDHMHLSTMCGI

SEQ ID NO: 165650 - protein, 267 aa, Oryza sativa
  Clone ID: PAT_MRT4530_64436C.1.pep
MVSLLLQWKPTLATKVDSNICDNQGQSFLHAAAMKGHSSIISYAVKNSMLKHLLNAQDKEGNTPLHLAVVVEECKVVSKLLSSGEVSLVVKLHESGAQFQPQRQDLIEKWNAQDIMKWRDNTSKNLAVVSTLIATIAFAAAFNVPGSYGDDGKANLAGDPMYNAFLILDTISMVTSVVATILLVYGRASRSHRSWLSFVISMYFLWLSINCMVFGFFTAIAAVSKKGIKIAMSQLIYHGMYILTMQLTFLAMPGSFISTMKFLVFYG

SEQ ID NO: 165651 - protein, 821 aa, Oryza sativa
  Clone ID: PAT_MRT4530_64437C.1.pep
MGQGVRQTASRHLTLDLTDFFKGSGCLGPRGRGKRNPTPPSGEIRRRADTSPSGPTSPKVPGHVGDCVCLKPLGMLVAASVSLVDIEQPLSFDGAGTTCVVGEKERVDSATDTAGAGRGWRATAVAMKARASAVGMGMGMGRAPKPAAYCLGFQFERKKYTKGRPAGEEEVTGTRRERRSDCRRCGDGARRYKSHLCGAMSSSRGPSSPLSHPNPIDPFAAVAAATAEAPPLRNPIIPHDPPSPEMEATAEALTWEGCCVGGEQLPLLPSASKVVRPVSAMVPRRKKCSFGGCKVRTMAMARFCHSHILSDDHGDGMWRGGVSALEQAERAVSPGERDYGDGKRWASATAGKRRLRGWAVRGRSRWSGGVSERGRSRGAGARRASGGDASPLSPSPAGLISPNSVRSRRCGAPPRWAPPMSATAAAGTSSKNDPAALAFRSPSAVQRRSACRRATRLHSAHRPRSVDCGLKDDLVFGDPNAPRFRRHLPDPAPTSRRGRPQPPAQPTYFSYTAQLPRQLTTSFNPLHSTEPTRAREMEAHLRPLSAAALLLSPAAPLPTAVAASARRASPGGRRWSSVRASAGGGGWLSGLLGGKGGGGAPTAMTVTPGTVKAGDPVLHEPAQDVAPGDIPSEKVQGVIDRMVAVMRKAPGVGLAAPQIGVPLKIIVLEDTQEYISYAPKKDIEAQDRRPFDLLVIINPKLKTTSKRTALFFEGCLSVDGYRALVERHLDVEVSGLDRNGRPIKDSLMGGGRGYGFNNLFSLFIGLYTTVLSLSFVKDRLDYMKLSATAYWLVTNLDKVSSPLPGLKELVMENGTFVRTLT

SEQ ID NO: 165652 - protein, 750 aa, Oryza sativa
  unsure (1)..(750): unsure at all Xaa locations
  Clone ID: PAT_MRT4530_64438C.1.pep
GAALYCSRDWGKWREFRRGRRSDVGDLKLSQLRLHCALAPPPPRISPHPAVPARIKDGENHPRDSLSRFPLFSLSLSLGFVRIAPAILAGAINGGRDLRAXFPPSPAALSPSRRYIIVPRAPLFRFRRSPLALAFGFVLATFSSLSAVAADLRLAAVVAPVFLPTRRHLHRLRRVVADPVRPFASPADRRSSVSFVVPNRAAAFLRSGRRFRRPRCPGVSRGPSLXFPLLSALSGAAPPRRWSPAVTIGARARVSRRSSRRGRLRPPPAAARWGPAVSRPRPRVRLTRGTHGAGRRQPRAPGPPWTERLTRGPHXPWTRTNEGYTSCGPMADNEKGNKVRSQDIGTSSSRVNEAPDNSCVTLVQHLINQNRLLIEILQQHQTPILNLSQIQPQVQLEAVQSLTPQVSMPPASQKTHGGVPHVDSKEASIICFMCDEQGHYARNCPXQKRKTPMRTEDEVRKMIITSTEWPPPGMTKRQRRNTFRGAPQLTEHLLANGGRVSDSEDSDQVSSDDEDEMERKACSRCGEIGHVASSCATTCVHCEEDHPPDRCPTSRITCFFCEGTDHVPKDCQFSFLLTKKMANQPASSNGEKHQGNTNPRQDYSFSLTPVPGQRNQNEKRKCRVREDICCFNCQGMGHFADKCQKPRNIAASTSVHATPCNQKLAPQRIVIHASRSSPIARVATAPTPASASPQGVNAQFQPQPSVDKTGKDFQPPIPTPSQNDRPQTDSSAKKTLICYNCKEPGHYSRD

SEQ ID NO: 165653 - protein, 122 aa, Oryza sativa
  Clone ID: PAT_MRT4530_64439C.1.pep
MERPTPPSRVTETEGWPGGTKRSWSAVAQTGGRGQGVDRQWRSRKPAGVAALQPALARPLPPLSSPASSAAAAATSHGTHRRSSGPRPPPPSLQLSPQTAKGERKGREREIGDPVARRRVAA

SEQ ID NO: 165654 - protein, 107 aa, Oryza sativa
  Clone ID: PAT_MRT4530_6443C.1.pep
MADTKADAKAEAKAETIGGGGSGSFSEQAFVEKLNKLNNTATRIQTLSNWCIFHRKRARKVVDTWEKQYNSANKDKKVSFLSLSNDILHPSLRMGGEFVTEFWRVLP

SEQ ID NO: 165655 - protein, 559 aa, Oryza sativa
  unsure (1)..(559): unsure at all Xaa locations
  Clone ID: PAT_MRT4530_64440C.1.pep
MSHLEGDEYLEEKGDASSTKETGSKGATIHFDYIKLNVPPHNFVSVPSGRAPHFDGTHYAAWKHKMKLHLISLHPSIWKVVCTGIDVPNDDMELTSEQEQLIHRNAQASNTILSALSPKEFNKFDGLEEAKEIWDTLQLAHEGSPAVREDKIELLEGRLGRFVMDDKETPQEMYDRMMILVNKIKGFGSEDMTNHFVVKRLLRAFGPRNPTLVSMIRERKDFKRLTPSDILGRIVSHEMQEEEAREVRQMVKNAAMIKNQEVALNAKQEEESXVKKRFKHFLLKSGYGXGRKDDDKGKRQSERACFNCGEYGHFIADCPKTNEAKAKGDKKKPERAHVVKAHMVEVWYSEDEEASEDKPKPKPKDKIEGEGGIATVAFKSSSSSKECLFNNLSDDDDDSYHYSCFMAQGRKVMTQKPSHTSLDDDSSDEETSLRDVNETLQEKFAILDKSHKDLEVQLDTLWSSTSQPNVVSNSSNPSTSNGCARCYNIDLTSYATNVDAMQALKKENERLGTLVKYGCMKTYHSKDALYKTITAHPNKDGHGLGFSGGMSRPDKFIPK

SEQ ID NO: 165656 - protein, 109 aa, Oryza sativa
  Clone ID: PAT_MRT4530_64441C.1.pep
MTELVAPHRETAQAPLCQFGRGLRFGDLHDHPSFCSILPVMVGMKPGIHLTRANVPSLRDRIKERAALRCMQRDTLDQTAINAVRSNPTPPRGNQEEGGHLTLGPDVPE

SEQ ID NO: 165657 - protein, 220 aa, Oryza sativa
  unsure (1)..(220): unsure at all Xaa locations
  Clone ID: PAT_MRT4530_64442C.1.pep
GGRVSDSEGSDQVSSDYEDESLRHLGEEEMESKACPRCGEIGHVASMCLTLCPHCEEDHPPGGCPTRKVTCFLCEXVSSNSNIDDIIHSTNAPPAAPDSAINHSNNTFSTNHSLRRRPQQRIVVDGRSCFSPRPTPGQAKGNQPQEGDTKQKTSTVSRLPAYLNGTLWTLRYSTFRRNNRCFVAYIVDPQIFDVSLKQPLLLVDPQIFDVSPKQSLLRGL

SEQ ID NO: 165658 - protein, 239 aa, Oryza sativa
  Clone ID: PAT_MRT4530_64443C.1.pep
MAAYVEPQVKLDTADRLVREVDRAAERVRRGEAHWVDWATLLCELAENEMREMARWRRTDACRNGAYWQRLIWAQNPDLFAPPPPPAVSKKMQGIAATSKKLNQDDDDDTKSKMTDEMPAMESLNQAPAINDELQAIRKQLIHALEELTSGRASIGIRRMGELDPKAFANACTQTLTKKQLDSALLYSKWEAEISDSSWHPFRVININGKNKLCPSQLFRVHCHAIADAIVMDPEHVVG

SEQ ID NO: 165659 - protein, 80 aa, Oryza sativa
  Clone ID: PAT_MRT4530_64444C.1.pep
MCFMIHDVLKTKPSILMEFAHVWKAEKSMMQMKLLDNFSFREILHVCKQEATKQSKRDTFQTYQNFRQTQKNQEARSTSR

SEQ ID NO: 165660 - protein, 829 aa, Oryza sativa
  unsure (1)..(829): unsure at all Xaa locations
  Clone ID: PAT_MRT4530_64445C.1.pep
MEIMHEFTEFLCIVYGYPPSTVARQVGGLGAQDSTTMTSSFVDNSVNTNLNQGVPTSTMLVWTQVGKIVFPVYTTVPILAGPSMAGNENAVATTQGDSMLKDPPAEAEIGTSTTSEPEKDPSAAKPCRSDKNHEPTRMTSETKNHDLSSCKVFLRAMKTPPPKVQQSRVAFRDEDKEQGATLISDRFVGVIDIDPHEPSVLHLLEDYDSSSTSTPRETETVITATTATITTIANDGCWAILVEDVTLMTTMMEIGAETTTGDDDRILENPADVLIGIHEGRTIADNPLPPALGVELXSFTSGYDNALANYLPTALKGSARSXLMHLXPYSISSWADLWQQFVANFQETYKRHAIKDDLHALTQNPVESLRDYVRRFNECRNTIPEITDASVIRAFKSAYPDSDLHVSHIFVGSTAYYSKREYKKVEREVCSTWQGAAPKMKWSEQKIEFSEEDHPKTVVILEQYPIMALDGRHELDTKAFIFQGLLFWVWEKLSKTEYNHPDGRGLADRVHRSGAHAAASQSTVDRVHPGSHQPAPWVPRVSRTQGRGRLTAGPHAAASRSTVDRVHPGSHRPAPWVPRVSRTQGRGRLTAGPHAAATRRARGRPSRRSRREAAPAPLWSPAAAIGTAERRPREGKGRGKRSGGPRLTLGRRRRRKRWPERRKAAVRLGSTGSTAFRRSASETEGWTRSARMRRSRRRRRRGGRWSGATTAADRSSAATAERESDGASSIPARRKGGERRKRTEEVARVLIDSGSSINLLFASTLDVQCDKRSLDMVEHTPSPPDTAEPPKKVSRTNKTPKPDGAIKIVPLSSANPDKTVKIGASLGEK

SEQ ID NO: 165661 - protein, 306 aa, Oryza sativa
  Clone ID: PAT_MRT4530_64446C.1.pep
MASPARTGEAAVVVVGVAEQEAAVVEQQREEEEQAAAVGAAAVLLPVGMVMVQVFTAVTLLLSELALGAGAARPLVLLVYRNLVGAAAVAPLAVLFERVLLATGMYYYGLRDTNAAYSANFLNLIPIVTFIIAVIFRAEKLAIASCAGKMKVLGTVLSAKLAKVFPSKYWATVLTCLSGSLQALVAGVLTTGDWSEWKLSWDLRLLAVAYSGVFNTGITFVLISWAITRRGPIYPSMFNSLSLIITTVMDSLLLGANIYLGSVIGALLIIVGLYAFLWGKGQELQLKAAGVKQERHKAAGDDDPEI

SEQ ID NO: 165662 - protein, 631 aa, Oryza sativa
  unsure (1)..(631): unsure at all Xaa locations
  Clone ID: PAT_MRT4530_64447C.1.pep
MSELPHVNCVRYLPPFQHPRLARNIDRVYVSGGAVRAADPAGNLFTAFATNPFAEFNIFGDPFAAYQVIHSGIPITMIPLDATNTISVTEEFVSEFQQHQQTYEAQYCFQSLDKSYYMWDSFAAGVALSSMRNGEVDGENEFSELEYMNITVITSNKPYGKRDGSNPFFDGRATPKLGLKEGGVHSGHVQTGIRDSFCLVPGSNRGRCEDGYTREVSGPEGVRVXVATRAKPNTDKNSSLEKEFSKSFLEVLNRPEQTGLFNINTQFPYYREVLYKPVFRNVSRGKPVIFDMDMSPGDFVSLIYLLKTPIEVIDLKAVLVNGNGWANIAXIDIVYDILHMMGRDDIPVGLGNTTALGIPTLGCNNSYAIPHGSGGFIDSDTLYGLARSLPRSPRRYAPESLDHPEDRQPLALEVWQSVRKQLDPGEKITVLTNGPLTNMANISLSDRDASSVIERVYVVGGLIKDGGDENGNLFTVPSNKHAEFNIFLDPLAAKTVLESDLKIALIPLTAQRKAASFRAVLAALEDIQHTHESKFVHELLSLLQELQIKQKLYHHLDIFLGEILGAVYMVEGSGLKPSVELKPVSVIANTNKSTDGQIVISKNSAKLXNKRQSAVIGSFEEQKAIWSRPIT

SEQ ID NO: 165663 - protein, 26 aa, Oryza sativa
  unsure (1)..(26): unsure at all Xaa locations
  Clone ID: PAT_MRT4530_64448C.1.pep
SHGXTLSEIDLVLALLTSSYFAWLLA

SEQ ID NO: 165664 - protein, 110 aa, Oryza sativa
  Clone ID: PAT_MRT4530_64449C.1.pep
APYRDELRALLVGLDDAAVPPRLFVDGRYLGGANEVVTLHEQARLRPVLRRAPRRGAGDAACAVCGGAWFVVCGACSGSHRLYDAAAAAGGRVPCTGCNENGLVPCPLCS

SEQ ID NO: 165665 - protein, 117 aa, Oryza sativa
  Clone ID: PAT_MRT4530_6444C.1.pep
KYHTQTHTHTHTHTHTHTTTLFNYVTHTNSLSLTHTNSLSLSLTHTHTQTHSLSLSLTHTHTHNFTLTLKKMHTHKSLSHTHTHTNPLSLSLSLSHTHTQTHTHTHTHTNNFTHTST

SEQ ID NO: 165666 - protein, 56 aa, Oryza sativa
  Clone ID: PAT_MRT4530_64450C.1.pep
YPQGTHYKILYIYGVSSLSSSTNRKIRHYFFIRHRFCIKLNHSSISKNNDIDTNYP

SEQ ID NO: 165667 - protein, 76 aa, Oryza sativa
  Clone ID: PAT_MRT4530_64451C.1.pep
MASILATPQEQGIGKYFVPFLRDRPHQWRRPLSFPTPPPPPLALPWTLTVTVMGAAATEKAIALYASWPTEIVLME

SEQ ID NO: 165668 - protein, 89 aa, Oryza sativa
  Clone ID: PAT_MRT4530_64452C.1.pep
TTRKQRKGSSPTMGGDAHLPRQNFQRRKEAWGFVAGTRRVSPLNLDICNHQHLIVCIVQHWHHMHLFFPNEIKREYIYIERERDGGIYP

SEQ ID NO: 165669 - protein, 393 aa, Oryza sativa
  Clone ID: PAT_MRT4530_64453C.1.pep
MRANPIVTALSAAVFGFFIGISFPVQITPQLQCGLLPCSSGDGANYSFSGSSMIGILWSPFRNTTILSNGTSENPALTKPKGAEKLPPGLVVTESDLHMRRLWGSPREDVATGKYLLALAVGYSEKANVNATVLKFSDKFDVVLFHYDGRTTEWDDLEWSKQAVHVSAKKQTKWWFAKRFLHPSIVAPYEYIFLWDEDLGVDNFTAEEYVKVAKKNGLEISQPGLDSTRGKKTYEVTVRRNDGREMHKFVEVMAPVFSREAWTCVWHMIQAINEPMELYMLINMQNDLVHGWGLDFNFWRCVDNPEEQIGIVDAQYVSHHGVPTLIAQGLLCLFVCVTNQFLDLFLQGNGEQQGSSEKVRARQWAEMRTFHDRISNAEKKLGDSSQALEEYHP

SEQ ID NO: 165670 - protein, 1114 aa, Oryza sativa
  Clone ID: PAT_MRT4530_64454C.1.pep
CCASYSTGCLVFCGSSSCRHTYPARDALLNEEVASWRRLAGMRNLQQQASFGEVSSEEISDANRKRMPDQSGLQIKGRVQQALLEYQQYTGGSNSMHGDIGKAARAVKRLKKAAEGEDTDDMEATSHGAAGNAATVRDLCALVKEAGSHIVFLSETRQKIEKVRRLRNRLGLKGFAGVNSDGMSGVKQVSDPPWLVVGDFNETLWQFEHFSLKQRSELQMQAFRDVVQRCDLHDLGFSGVPYTYDNRREGRSNVKVRLDYALADDGWRGLFSTAQDLRDINQALFRMMSDLRTWIKLNGTLLNTFAPSRGLRQGDPLSPFLFLFVADGLSLLLEEKVDQGAMNPIQICRRAPAVSHLLFADDTLLFFKAANDQAVVMKEVLETYASCTGQLINPCKCSIMFGQSSPTAVQNQIKQTLQISNSFEDKYLGFPMPEGRMTKGKFQSLQERLWKRIMLWGEKLLSTGGKEILIKAVLQAMPVYVMGLFKLPESVYEELTKLVRNFWWGAEKGKRRTHWKSWDCLIARKLKGGMGFRDFRLFNQALLARQAWRLLDRPDSLCARILKAKYYPNGSLIDTSFGGNASPGWRAIEYGLELLKKGIIWRIGNDLIDQSESWDTDKISQHFLPMDAEAILNIRLSSRLEDDFIAWHPDRLGRFSVRSAYHLAIALAQVDEGSSSSGNGNSRAWNALWKCNAPQKVKIFAWRAITNSLPTLENKKKRKLEVSDICTICGVESEYVVHALFRCPHARQFWEAMTVDMKLNPLSNIRNGDPKVILDLLEQSQPEEQVMLLMVLWRIWHTRNEIVHGKPAPGILVSKRFIESYVLSLAEIKQHPQASPEKGKHVVDVVLKKSHNIKRSQEPVPDKWSKPLLGSMKLNVDGSFQESDGKGGIGAVLRNCTGEVIFAACGHVDRCSSALETELLACRDSLALALQWTLLPIVIETDCLAMIHLFRDATGTKLTLAHDDHGVAAAAPRFIIYKDKADAVPSNLRAMDAILAMFGILPGSDKAAQVADTLRTCGELTAAGGEEPRHLPRGGARLRRLGAGHQRAARADAVALRVDLHAVAGVGLGGATAVDVCHVNTTTWDSAYFELLKASRGDAICHYMPQGYVLWLAN

SEQ ID NO: 165671 - protein, 158 aa, Oryza sativa
  unsure (1)..(158): unsure at all Xaa locations
  Clone ID: PAT_MRT4530_64455C.1.pep
FEFXPLSLPWRSSPSTPWARPRATSPPPTNTPPSPPTXRSPPPRILPLPLSRPAAAAATLXGPLTPVLEIYCGRRDXXXXREKGXTXPXEMRRRXXRKKELACXGVXXXCASXXXXFXXXKVPPSXSXKNXGIGCLNFPLNXVYLXLTFCLXXXKHCS

SEQ ID NO: 165672 - protein, 948 aa, Oryza sativa
  unsure (1)..(948): unsure at all Xaa locations
  Clone ID: PAT_MRT4530_64456C.1.pep
MVVEKDWYNFTSPDLYSDNFSKKYPKGVPLVIDFAIRDGFCPAAGQAPPANYACVSSNSSCVNVTNVCDGGEQDKFPVCFGVASGLVGTEINSLKDDVYTIKKKATYSDNNSLVRNFLDAHKEKRKATELFDKDITLAEDLDVLDGLVRIAVECLNLDVDQRPEMTKYKYKAQWWPKVRFKVFPEIGLGVVNPVSLFVGSSGSPMAANVGGGDKGIVIGIISHPKPTSGNETDAVILDRIPLKMIKGAAGTSDQGQEHTTAARRGSAENNQVDATQGPTVFTEGDLVEDDEDVVVVNIEDDELQTAGLWTILARFYSLRTPNQVALFDDMRRAWRLRADISYKSLRDNMFIITFSAEGDYDFVIKGGPWIHRGDALLAGKMDVTGDKTQGTSMVVPAGKLAQQQSEKEAPKKTDGDEISASEMIPAMRNLQQQASFGEVSSEEISDANRKRMPDQSGLQIKGRVQQALLEYQQYTGGSNSMHGDIGKAARAVKRLKKAVEGEDTDDMEATSHGAAGNAVTVRDLCALVKEAGSHIVFLSETRQKIEKVRRLRNRLGLRGFAGVNSDGMSGGLALFWHESIHVEIISMNERYIDAYVRLSVNAPVWHATFVYGEPRVENRHRMWALLNSIKQVSDLPWLVVGDFNETLWQFEHFSLKQRSELQMQAFRDVVQRCDLHDLGFSGVPYTYDNRREGRSNVKVRLDRALADDGWRGLFSTAQAVVMKEVLETYASCTGQLINPSKCSIMFGQSSPTAVQNQIKQTLQISNSFEDKYLGFPTPEGRMTKGKFQSLQERLWKRIMLWGEKFLSTGGKEILIKAVLQAMPVYVMGLFKLPESVCEELTKLVRNFWWGAEKGMRRTHWKSWDCLIAQKLKGGMGFRDFRLFNQALLARQAWRLLDRPDSLCARILKAIYYPNGSLIDTSFGXLWRDPWIPRSYSRRPISAKRNCRL

SEQ ID NO: 165673 - protein, 818 aa, Oryza sativa
  Clone ID: PAT_MRT4530_64457C.1.pep
MRNLQQQASFGEVSSEEISDANRKRMPDQSGLQIKGRVQQALLEYQQYTGGSNSMHGDIGKAARAVKRLKKAAEGEDTDDMEATSHGAAGNAATVRDLCALVKEAGSHIVFLSETRQKIEKVRRLRNRLGLKGFAGVNSDGMSGVKQVSDPPWLVVGDFNETLWQFEHFSLKQRSELQMQAFRDVVQRCDLHDLGFSGVPYTYDNRREGRSNVKVRLDYALADDGWRGLFSTAQAMPVYVMGLFKLPESVYEELTKLVRNFWWGAEKGKRRTHWKSWDCLIARKLKGGWRAIEYGLELLKKGIIWRIGNDLIDQSESWDTDKISQHFLPMDAEAILNIRLSSRLEDDFIAWHPDRLGRFSVRSAYHLAIALAQVDEGSSSSGNGNSRAWNALWKCNAPQKVKIFAWRAITNSLPTLENKKKRKLEVSDICTICGVESEYVVHALFRCPHARQFWEAMTVDMKLNPLSNIRNGDPKVILDLLEQSQPEEQVMLLMVLWRIWHTRNEIVHGKPAPGILVSKRFIESYVLSLAEIKQHPQASPEKGKHVVDVVLKKSHNIKRSQEPVPDKWSKPLLGSMKLNVDGSFQESDGKGGIGAVLRNCTGEVIFAACGHVDRCSSALETELLACRDSLALALQWTLLPIVIETDCLAMIHLFRDATGTKLTLAHDDHGVAAAAPRFIIYKDKADAVPSNLRAMDAILAMFGILPGSDKAAQVADTLRTCGELTAAGGEEPRHLPRGGARLRRLGAGHQRAARADAVALRVDLHAVAGVGLGGATAVDVCHVNTTTWDSAYFELLKASRGDAICHYMPQGYVLWLAN

SEQ ID NO: 165674 - protein, 479 aa, Oryza sativa
  Clone ID: PAT_MRT4530_64458C.1.pep
MVGKGNECAAARRRFSLRAAAASSSSSSFLPCLLLAAALSAGCCRAHAATARAPRSLLARFPTTKMTSELEKEAGRYVDDSSQAARTNNKITNLQVSFVGHGHDTPADGEGQFADAAYPAKWKPDQDPSTPSLVVAHHLPNGNAPFIDAAYPVKWSPRADGPPKQPATFPASPNGEKAEFTDSAYSVKWSPRSVAPPKAPGIFAQHSNGNKAQFTDAAYPVDWNPRSVAPPTPPAALSSLAHPAAGIHIQRGMLFLMKKLHPGAVLPEGTKLALPHGDHGVAAAAPRFIYKDKGDAVPFDLRAMDAILAMFGILPGSDKAAQVADTLRACSELTAAGGGGEEPRACCATSREAVLDFAASALGTSAPRAVTTLVHGREPRRYVVAADGVARIGGDAVVACHPMPYLYEVYYCHRPADAVALRVDLHAVADVGLGGATAVAVCHVNTTTWDSAYFELLKASRGDAICHYMPQGYVLWLAN

SEQ ID NO: 165675 - protein, 152 aa, Oryza sativa
  unsure (1)..(152): unsure at all Xaa locations
  Clone ID: PAT_MRT4530_64459C.1.pep
TSVMQQENHLKEMEDDMQSFVSSKDEAAQGLRESIQKLKLLHGSGITALDSLAGEIDMNSQSTFERLNSQVQSHTSSLEQCFGGXASEADNLLNELQCSLSKQEERLTQFAKKQREGHLRAVEASRSISKITCLFLQLTXDVHASKLTEYFG

SEQ ID NO: 165676 - protein, 90 aa, Oryza sativa
  Clone ID: PAT_MRT4530_6445C.1.pep
TAQMAIFPVQTVFQENYKAPQIKVRVLKQKAGVFTALRSKKIDQHLTTISIAQLNTNKIGHVTASPSPLIFHQCHFFSGSTKNHSVNHFM

SEQ ID NO: 165677 - protein, 1830 aa, Oryza sativa
  unsure (1)..(1830): unsure at all Xaa locations
  Clone ID: PAT_MRT4530_64460C.1.pep
MEISSDLLLMSPGVLPAVGCSGGDFLPVLKRDLVGWPDHTRIGDKLKAFPLGGLIYGKGSFSAFRIVPGDLWPLRNSRRGRRLNLFWYPKFELYWRPNSVALQYKYKSQWWPKVRFKVFPAIGLGVVNPVSLFVGSSGSLMAANVGGGDKGIVIGTISHPKLMSGNETDAVILDRIPLKMIEGAAGTSDQGQEHTTAARRGSAENNQVDATQCPAVFTEGDLVEDEEDVVAVNIEDDELQTAGLWTILARFYSLRTPNQVALFDDMRRAWRGDALLVASFDGITCPSNVPLDVVPIWVRIYDLPLVLMTKVRGGMFGSKLGKVREVDVRDDGRNKHDFFRIIRVDLPVKRPLKSQIAIRMTVQGKEVLRRFDLRYEXDCNRRSANEDQPFQFSAELRCSXPLKPFEKKISKVKAAQTSSVARNLFFRGAGSASSSSSRHKQDGQMQEAIPPRVDAHDGFEFKEREGDTAIDEMLAQQAGKMDVTGDKTQETSMMIPAMRNLQQQASFGEVSSEEISDANRKRMPDQSGLQIKGRVQQALLEYQQYTGGSNSMHGDIGKAARAVKRLKKAAEGEDTDDMEATSHGAAGAMSCLAWNCRGIGNAATVRDLCALVKEAGSHIVFLSETRQKIEKVRRLRNRLGLKGFAGVNSDGMSGGLALFWHESVHVEIISMNERYIDAYVRLSVNAPVWHATFVYGEPRVENRHRMWALLNSVKQVSDPPWLVVGDFNETLWQFEHFSLKQRSELQMQAFRDVVQRCDLHDLGFSGVPYTYDNRREGRSNVKVRLDYALADDGWRGLFSTAQVFHLSSPRSDHCPILVKFSSEDLHRNPVKCVHYEIYWERDPAISEVIAESWGVSGVKQDLRDINQALFRMMSDLRTWSKKKFRNVSREIEKNRKKLSELLLSNADNREIRRVSDQMNELLYREEMIWLQRSRIAWLKEGDRNTRFFHSKAVWRAKKNKITKLRDSDGTVHSTTKELERMATEYFQRLFTADPSIDHSLRPILDDLVSQNQSAFVPGRLIQDNALIAFECFHHIQRNKNPENAYCAYKLDLSKAYDRVDWKFLEYAVKLNGTLLNTFAPSRGLRQGDPLSPFLFLFVADGLSLLLEEKVDQGAMNPIQICRRAPAVSHLLFADDTLLFFKAANDQAVVMKEVLETYASCTGQLINPCKCSIMFGQSSPTAVQNQIKQTLQISNSFEDKYLGFPMPEGRMTKGKFQSLQERLWKRIMLWGEKLLSTGGKEILIKAVLQAMPVYVMGLFKLPESVYEELTKLVRNFWWGAEKGKRRTHWKSWDCLIARKLKGGMGFRDFRLFNQALLARQAWRLLDRPDSLCARILKAKYYPNGSLIDTSFGGNASPGWRAIEYGLELLKKGIIWRIGNGKSVRLWRDPWIPRSFSRRPISAKRNCRLRWVSDLIDQSESWDTDKISQHFLPMDAEAILNIRLSSRLEDDFIAWHPDRLGRFSVRSAYHLAIALAQVDEGSSSSGNGNSRAWNALWKCNAPQKVKIFAWRAITNSLPTLENKKKRKLEVSDICTICGVESEYVVHALFRCPHARQFWEAMTVDMKLNPLSNIRNGDPKVILDLLEQSQPEEQVMLLMVLWRIWHTRNEIVHGKPAPGILVSKRFIESYVLSLAEIKQHPQASPEKGKHVVDVVLKKSHNIKRSQEPVPDKWSKPLLGSMKLNVDGSFQESDGKGGIGAVLRNCTGEVIFAACGHVDRCSSALETELLACRDSLALALQWTLLPIVIETDCLAMIHLFRDATGAKSELAFLIREIDSLLVGNRDISFSKCLRSQNNISHYLANKGRCDKITQFWPDNKCTFISQFICEEANE

SEQ ID NO: 165678 - protein, 1053 aa, Oryza sativa
  Clone ID: PAT_MRT4530_64461C.1.pep
LISISKKKKKKKRCEFEHFSLKQRSEPQMQAFRDVVQRCELHDLGFSGVPYTYDNRRESRGNVKVCLDRALADDGWRGLFSTAQVFHLSSPRSDHCPILVKFYSEDLRRNFAKCVHYEIYWERDHAISEVIAESWGVSGAKQDLSDINQALFRMMSNLRPWSKKKFRNVSREIEKTRKKLSELLLSNTDSREIRRVSDQMNELLYREEMIWLQRSRIAWLKEGDRNTRFFHSKAVWRAKKNKITKLRDSDGTVHNTTKELESMATEYFQRLFTADPSIDHSRVTSLIKPKVTDAMNEELCKTVSEEEIANALFQIGPLKAPGPDGFPGRFYQRNWAILKDDIVRAVQEFFSSGTMPSGVNETAIVLIPKTEQPQELKDFRPISLCNVVYKIVSKCLVNRLRPILDDLVSQNQSAFVPVANDQAVVMKEVLKTYASCTGQLINPSRCSIMFGQSSPTAVQNQIKQTLQISNSFEDKYLGFPTPEGRMTKGKFKSLQERLWKRIMLWGENFLSTGGGKEILIKAVLQAMPVYVMGLFKLPESVCEELTKLVRNFWWGAEKGKRRTHWKSWDCLIDQKLKGGWRAIEYGLELLKKGIIWHIGNGKSVRLWKDPWIPRSYSRRPISAKRNCRLRWVSDLIDQSGSWDNDKISHHFLPMDAEAILNIHLSSRLEEDFIAWHPDRLGRFSVRSAYHLAVALAQVNDGSSSSGNGSSRACNALWKCNAPQKVKIFAWRAITNSLTTLENKKKRKLEVSDICTICGVESEYVVHALFHCPHARQLWEAMSDDMQLNPLSNIHNGDSKVILDLLEQSQPEDQVMLLMVLWRIWHTRNEIVHGKPAPGMQLVSKRFIESYVLSLAEIKQHPQASPEKGKHVVDVVLKKSHSIKRSREPAPDKWSKPLPGSMKLNVDGSFQESDGKGGIGAVLRNCTGEVIFAACGHVDRCSSALETELLASRDGLALALQWTLLPIVIETDCLAMVHLFRDATGAKSELAFLVTEIDSLLVGNRDISFSKCLRSQNLISHCLANKGRCDKITQFWPDNKCTFISQFICEEANE

SEQ ID NO: 165679 - protein, 50 aa, Oryza sativa
  Clone ID: PAT_MRT4530_64462C.1.pep
GTRGIHTGTSSIQPDRLDIPVLIFALHIRFYSNMILHRCYRTDNFSGLNS

SEQ ID NO: 165680 - protein, 392 aa, Oryza sativa
  Clone ID: PAT_MRT4530_64463C.1.pep
MKISVKTLKGSTFQIEVDSAQKVADVKRIIETTQGQHIYPAEQQMLIHQGKVLKDDTTLDENKVLENSFLVIMLRQGKGSSSSAPATSKAPSNQAPPTQTVPAAPASQAPVAPATTVPVTVSAPTPTATASPAPAVAVSSEADNYGQATSNLVAGSNLEATIQSILEMGGGIWDRDIVLHALSAAFNNPERAVEYLYSGVPEQMDIPVPPPSIQPANPTQASQATQPAAPSILSSGPNASPLDLFPQALPNASTDAAGLGNLDALRNNAQFRTLLSLVQANPQILQPLLQELGKQNPQILQLIQENQAEFLHLINEPAEGDDEENLLDQFPEAMPQTIAVTPEENEAILRLEAMGFDRALVLDVFFACNKDEQLAANYLLDHMNEFDDEGPP

SEQ ID NO: 165681 - protein, 55 aa, Oryza sativa
  Clone ID: PAT_MRT4530_64464C.1.pep
ANHTNPRLMNFTDTNTDTSHNTNSYVYTHIVERIHQLLNQSITHSFNSAIISTHT

SEQ ID NO: 165682 - protein, 319 aa, Oryza sativa
  Clone ID: PAT_MRT4530_64465C.1.pep
MDALPAPSPEKTTTRDWSELPVDALSVVFAKLGAVEVLMGAGLVCRPWLDATKLPHLWRCVDIAAMKKKRAVLCVMADEAVKRADGQLEAFMAGAFVTNKLLKHVGDSAPALMSLWLESCSLVTSNGLAQMIAMAPLLEELVLSYCRKVRGGGGGGGGVYPAVAEACPRLRRLEVRRYPAWRDDDGGGDHHRRRPLGIAAMRELRHLTLVGVAGAGDDELAAIVDGGCPHLEVLHVSECPGLAAVDVAALRSKCGGVKCGGFTPASRPPMTTSRRLRRRKSGDRLATAGPTGSTTGQIGPPEKYSAQLRPATVLFANRY

SEQ ID NO: 165683 - protein, 130 aa, Oryza sativa
  Clone ID: PAT_MRT4530_64466C.1.pep
MRSSEAMELLGLPAHTRPSPSEVKAAYRRMVMESHPDRVPTHQKSQAESKFKQISEAYSCLKDGRRYGSRMEVHVMRSGVPTGFGRSNKTLVKAPFLLIIFAAVSLGGFSASRAYQRQKAMCSSQNPFLP

SEQ ID NO: 165684 - protein, 113 aa, Oryza sativa
  Clone ID: PAT_MRT4530_64467C.1.pep
GGQAGWAEHGSESYFLREVGGVRHTKVGTRIERWLNVYFLERLRTPAQGSERHWGRDFTRSRSRGKWDLEVEGAAPPPPTRPSSDRIRLPLSLSLARPHSLAVFPFTYKVASA

SEQ ID NO: 165685 - protein, 319 aa, Oryza sativa
  Clone ID: PAT_MRT4530_64468C.1.pep
MAAAAAATAEEYEEMLRVVEAIATRIRWRLRPHSKRRLLNDILFLCSGLRPVVLMDYGGTMPELQDNLCSLLHHARQESSMLSPLRLMVIKDMLYLIHAKGLAEHASPSARSQHKLAFVDLEKSCSKLLSETEENGALHEFLSIQDLFSANFPVDADVDLPIIQPEAKGQMSEIPEGTTMDNFGFRIADGTSLVIDLSTFLESAQIALPSLNGWLLGYPVTYLFCNESAETATQNLSKHSLHIYRIYAVRCRQSAAKQSEQELMSFSVPCDMSTKRDEEPWAKSFLAHMNEKIKQCNHVWASVRMEIEVFHSQSGLIVL

SEQ ID NO: 165686 - protein, 59 aa, Oryza sativa
  unsure (1)..(59): unsure at all Xaa locations
  Clone ID: PAT_MRT4530_64469C.1.pep
RAGGETSGGEACGGSGGGAGRWGXSSRKEGGGGKPAAGGGEDRGARWSASAADGGGEGV

SEQ ID NO: 165687 - protein, 132 aa, Oryza sativa
  Clone ID: PAT_MRT4530_6446C.1.pep
MKLLPSTLKLSLSSTSKGWCGLFLVVFGKYALTDHVLADNSHLNHKPFPSFMDARSQLPLEDIMKGSQPAETASVFVADTVSGASRPASSNNGSGGVPQNSTNGSVSGKNNSRNHGCGHSNSDGSGGNNGGG

SEQ ID NO: 165688 - protein, 104 aa, Oryza sativa
  Clone ID: PAT_MRT4530_64470C.1.pep
MEAGRWRPDVRQRDERPAGTGRAWGGRMEAGRRWPGGAAGWEAGRHRPGAGQQDGGARKQNGSYNVLHFLFPVFVFVIHAYVQAFAELDDDDDERVMISSDIEL

SEQ ID NO: 165689 - protein, 92 aa, Oryza sativa
  Clone ID: PAT_MRT4530_64471C.1.pep
MSFRWNLTASAARPNPQGSFHYGTIATSRTLMLASSAPRPGAAPRSGTPVVRLSLHEFIEVVFQNTENELQSWHLDGYDFWVVGTQDYLQLQ

SEQ ID NO: 165690 - protein, 221 aa, Oryza sativa
  Clone ID: PAT_MRT4530_64472C.1.pep
MEQHSHCWYYGGGMAVTAAAGAGAASSTSSESQPSGYDYETAGSAEVSAPGGGAGRERAARKEEGGAGAAAAAAGFIGVRKRPWGRFAAEIRDSTRNGVRVWLGTFETAEAAAMAYDQAALSARGAAAALNFPVERVRESLRALALGAAGGSPVLALKGRHSKRKRRKRSELAGATATANKTTTTTSATTGGEHKQIVLELEDLGADYLEELLWMSEQTSH

SEQ ID NO: 165691 - protein, 613 aa, Oryza sativa
  Clone ID: PAT_MRT4530_64473C.1.pep
MAPPPAAAAALAACILAVAATLAGADDPYRFFTWNVTYGSINPLGSTPQQGILINGQFPGPRIDCVTNDNIIVNVFNNLDEPFLLTWNGIKQRKNSWQDGVLGTNCPIPPGANYTYKFQAKDQIGTFVYFPSVAMHRAAGGFGALNVYQRPAIPVPYPPPAGDFTLLVGDWYKAGHKQLRQALDAGGGGALPPPDALLINGMPSAAAFVGDQGRTYLFRVSNVGVKTSVNVRIQGHSLRLVEVEGTHPVQNVYDSLDVHVGQSVAFLVTLDKAAQDYAVVASARFSPGASPLMATGTLHYSSAVSRAPGPLPAPPPEQAEWSMNQARSFRWNLTASAARPNPQGSFHYGTIATSRTLVLANSAPVLAGQRRYAVNGVSFVVPDTPLKLVDNYNIANVIGWDSVPARPDGAAPRSGTPVVRLNLHEFIEVVFQNTENELQSWHLDGYDFWVVGYGNGQWTENQRTTYNLVDAQARHTVQVYPNGWSAILVSLDNQGMWNLRSANWDRQYLGQQLYMRVWTPQQSFSNEYSIPTNAILCEAHVWEDGVESTTLRYLLHLLRFELDHEHAKICSVQRCHLRFRFLEFLIKNYDFGYMFVVAKTDVLFFDHMSVFFS

SEQ ID NO: 165692 - protein, 394 aa, Oryza sativa
  Clone ID: PAT_MRT4530_64474C.1.pep
MEKKRWDSMESWSMLLDTAMGPSGEPTSSRDSGRREEWMADLSHLFIGNKFASGANSRIYRGIYKQRAVAVKMVRIPERDEARRAVLEDQFNSEVAFLSRLYHPNIVQVSFLFPYTRQVFVRWRAFFCLTPRPPSVRPVVASSLLPYTTPAKCSTGGEQFIAACKKPPVYCIITEYMSQGTLRMYLNKKDPYSLSSETILKLALDISRGMEYLHAQGVIHRDLKSQNLLLNDEMRVKVADFGTSCLETACQATKGNKGTYRWMAPEMTKEKPYTRKVDVYSFGIVLWELTTCLLPFQGMTPVQAAYAASEKNLRPPLSTSCSPVLNNLIKRCWSANPARRPEFSYIVSVLEKYDHCVKEGMPIMAHQELRIWSSFAKIFRMGCITNNLSIPVHA

SEQ ID NO: 165693 - protein, 92 aa, Oryza sativa
  Clone ID: PAT_MRT4530_64475C.1.pep
EARSPRPDEAAHIDIAAAAAIKMLLAPTQRRRRRTNWAAAEIKFPENRRRKIASRLEYGYFPFFTCKVASSKEFGHFGPPICFPFFFFEKGN

SEQ ID NO: 165694 - protein, 105 aa, Oryza sativa
  unsure (1)..(105): unsure at all Xaa locations
  Clone ID: PAT_MRT4530_64476C.1.pep
IAGLVAVPAGRSATANLRSSLTRSLHGLGGEERHRPRKEARAAPHGAGSGRAAAWPPRRRRRSSARLRRHLRXIWQPCCPGPGVGDAAPPGPAATATRHQIGRAR

SEQ ID NO: 165695 - protein, 119 aa, Oryza sativa
  Clone ID: PAT_MRT4530_64477C.1.pep
ASRCRGIVAGGRVLPRPRSTLNPNLVAGSRILPRPWSTSELIADDRVLRRELVTGSHVRRPRLSWQLRPPRTQILRRPCDHAPRRSSPAAASSMPELVAGGRVLHAGGRRRRPRPRHRR

SEQ ID NO: 165696 - protein, 294 aa, Oryza sativa
  Clone ID: PAT_MRT4530_64478C.1.pep
MDASPLHVVVFPWLAFGHLLPALELAGRLASRGLRVSFVSTPRNIARLRRPCPSVEFVELPLPRVDGLPDGAEATTDVPDHMSSALWKASDGLTAPFSAFLDAAAAAGNKVDWLILDGMLSWAAASAADRKVPCVLMMPYTATACAHFGVPDEARDADRFPSAIARRFVLAFRSSELLAVRSCVEFEPESVPLLSNIFGKPVVPIGLLPPPQVDGDGDTALMSSWLDRQPPKSVVYVALGSEAPLTADQRRELALGLELSGAPFLWALRKPHGSDDDGGLLPPRGEERTRGRGM

SEQ ID NO: 165697 - protein, 396 aa, Oryza sativa
  unsure (1)..(396): unsure at all Xaa locations
  Clone ID: PAT_MRT4530_64479C.1.pep
AATGDAAAGDVVAGFAAWCSIRVAGWCALRQRPNSVTGDVAVDDVVAGLPPRAPAPLPAIHGAAVNAHPRLHLRGRPGSKETRWCAKNLLTWSWLAVECGRIIFYVVSHDPPKVSPMKPGETGHDTKEDHATSQVSCDSTMYQVSDDSYHVSGDTREVSCDTYQVSCDFYDVXGVILVRYHIHMIPTRYQELGVEVSRHRRRRPRPPPSTLHTEPEPRRRQPHPPPSMVHIGTHRRRPRPPSGARHRQSRPSSTPQLAAASSTLELVSGAAAITTQDPPPSTPHAGARRRRRLCHHADXSAVHATMPHAGARRRPRPPCRSSSPAAASSTPEVVGAGRGRATGVSRICAAPTVAYTLASEGSGQGAIPLGYYPNAIPVYKVSCMCRLRSICRKFNG

SEQ ID NO: 165698 - protein, 51 aa, Oryza sativa
  Clone ID: PAT_MRT4530_6447C.1.pep
YSTAMSILKFSTNSHRKCHFFKPLPIEHAHNSTTFINMEKNSFLKFSIRPQ

SEQ ID NO: 165699 - protein, 103 aa, Oryza sativa
  Clone ID: PAT_MRT4530_64480C.1.pep
SSQTTPLRIRRRSRTPSWPPRSTGPPPPSSSPSRRHATAPSPGRGGGSPAPTTACRRAPACSSAAAAATRRAPPPAASPPRSCPRCSARRSAPAGTRPRRRRP

SEQ ID NO: 165700 - protein, 74 aa, Oryza sativa
  Clone ID: PAT_MRT4530_64481C.1.pep
PQAKGKRKTQTPKTKGRKGPYFGSLKPKGKKRGKTTNEPFTKLKNKKNFPSPKTGTNPKRGDFGSLKKFPGGGG

SEQ ID NO: 165701 - protein, 55 aa, Oryza sativa
  Clone ID: PAT_MRT4530_64482C.1.pep
LKELSSVKVTKLVAVKSMQPKTLGRPSFSIILKLPAYRTWPMQKFHGSKKRDLWN

SEQ ID NO: 165702 - protein, 373 aa, Oryza sativa
  unsure (1)..(373): unsure at all Xaa locations
  Clone ID: PAT_MRT4530_64483C.1.pep
CTYGRSRRLLSLYLRRPQLPAKSADISVASGRRFPSDTGAFADWVASSAAAAAAGRGDDLSLGFNATAAAAAPSGASLAAGLIAGAAKSADISVASGRRFPSDTGAFADWVASSAAAAAAGRGDDLSLGFNAAAAADPIFPLLSAGPCVLDPDKSGASGSAIQFWQPPPQLPSSAAGGNPNPSSSAFPYLKKPLPMLDTGGADPIFPLLSAGPCVLDPDKSAASGSAIQFWQPPPQLPSSAAGGNPNPSSSAFPYLKKPLPMLDTGGGSSGSGGAASKKPRLLTSQTTTSHTSTSNATTPRSFDTTSSHQDASFRESLPRQVRAPAVFRXCVRVTSIDDGEDEYAYQATVTINXGHVFKGFLYDQGVDDGWRR

SEQ ID NO: 165703 - protein, 1361 aa, Oryza sativa
  Clone ID: PAT_MRT4530_64484C.1.pep
MRRRGGGDWGREADPAEPSSSHAFDGGRDGDDDDGGGGWHQAAMKAGAGKGSSSSSSSGDSLWQWRSQGLSEVVLSWSVDQILNKDLLRDKVAKIPETFSSMEQYMTSFFGPLLEEVRGDMCSSMEDISKAPYASVLSVNAMRKGKGSYEIKLDKWRGVSHGCAIEGYKPKAADLLLISETRPANQSDILKQSKSCVIVWVGKVQGNKMTVKASRRMETGVHGDERQQMGMNRYDKLYAEGFDKSWEMLDQEAVAPESSNSFMHENGRKEHSKVRKCFEKCSDLQEQNEMGTCGNSSKRWSFCATYLTNMITYDRVWVVLRRGLTMDSKIVLSMFGKKKKEQRILACAPTNMAVLQVASRLIELIQDFSSSHCYSFGDIVLFGNKDRLHIGKELSKVYLDDRVHKLLRYFKREDGWKARVDSVMKFLMNCISRYQMSLDIQQASSDGCNLTFKKYFTSKFSTLVKELARCIDTFFDHLPTDSLGRNLDRMMFAKSLLDKLQQLLCADDVSDELLFTIFKPSDEPIDSFDSHDQTDDATVDLHDHDISLDDPLEIKSLCIKTLMDLSKMRLPCEDNESSIRDLCLKRAKLVFCTASSSFELFRLQNVMPISILVIDEAAQLKECEALVPLLLPGIEHILLIGDENQLSSLVKSKIAKDADFGRSLYERLCTMGYRKHLLEVQYRMHPGINKFPNANFYDNRISDGPSVQQEDYMKSYLPGPIYGAYSFIHIENDMEMLDELGQSSKNMVEVAVATNIVERLAKECSEKRQRTSLGVISPYTAQVIALQERLGKQFKNHEFLSVTVKSIDGFQGGEEDIILISTVRSNKNGKVGFLSDAGRINVALTRAKYCLWILGNGATLLASNSIWAELVHDSKRRGCFFNALDDKNLAEIIMHATKEGEQRNQREQRSAHNANRWSSGSSRHDIIAAGNSRPMRWSHFPGSGNTRRSNGHDSRLNVCHTKEDMHRTHFQQRKSYSGDYSQVAPPNQYWHNGNRPSRGSYGYLEVFREHPNHHSGQDSRTRSYHETMCSTPQTGNGRFPYSGSIQREKSQRQTSILGERQPLGGDGNKGFQDGTSGYPCRRNSSQIRPNTYEAGAPELQSMNKHREFSSYPQQAPYRTFGGRGRGRPTYHGRGRGGWYERTNNHWMEEPHQVQNATCNMPVTMQQGMKRNWCEAEASDSPQQVNAKIRSESADRPHLHDEHGGYGTASHQLPAIKPEDVSEQQCEMKTDSYKAEASESPNDSTRVRPESVEQPYCQAQGDSSGAASQEPVIPEQRGMSGDLCEAVCHQSNTSGSPNRGSTEVTLEGAEQPHCQAQPDGSGVASNEAPVPEQRWTEGDLGEAAEPGQGNAENKAESAEADS

SEQ ID NO: 165704 - protein, 276 aa, Oryza sativa
  Clone ID: PAT_MRT4530_64485C.1.pep
MAATAAASVAAISPLPGASLPRPVSARVPLLPRASPPTWRLSVGSARARSTRCLAAAGGGGLAPEMRATLDKVVGSHKVVLFMKGTKDFPQCGFSHTVVQILRSLDVPFETLDVLANEALRQGLKEYSSWPTFPQLYIDGEFFGGCDITVAAFERFGACCPLRIFSVNKTTTRAWPPTRASDLVKTILVDSAAVNAHLRELLHLHGVGAVVLLREVVHDAARHHVVHRRNLSIHGADGHFVFMRDGGVLQLDIHDAGARRAALSRGEATQWPEASN

SEQ ID NO: 165705 - protein, 59 aa, Oryza sativa
  unsure (1)..(59): unsure at all Xaa locations
  Clone ID: PAT_MRT4530_64486C.1.pep
MSLAAPAETGSKATVRHRSPFSLQACMAKMLHAKARRGMRANVLRPXRGGRIENQAGGG

SEQ ID NO: 165706 - protein, 92 aa, Oryza sativa
  Clone ID: PAT_MRT4530_64487C.1.pep
KIKQLCDLYSIPTHVCALWLLILGHNADHGNAGWEHSYYSCYGYHGTNFFAPSNRFGTPDDLKSLIVHTHELDLLALMYMCLSPASALPCMA

SEQ ID NO: 165707 - protein, 232 aa, Oryza sativa
  unsure (1)..(232): unsure at all Xaa locations
  Clone ID: PAT_MRT4530_64488C.1.pep
MPTDVNGIVGQIETFASFLSITISHSLALIRLYSAKKRPSYLLAPFFIHPIRSEWIQGTRLGNCPEKNTVGVKDLMGLQSCLPIGEGRGPGNRSALVRETDCVGVQSTAHVRRYYGPRRGINEKPRKELRKKSVTSKVKSPRLDMLEGAKSIGAGAATIALAGAAVGIGNVLSSSIHSVARNPSLAKQLFGYAILGFALTEAIALFAPMMAFLISFVFXDHIFLGVDISLCK

SEQ ID NO: 165708 - protein, 118 aa, Oryza sativa
  unsure (1)..(118): unsure at all Xaa locations
  Clone ID: PAT_MRT4530_64489C.1.pep
FFFFFFFFFFFFFXXFFLXGIIHSFLPFLXYSSFLXRXAQVRDGTSHTCXVXSKKEEEEEKREEKGEKKNXXSXGSPCXIESQQXXSPNFSLLENXICLGSIDXGXEGXLAXGKHSGV

SEQ ID NO: 165709 - protein, 45 aa, Oryza sativa
  Clone ID: PAT_MRT4530_6448C.1.pep
HVPVFSKLNPLSLIFKFPKKRFIFYYPNPFPVFISVEQADCPRPN

SEQ ID NO: 165710 - protein, 125 aa, Oryza sativa
  unsure (1)..(125): unsure at all Xaa locations
  Clone ID: PAT_MRT4530_64490C.1.pep
SRSELALGARGQNGDREDDADGGRXKGKKRKKERGLAPCFFGKRRRERGRRGRRRRSSASIPWKLARGVAGXGSMTTAMTAGRCGVKRRDGRQTXAGAAGADGGGDQAVGHHGARAGEATGGAAI

SEQ ID NO: 165711 - protein, 109 aa, Oryza sativa
  unsure (1)..(109): unsure at all Xaa locations
  Clone ID: PAT_MRT4530_64491C.1.pep
RVLNAYNHMLRIIYGVSGAPYSEYPVVELIHSXTLRXIELAAQHLHYHDIDNVHAVAHEVRYWLPGAVYYDRXMDLGXAVHACNVPTKXGVYPMNYXAPRTITALVGGS

SEQ ID NO: 165712 - protein, 285 aa, Oryza sativa
  unsure (1)..(285): unsure at all Xaa locations
  Clone ID: PAT_MRT4530_64492C.1.pep
MRRIEDTTRRQVTFSKRRKGLLKKASELSVLCDAEVALLVFSPRGRFFHFASAPSYATIPPSSFFXLLHGYLLVVIKEGQLLAGGGRPVAATLGTAVAAAPGTMVMGTEALGHRQWRGGGRLDEAAVLQATKPGRRRWRCGWQSMGRAAALQATAPVRRXDTDDGGIVSGGRGGRRRGGQRRQDAGGGGVVGGRWGGRRHSKRRRQDIRGGGVVVNDGEDGGAAGDGVRMSAVEAWWADEGKGGGAAGDGAKMPAMEAWWGAEPGRRRWSRGGRMTGRAAPGRRR

SEQ ID NO: 165713 - protein, 77 aa, Oryza sativa
  Clone ID: PAT_MRT4530_64493C.1.pep
MRSAAKLSYMVDETYFTIQAELEAQFKEVWAKIDWSGIETADWDDFNGPNYLFSGECSMLMSCSRAVYFKDARYLLG

SEQ ID NO: 165714 - protein, 74 aa, Oryza sativa
  unsure (1)..(74): unsure at all Xaa locations
  Clone ID: PAT_MRT4530_64494C.1.pep
SFPAHAQVVSFFVNVLFIVLGXILPEHLRQTKTTNIACLTSFIYQNHYKLPIDQNHAGEMCTSEHVDESALLST

SEQ ID NO: 165715 - protein, 29 aa, Oryza sativa
  Clone ID: PAT_MRT4530_64495C.1.pep
TLFLIGDTSLSFPYPIASCPWMYPSCRIP

SEQ ID NO: 165716 - protein, 99 aa, Oryza sativa
  Clone ID: PAT_MRT4530_64496C.1.pep
MEAMDVKYKPLVFPNGAIKKAAKPAAVAPAVGGGGGGETVYRECLKNHAASLGGHALDGCGEFMPSPAANPADPTSLRSLIQEINPKKGRRGCRSVLDA

SEQ ID NO: 165717 - protein, 81 aa, Oryza sativa
  Clone ID: PAT_MRT4530_64497C.1.pep
MWTDATRQAGTIGSTPSKGVYEGTQRASEEEDEPSRTNREQSCKALPKNLIVAFSRCRTSKAEVSETCSPDRRCTPASGME

SEQ ID NO: 165718 - protein, 341 aa, Oryza sativa
  Clone ID: PAT_MRT4530_64498C.1.pep
MEAMDVKYKPLVFPNGAIKKAAKPAAVAPAVGGGGGGETVYRECLKNHAASLGGHALDGCGEFMPSPAANPADPTSLRCAACGCHRNFHRRLPEGSPPPPPPPALLPAPPMPPHRGEETPEVRLPGVDGDESDSDSDGSEYDDERSVSPPPPPLAAAVAHQVYYPSAPHMLLSLGSSGQAQRLPPQVMSPAAAAAPPPGGGGGGMPRKRFRTKFTAEQKQRMQELSERLGWRLQKRDEAIVDEWCRDIGVGKGVFKVWMHNNKHNYLGGHSARRSASSSSAAAAAAPPFNPPTSPPPPPPPPPHATDFNINGTATAATAAAAATIAAGNHQENGASSPQSA

SEQ ID NO: 165719 - protein, 68 aa, Oryza sativa
  Clone ID: PAT_MRT4530_64499C.1.pep
ELKSSSKHFKFQSQLVCMQFYNVSSTTTTTMRDGKLWKTTTIKRRPGTGAPSRLTLVSFLRMKKNGSQ

SEQ ID NO: 165720 - protein, 65 aa, Oryza sativa
  Clone ID: PAT_MRT4530_6449C.1.pep
ILPYLINMDESIIILTLAKIEISHSKKFNENSVWVTGHAATLTKCSCRQNMVTLLETTCYMTKGY

SEQ ID NO: 165721 - protein, 79 aa, Oryza sativa
  Clone ID: PAT_MRT4530_644C.1.pep
MWPDITPPLGDWSRAVEVLRGGHEHHDSFSVVLLEVTCGRGSGTRTAAASSTRLNGEFDGAEKERALVVGLWCAHPDRG

SEQ ID NO: 165722 - protein, 80 aa, Oryza sativa
  Clone ID: PAT_MRT4530_64500C.1.pep
NELFPFAQRSNWLSSPMEASFHTSAATGFRTRKKSVPFPVFIYVSSLTRSSPFHPLCCDQLACTSIVLLGHSAYLCSPYI

SEQ ID NO: 165723 - protein, 61 aa, Oryza sativa
  Clone ID: PAT_MRT4530_64501C.1.pep
MRGGAAAGTAARRGAARLRRDSDGDGTLSSPAVVSSGGHLLPGMAGDAAASHPLTVVPLKL

SEQ ID NO: 165724 - protein, 103 aa, Oryza sativa
  unsure (1)..(103): unsure at all Xaa locations
  Clone ID: PAT_MRT4530_64502C.1.pep
LWHPRASPLHIRIITNRSLNVLEEAISGTDTLRSLPVGSSAAGKVDKKCAXFFYGVTISEEQARSGIVVRVTSAAQSKFKLLFFEQEIDGGYGLAPQEWQRIL

SEQ ID NO: 165725 - protein, 112 aa, Oryza sativa
  Clone ID: PAT_MRT4530_64503C.1.pep
MVPQQMSGSEPIEMASNKATVTLHGCDSTGIALKVKCAMGRDRDHAPDEAIVSDVIIIPDVTDRYILVMSSRFFRRSDQTEVWVKMKVCVLPLRSGCILHGCQDGCVGPNQA

SEQ ID NO: 165726 - protein, 697 aa, Oryza sativa
  Clone ID: PAT_MRT4530_64504C.1.pep
MNKSTIGRAKASITLSTQVAAGSVSQFTLALAVVPADVLALLVICCYETQMLEAKGFPSVWCDWIMRCVEEGKVAVKFIAVRPVGPQCEGQADSHPLLMGDSGNASHRDHTIDILRNDATFPSTSHQDNHNNLDELHQTRGPLNDVPHVPESSASATPASISRNASFARRDQGHRQPNPLNSGFWISIELIVSLSQIIAAITVLSVSRNEHPHAPLAQWLIGYTIGCVATLPHLYWRFLHRNRQNTEQESTNQVSSERDVYEPNSYVVVSSAHGSEVVDSGNNGGVARIASPRVYALVACFKLALDCFFAVWFVVGNVWIFGGRTSLHDAPNLYRLCIVFLAFGFIGYALPFILCTMICCCLPCIISMMGIHEDLDFNRGATAEAIDALVAYKFQSKKFQDGEAGEDNGGVLAAGTDKERTISAEDAHVSTYAIDTYGSLGSAGKSKISKKCSTHLGAERSDDKNLKTEESSCIIYIPDENIRVLCQLATMGYQPAASQNRPMVEFASGVKGIALNLENENVGIVVFGSDTAIKEGDLVKRTGSIVDVPAGKAMLGRVVDALGVPIDGKGALSDHERRRVEVKAPGIIELRDGPNATCYWASPLTAAGPNRPPPGSSDTSKSLVRNAKAGHALMRSISGWQTYVPRITVAKLLHAPAYHPSIGLMAHGHHHPYLQTGRDPTPHFNPGSPLVTKQRRI

SEQ ID NO: 165727 - protein, 86 aa, Oryza sativa
  Clone ID: PAT_MRT4530_64505C.1.pep
MQSSSVSEVPMVAYVRGIEQWLTGEDGFGSSDGGRFRSAPRKKGRVLRAPSVSDGDNDDETAALRCVLQGVIGEAFVPGDWLHGLE

SEQ ID NO: 165728 - protein, 147 aa, Oryza sativa
  unsure (1)..(147): unsure at all Xaa locations
  Clone ID: PAT_MRT4530_64506C.1.pep
RANAELHPQLLSDASPSHTHHPRADESEREGPLPLRCSHLQQPIAGNESLADDALKHASERRCFVIIVAWPNPSISSQAAAPXSLPRLPLQDASRITIGDTRSTENTPLFPRRRSEPATVATAESILSGEPLLDSSHIRHHRDLTNT

SEQ ID NO: 165729 - protein, 155 aa, Oryza sativa
  unsure (1)..(155): unsure at all Xaa locations
  Clone ID: PAT_MRT4530_64507C.1.pep
MKQEYCLPRIDXVVDSTAGCKLLSFLDVYSGCHQIALKEDNCLKTSFITQFGAYSYITMPFGLKNVRVXYQRTMQRCXTTNSRNVEAYVDDAVIKTRMKEDLITDLEETFNSFCAFKTKLNPDKCTFGVPSSKLLGFMTDVRGQTGSPEKTYPRN

SEQ ID NO: 165730 - protein, 114 aa, Oryza sativa
  unsure (1)..(114): unsure at all Xaa locations
  Clone ID: PAT_MRT4530_64508C.1.pep
IWSIAHNRGHGYSNNFTLARGAELYPQDTIHRHVTVPCXHVTMSSDFDKTLHITPSDQAHHTSGFTPTPQQAAGSPFSCXDESRSDXGCRRGHPXSITPTLAWMLDLDHQSNTS

SEQ ID NO: 165731 - protein, 41 aa, Oryza sativa
  Clone ID: PAT_MRT4530_64509C.1.pep
LVLALQGSWRRRGDVPACFCRVLLPATSVSFPVVESDLTSD

SEQ ID NO: 165732 - protein, 620 aa, Oryza sativa
  unsure (1)..(620): unsure at all Xaa locations
  Clone ID: PAT_MRT4530_6450C.1.pep
MWRLKIAAESGGGSGSSPLLHTGNGFLGRAVWEFDPDAGTPEERAEVARLRRDFTRHRFQRKESQDLLMRMQYAKLGHLQPDLSAVIVEDNQNVTEETILSSLRRALNQYSTLQAHDGHWPGDYSGILFIMPLLIFSMHVTGTLDVVLSLEHKREICRYIYNHQNEDGGWGTQVLGQSTMFGSCLNYATLKLLGEALHNNDALAQGRMWILSHGSATAAPQWAKIWLSVIGVYDWSGNKAIIPELWMVPHFLPIHPGTFWCFVRMIYMSMAYLYGKKFVGPITPTILEIREELYNIPYSEIDWKKARDCCAKEDLRYPCSWIQDIVWTYLNKYVDPMFNVWPFNKLREISLRNLMKHIYYEDENTKYICLCPINKALNMICCWIEDPNSDAFKRHLPRIYDFLWLAEDGMKAQYDGCQTWETAFIVQAICSTGLVDEFSTTLEKAYGFLKNSQVHXFLNFLQLESYEHXSKGSWTLSTADNGWSVPDCTGETLQALLGLSKISPKLVGDPIKEKSLYDAVDCLLSFSNKDGTFSSYECTRTASWTEILNPSESFRNIVVDYPHVECTSSAIQGLISFTELYPGYRGVEIESCIKNAVMFIENKQQNDGSWYAKFNARCVS

SEQ ID NO: 165733 - protein, 91 aa, Oryza sativa
  Clone ID: PAT_MRT4530_64510C.1.pep
MGGGLKEHAQPPPPQPAVEHTAKPKLPPPPPRSAVELRRHRCRLRWEPPPPARSAVEPHRRRPGALKPPPPFEREQVERSNKADPKTPRVN

SEQ ID NO: 165734 - protein, 41 aa, Oryza sativa
  Clone ID: PAT_MRT4530_64511C.1.pep
KQFRYIIKVIYNFSSKYNHVRTCHKDLIASEHNGVIRSYIR

SEQ ID NO: 165735 - protein, 70 aa, Oryza sativa
  Clone ID: PAT_MRT4530_64512C.1.pep
MLGHLAYTRGEAALARLKAYEGVPPPYDRTKRMVIPDALKVLRLQPGHKYCLLGQLSKEVGWNYYGTKHA

SEQ ID NO: 165736 - protein, 706 aa, Oryza sativa
  Clone ID: PAT_MRT4530_64513C.1.pep
MAPRAKLSQIFFSSWEPTKPMTTRVFLATNLIRSSRTSPPPIPACSRAVMKRIRVRGWMRFGAAAAACRIEEQQRMGGMEKGGCEVEARGINHHIRIPIPIPKRAHPLMMMKIWSREEDEDEQQPPTTTTTRHVLRNVSCRARPGELLAIVGPSGAGKSTLLEILAGRLHPSPLPDQLLLNGAPATTADLRRVSAYVTQRDVLFPLLTVRETLRFSARLRLGARNDIDARVDALIHDLTLARVADTRVKDLSGGERRRVSIGVEAVHDPAVLILDEPTSGLDSASALHIVGALRAMADTRRRTVLLSIHQPGARIVKMFDSVLLLAGGCALHHGTVDALRSLLASAGLALPPHVDTVEFSIDSVDALRRRSAAEARDRCTLQQLFQLHKEDVEMEMEMEIEKKSRYANSWAREVGVLAQRFFKNVARTRQLFACRTVCMLVAGLALGSIFYDLGEEKVAERVGLFAFLLTFLLSSTTEALPIFLQEREILAKETSSGAYRVSSYAVANAVVFLPFQLALAVVFAAPVYWMAGLRRTAAAFGYFVVLVWLILYTANSVVVCFAAAAPDFVVGNAAIQGVMGSFFLFSGYFIARSAMPSCWVFMHYLSLFKWPFEALLVNEFAGGGRCVARVMGACVATGDEVLRREGLGDECRWRNVGVMLGFVAAYRLLGYAVLRARCTLALRPRPSRPTRGLMSTGSSPSSTSPS

SEQ ID NO: 165737 - protein, 55 aa, Oryza sativa
  Clone ID: PAT_MRT4530_64514C.1.pep
FPPSPMVVEPFSEAPPLGGFPVRAMSQPVPVGVIKNVEKKAPPGAKVPKAPPKKK

SEQ ID NO: 165738 - protein, 1704 aa, Oryza sativa
  Clone ID: PAT_MRT4530_64515C.1.pep
MSSPAAGEADAAARVLARALDKVIKHSSWRKHSALVAASKSALDLLSASPDVDEAASASASPIQGVAAAAADAAIRALLIALDPASPKVAEPALECVSTLLSLRLLHGEVVAVAAAGAADADDAASPVSKLFAAVVSCGGLGDEGLELAALRVLVAFARCPSVSVSGDCLGHVVRACYNLYLGSASGGNQLCAKLALAQVLAIVFARVEADAMDVRVRTVSAADMMDLSDRSLNDSSVVQAAQAFINEAMEGSDVPEEVPPSDLPAEADENGDDVGMSRIREDGLALFKNLCKLSMKFATPDNPDDPVLLRGKVLSLELLRTVVDNAGPFWKSNEMYLEAIKKHLFLSLLKNSALSAMSVFQLLCSIFVGLLSRFRSGLKEEIGLFFPMLILRVLENVLQPSFLQKMTVLNFLEKICKEPQVIIDIFVNYDCDVDAPNIFERIVNGLVKTALGVPAGSTTTLTVAQDQTFRIESVKCLAVIVKSMCSWMDRQLRIGEFSLISSETPGSMDNHTTNGDGSGMDYDMQPDTSSSDISDSSSLEQRRAYKIELQKGIALFNRKPSKGIDFLVRSKKIGHSPEDVALFLKNTAGLNATMVGDYLGERDDFPLKVMHAYVDALNFKGMDFGEAIRFFLQGFRLPGEAQKIDRIMEKFAERYCKCNPNAFTSADTAYILAYSVILLNTDAHSVMVKDKMSKADFMRNNRGIDDGKDLPEDYLSALYDQIVNKEIKMSADSSTTQIKQPNSISKLLGLDNIINFVNWGQAEDKALGANDLLIKHIQEKFKAKCRKSESVFYTVSDATILRFMMEACWAPMMAAFSVTLDQSDDKASAAQCLKGLRFAVHITSVMCMQTQRDAFLTTIAKFTSLHSAADMKQKNVDAMKAIISIAIEDGNYLQEAWEHVLTCLSRFEHLHLLGEGVPTDSSFLTVPLVESEQKNHKSSSGLSSKRTNALQNPAVMAAVRGGSYDSTVAKTSASSLVTPEQISNFISNLNLLDQIGIVELNHIFTHSQRLNSDAIVAFVKALCKVSMTELQSPTDPRIFCLTKIVEIAHYNVNRIRLVWSRIWKVLSEFFVSVGLLENLSVAIFVMDSLRQLAMKFLEREELANYNFQNEFLRPFVIVMQKSNAPEVRELIVRCVSQMVLSRVNNIKSGWKGVFMVFTSAAADDTKSIVLLAFETMEKIVRDYFPYITETENTTFTDCVNCLIAFTSSQFNSDANLNAIAFLRFCAVKLADEGFGCQEKCTDEPRNLGMSDGNATVDKDDSISLWIPLLAGLAKLTSDSRSTIKRSAVGVLFDILKDHGQLFSESFWTNILESVIYPLFSSERSSSNDPTSTPSIPEDDFSNLETQTLAVKCLVGLFINFFDVMRPELARVASIVTYFIRSPYKHSASIGVSALMRLIEGVGGELSKEEWKDILLRFKESVAHTFLVFSKIVRMMQDIEIPDRFESYSENDQYSDHENYGNEEEEANMETTSYAIVKLKNHMALLLLVVQGIIKLYEEHRKYLSSDHINILLEMISAIATHASEFHKACSLMEVSEPAIVHFENESYQTYLKLLQALFRDYPSMSEEMDIESQILRVCEKILRIYLQCAQREPSNEALHRNASIHCIVPLGAAKKEELAARTSLVLLVMQLLGNLEEDSFRRVLPWFFPLLVDLIRCLRFCYSILFTLFQLTKGAQDYLSTSLIYLICFEILEFKFNMINPDT

SEQ ID NO: 165739 - protein, 136 aa, Oryza sativa
  Clone ID: PAT_MRT4530_64516C.1.pep
YLAASFFNFPAHPLITGSTHSITTAPPATGVVKGHWGCDHQSPSGVSITASSSDIGHVQTAQSAALQLCSQTFRIHSSSIHPNTWLGQSCQPCLALMCLVTPRVYCVLASGAALCGAAHQTAADMFCQTLWFGYSV

SEQ ID NO: 165740 - protein, 175 aa, Oryza sativa
  Clone ID: PAT_MRT4530_64517C.1.pep
MGKFGGAAVLPVYREEEDEDLFETSSSISGDSDDEAQFSDSEEAEAQEDQFAQQPARRMNSDSLYDLSSMKAQLPVKKGLSKYYDGKSQSFACMSEVRCLEDLRKKENPYKKIKSSKSYVALDGNQEACHIPGANSTSIAKKSGSSCANLMARNNTKSMLYRPPPIPVNKSGYHQ

SEQ ID NO: 165741 - protein, 86 aa, Oryza sativa
  Clone ID: PAT_MRT4530_64518C.1.pep
MTTWATGHWDWEEKGRKTQGGRAPTPLPPCAATAEIGGKNRGGGFLRQRRSLYPTPLPFFFNLDHLVGLKLKVKWEPGYPFTRQND

SEQ ID NO: 165742 - protein, 503 aa, Oryza sativa
  Clone ID: PAT_MRT4530_64519C.1.pep
MAGAPPPPARSLADLDGDVLAHCARSLVARDVASLAVACRPLRASAYCDAVWYRLFRNQWPSQQVPRGALGLRELYIRRHTEVHQMKFVDPISAFYYPNPTEVTPSHLMLDRNYIWLSQGLMVRRLRVDCPEIELVETYKSHGARITCMRLFPLIDIPLFRGDSQTNEKALVTSSADRTVRLCWKGHSRCFRGHSGPVTALSDKLLGDGEFKLLASGGEDCTVRLWSMSTRGKNHPLISTFHGHEKALSLLSVARHKPSLLVSCSKDSKVKLWDTMAPPSSGSSSCVGSTHLSTNSAPIAVKCHESLCYIAAGSEVTTIDLRTMKKASVLALRDHRILSCEMLPSEWALLWDIRKSQELPNIVAELQSESDEPVTFLHLDPYKVITGAPSDGQVHVWETQTGHFANTLSCGEPAKSADRSTLSAMAVDGCRIAMAGSSAEVDMVHYRDFLMSSVPVSLPGNSKEVSRFWGPQEYSDDEDEDEDDSNDEDDSDEEDHDHAWLVD

SEQ ID NO: 165743 - protein, 207 aa, Oryza sativa
  Clone ID: PAT_MRT4530_6451C.1.pep
SSLARGNGGGERRRWSEVVAVAVGTAVGSGGGGSGDSGRKRRRTAVGSGGGGGGDSSLPSTRPPGDILSPWTAAVGSSFSALSPPPSPPLPTTVPAATAAASDLPVPRWHDNRRLLRRAAILLLGRNKAGHHAFRGGAGDERLRVADEGDTVGGWDGADPDGAGHRAGKVEAVETDEVADELWARGDEGVGVGGGGPASRQPPVIPA

SEQ ID NO: 165744 - protein, 77 aa, Oryza sativa
  Clone ID: PAT_MRT4530_64520C.1.pep
MGKFGGAAVLPVYREEEDEDLFETSSSISGDSDDEAQFSDSEEAEAQEDQFAQQPARRMNSDSLYDLSSMKAQLPVK

SEQ ID NO: 165745 - protein, 53 aa, Oryza sativa
  Clone ID: PAT_MRT4530_64521C.1.pep
YFQMLHMNTKIQRINRTDVGYTLQSFTNSFLQIEEKARKMKNTERSWASDFTT

SEQ ID NO: 165746 - protein, 55 aa, Oryza sativa
  Clone ID: PAT_MRT4530_64522C.1.pep
GNHHWPYKRFPWCERLTDRMDSCPHFSTKLTRSPRTNPEQCIDRLECYTSSTAQS

SEQ ID NO: 165747 - protein, 62 aa, Oryza sativa
  Clone ID: PAT_MRT4530_64523C.1.pep
LRAEAAASASASPPPSQLRAEAASLSRRLRVTVRRRRSSVPRLPPQPADDRGNSDDRDSSCG

SEQ ID NO: 165748 - protein, 74 aa, Oryza sativa
  unsure (1)..(74): unsure at all Xaa locations
  Clone ID: PAT_MRT4530_64524C.1.pep
LKMTNDLLTNHNNQIMTNISELQSRCKXARIMYADCYYGAYYMGRTPGYYRLSTELETCCRSRCGTFNYNNIAR

SEQ ID NO: 165749 - protein, 74 aa, Oryza sativa
  Clone ID: PAT_MRT4530_64525C.1.pep
CSCIWRRSEHKIETGDQETCRNSRLSEKVLGFATVTNMNDTIAQGTIFAHRSDICFSFLRNVEGKRYAPVGGFS

SEQ ID NO: 165750 - protein, 35 aa, Oryza sativa
  Clone ID: PAT_MRT4530_64526C.1.pep
NVFLLLILSPRQARAGLWGSRWRCRPGAVTLIGKR

SEQ ID NO: 165751 - protein, 467 aa, Oryza sativa
  Clone ID: PAT_MRT4530_64527C.1.pep
MAAATAAPSIDEAKAKSVLRQVEFYFSDSNLPRDKFLRETVEQREDGLVSLALICSFARMKSHLGLDAAVKPETVPEETVLAVAEVLRRSQMLRISEDGKMVGRASELLKADEIIKQVDSRTVAASPLPYNVKLEDVQSFFAQYAKVNSVRLPRHISNKKHFCGTALVEFSEEDEAKIVLENNLFFAGANLEIKLKKEFDAETESKKEAYEKAHPKKDEQNEGYPKGLIVAFKLKRITVDGGVQQNCADNDTATEEETPKSMKKTSTGESEERTTVNSDMEEQKSSDDMTEAKEVNAGEATESGDKCTVDALLESEKKGDNETSIKDDRGLSGKANSPISREDLKEAFKKFGTVRYVDFSIGDESGYLRFEDSKAAEKARMSAVLADEGGLIVKDHIVTLEPVTGEAEKDYWNTIRGIQGKYKDNRSYKGRTGKSYRGGKQFNGKRGRHSDSSEKGANKTQKVEAAA

SEQ ID NO: 165752 - protein, 50 aa, Oryza sativa
  Clone ID: PAT_MRT4530_64528C.1.pep
ISLKTSILSNLIILLLLSLLFYTPLSNYNINHTRRTPLVSPINSKKKKKK

SEQ ID NO: 165753 - protein, 61 aa, Oryza sativa
  Clone ID: PAT_MRT4530_64529C.1.pep
MSSDCDKTLHITPSDQAHNTSGPIPLHHAHPCLDESARGKLYFKSGSYPFPLVASAMLKHG

SEQ ID NO: 165754 - protein, 141 aa, Oryza sativa
  unsure (1)..(141): unsure at all Xaa locations
  Clone ID: PAT_MRT4530_6452C.1.pep
SIRHRHNYAHVTTHTAQDWAETFVCELNETVAEAQLRTRQVPPDLPSQAAIQQYLHSKNRLLILGFNSTLTEPVESSGRRGGDQIKEMELKLHPGLKGPLRALCEDEHTTVIVLSGSDRSVLDENFREXNMWLAAKHAMFL

SEQ ID NO: 165755 - protein, 227 aa, Oryza sativa
  Clone ID: PAT_MRT4530_64530C.1.pep
MAKTKQGKRDVDSYTISGTNKIVRVGDCVLMRAADSENQPYVGRVERLETDGRGSVRVRVRWYYRPEESKGGRRQFHGAKELFLSDHFDTQSAHTIEGKCVVHSFKNYTKLDNVGPEDFFCRFEYKAATGAFTPDRVAVYCKCEMPYNPDDLMVQCDGCKDWFHPSCMGMTIEQAKKLDHFVCSDCVKENGAKRPSHAYPASSKYEPKWIQGFSLSTGISLLLFHFW

SEQ ID NO: 165756 - protein, 203 aa, Oryza sativa
  unsure (1)..(203): unsure at all Xaa locations
  Clone ID: PAT_MRT4530_64531C.1.pep
RCDVDRKPAALVGDALHFALAEGSGIIKYNMWRXSLSRIHPPVVYKGGIVVMAMGGNLLGLGGIEGSILSMWSSDVSLDGGVRWEKNRVIKLESLLPSIDCVEAVACELAQPAPIGFVDGADIVFVRTDAGIFMIELKSMCVRKVCEGGFFKAVFPYTSFCTPGVHLQQNRVQFSRKRLLELREGDVATGMQSNGKSHKGRQP

SEQ ID NO: 165757 - protein, 64 aa, Oryza sativa
  Clone ID: PAT_MRT4530_64532C.1.pep
MVQCEGCKDWFHPSCMGMTIEQAKKLDHFLCADCVKENGTKRPSNSYPASSNSDSKVEPKKRKR

SEQ ID NO: 165758 - protein, 216 aa, Oryza sativa
  Clone ID: PAT_MRT4530_64533C.1.pep
MAKTKQGKRDVDSYTISGTNKVVRVGDCVLMRASDTEKPPYVGRVEKMELDGRGSVRVRVRWYYRPEESKGGRRQFHGAKELFLSDHFDMQSAHTIEGKCVVHSFKNYTKLDNVGPEDFFCRFEYKAATGAFTPDRVAVYCKCEMPYNPDDLMVQCDGCKDWFHPSCMRMTIEQAKKLDHFVCSDCVKENGAKRPSHAYAGSSKYEPKAESKRQRR

SEQ ID NO: 165759 - protein, 409 aa, Oryza sativa
  Clone ID: PAT_MRT4530_64534C.1.pep
MAAYLSMGEAHRRIADYLSRVADSVSSSDGAALASLLAVSSAQAPAPLSDALSAFPDFPRLAADRYPHLSDLLPPLLRAIHSHSLRRFADAYSSFEKAANAFLQEFRNWETPWAMEAMHTVALEIRLLAEKADRELATSGKNPDKLQSAGSFLMKVFGALAVKGPKRIGALYVTCQLFKIYFRLGTVHLCRSVIRSIETARNFDFEDFPVKDKVTYMYYTGRLEVFNENFLVADQKLTYALVHCNPQYESNLRRILKFLIPVKLSIGVLPRITLLERYNLLEYADVVTSLKRGDLRLLRQALERHEDQFLKSGVYLVLEKLELQVYQRLVKKIHIIQRQKEPAKAHQIKLEVVVKALKWLEIDMDVDEVECIMACLIYKNLIKGYFAHKSKVLVLSKQDPFPKLNGKPV

SEQ ID NO: 165760 - protein, 61 aa, Oryza sativa
  Clone ID: PAT_MRT4530_64535C.1.pep
MSDEYFIGNVFKEVMTPNGTTVACLDESGFHPESLTMKRGLVAPQHFKGDFTTFRDVIFAG

SEQ ID NO: 165761 - protein, 111 aa, Oryza sativa
  unsure (1)..(111): unsure at all Xaa locations
  Clone ID: PAT_MRT4530_64536C.1.pep
MLGAHPHSHKGLGHSLLSPPVIPGGSPVQGSSKSQRSLLIPASPQTPATLTTPSPPASTDHVCRSVFHPGTNIATNTIGAQVFDKPSHPNAPTVYXWLYNGNTRSKHHEKC

SEQ ID NO: 165762 - protein, 120 aa, Oryza sativa
  unsure (1)..(120): unsure at all Xaa locations
  Clone ID: PAT_MRT4530_64537C.1.pep
WETRRRRQRRGEAAVGSGGGRLDAXGFGRQRLLCTPDIRKKIPDSFRPFSDSVGYHPYCIRFRIREKKSEFVSESEKFRTVPTEFFRILKLVRTDGNYPNQXIPNYYTIGYICSSVMRHS

SEQ ID NO: 165763 - protein, 92 aa, Oryza sativa
  unsure (1)..(92): unsure at all Xaa locations
  Clone ID: PAT_MRT4530_64538C.1.pep
LVTLLCKKMEMWILMVRLYADRESTMLYMLMLDEFVTTIDTIGFMSKLXHKNINSTGCDVGGQDKIWPLWRLYLQNTPCLIFFVDSIDRERV

SEQ ID NO: 165764 - protein, 68 aa, Oryza sativa
  Clone ID: PAT_MRT4530_64539C.1.pep
YGGHITPVEFSICIWGAHLTSSPGKTTWPHHNTPPQVPQWSVNSSQAPISGLFNGRPRAPNFVALSRA

SEQ ID NO: 165765 - protein, 73 aa, Oryza sativa
  Clone ID: PAT_MRT4530_6453C.1.pep
MKINTKDLFGWGRNKNQPNSASTPDADADPLTLLAKVTIRGSAIKAFNGSKVARGRYPPLDESDNRDWPKVTP

SEQ ID NO: 165766 - protein, 177 aa, Oryza sativa
  Clone ID: PAT_MRT4530_64540C.1.pep
VAGCTVRRLTPSEIDERRRKVLCINCDETYSRGHNKVCKCLFLLDLAYDDDEEDEGDTTPAADPETLRIFLHAVTCVRPSNAMHLSIRLGDATLHALVDMGSTHNFLSQESAARDARISIDSEVFVTDLYVLPLGSYDLVLSMQWLSTLGQILWDFGQLTMSFWHKDHMVLWRSLPT

SEQ ID NO: 165767 - protein, 57 aa, Oryza sativa
  Clone ID: PAT_MRT4530_64541C.1.pep
MRKGQGRHDATEVAPELEERLCRHGWAASVAVVARNVAAVREPTTARLAVKGLVLLI

SEQ ID NO: 165768 - protein, 150 aa, Oryza sativa
  Clone ID: PAT_MRT4530_64542C.1.pep
GLWFWPLGLCIYRNVPCLRLRPYFKHGLGESCELGHRSSQAICRAAQAIRIYTSSCNSPWISVYDPSRRPAGPPSAPHRPPPLRRPAGPLRPPPPRRPAGPPRPTGRRHRPRLTTRIAAAAPAGRPHRAPPAAAAPAGPPRPAALAPAWH

SEQ ID NO: 165769 - protein, 261 aa, Oryza sativa
  Clone ID: PAT_MRT4530_64543C.1.pep
MPQINLESLFCGGGEAGSRVACETIALPGCSDAPAESRCVRIGDGAIWAELAGGAVLERDGSTKGSSNPKAAAASGKGKKGGPRPSSAESRRLPVTGKAAVVICGLPAGKMVAQKKRLSPCLGRGWRRAPAAAGARVFASEAVETDPGSPKVSCFGAVRSERSPATAAAAPAPPVEDEERNGGCWASVAATLRHLCRSSSNPLEGELETNEWNATATSSPTVAALSPPRPVAVGLGEMKRLASRRWPETMAVAGQGPVSAA

SEQ ID NO: 165770 - protein, 65 aa, Oryza sativa
  Clone ID: PAT_MRT4530_64544C.1.pep
FARSGAWSPEALWREAAVPPPTRPARRDGSYRSVSSGGGGGGSWPVMSSSASASGEVYLCLAFTS

SEQ ID NO: 165771 - protein, 86 aa, Oryza sativa
  unsure (1)..(86): unsure at all Xaa locations
  Clone ID: PAT_MRT4530_64545C.1.pep
MSCCYANCGCGSALLSAAQDEADATMFPDAEATATTKTFVLPAPSTGRALYXMDMVVDSGENGGCGCNTCKCGTSCNGXCSCCSCN

SEQ ID NO: 165772 - protein, 136 aa, Oryza sativa
  Clone ID: PAT_MRT4530_64546C.1.pep
MKEEVKTCGGDLEDGKARGAVRVTDLGGDDAEEVETRWRWPHRRESVVEGARIDLVAVEGIQHGSDLVTVDPVAGPPGQEEGEARGAIKVTDLGRDNAKEVETSGGDLVGERARRKELGSIWSSSLSFPSLVSDAA

SEQ ID NO: 165773 - protein, 105 aa, Oryza sativa
  Clone ID: PAT_MRT4530_64547C.1.pep
QPSALHRIPVPSADSKRQAGTGEEATRERKFHWKQRRHAMATRGQEGTCGTASGIARRGRPRGAGVSTLAGMRCDGGRRRTVRAAGEGEDAVWVDGTLCATCCIR

SEQ ID NO: 165774 - protein, 153 aa, Oryza sativa
  unsure (1)..(153): unsure at all Xaa locations
  Clone ID: PAT_MRT4530_64548C.1.pep
MMNFSSYFYSSSAAAAGGGGGGGEKKSSSSSASKKKQQQAAAAEGGNNQTRYLGVRRRPWGRYAAEIRDPATKERHWLGTFDTAEEAAVAYDRAARSLRGARARTNFAYPDLPPGSSVTPYLSPDXPPTPPISCSSRSTPIPPPPPRCPLRRR

SEQ ID NO: 165775 - protein, 87 aa, Oryza sativa
  Clone ID: PAT_MRT4530_64549C.1.pep
MTTALPPCSLRLLLLQDSTPTTHEAARSEVAPVAPAEENNDGGVDDLGGVKHANGVREVRGYATPLAYCTRASRSIHARPYANMASA

SEQ ID NO: 165776 - protein, 283 aa, Oryza sativa
  Clone ID: PAT_MRT4530_6454C.1.pep
MVICWPAAPRVHTSPNLCWLPSSAPTPPRRPTTLSRRAPPRPLRATRRRLMPGGCFGSDAVINPSDVQEGNEDTDDDVGEVNEDTDDDASMNAGEGNEESDDDVKINVRDENGTIETRGKTKLKDIWNLPKGLRIVVQCNDLNQAVGDEAGILSKFLGMNKGNMNQNDHMQQGKNNSNAYKKQQCNIVDIMDANSLEIGTNVFLKSWKNRNKNVVVASIVSCDPTRKVAGIELGTEYLMVHVHFPLAKYEELIRPYKGYKIIGNVVKLDIAWPAIFVDKINGS

SEQ ID NO: 165777 - protein, 291 aa, Oryza sativa
  unsure (1)..(291): unsure at all Xaa locations
  Clone ID: PAT_MRT4530_64550C.1.pep
ARPCRIPGKRTGRRRRRARRNPWRRWTREHTRSQSPWHCRAPSRSRRPAMAGDGNGRGKGGVGDDGQNXRRRRWRWRWRRGWRRRQGWQRRRFGVSVADPADCGWRRHGGLGRLAGGKEDGRIWPARXAIVGRSEVGLTQSMAGGRIGARGASGGGGRHGVRGAAGGDGGRLGTKGAAVGWRPDXRERCIRWRRPAQRRRPRCKELLAGVAQSLAREGWPAGGTGAVAPHVGRVXTVVEHRCISVSSHSLRGVAGXKPNLGSFETXRTAVAVFPSLLSLKMSSRHPLAETS

SEQ ID NO: 165778 - protein, 77 aa, Oryza sativa
  unsure (1)..(77): unsure at all Xaa locations
  Clone ID: PAT_MRT4530_64551C.1.pep
EALLGATEAGLARKARPWAGGQIDARGASGGGDRRNAMRRGRWXRRRPRCKELLAGVAQSLAREGWPAGGTGAVAPH

SEQ ID NO: 165779 - protein, 42 aa, Oryza sativa
  Clone ID: PAT_MRT4530_64552C.1.pep
ILAELIISISLDGLGLLDYTAINGISYYVSCRHLTVSELDLA

SEQ ID NO: 165780 - protein, 567 aa, Oryza sativa
  Clone ID: PAT_MRT4530_64553C.1.pep
MAAMQSWRKAYGALKDSTTVSLANLNSDFKDLDVAIVKATNHVECPPKERHLRKIVAATSIARPRADVAYCIHALSRRLAKTRNWIVALKTLVVIHRLLREGDPTFREELLNFAQRGRILQLSNFKDDSSPIAWDCSAWVRTYGLFLEERLECFRVLKYDVEAERLSKQGQGPEKGHSRTRELESQDLLEQLPALQQLLYRLVGCRPEGAANNNYLVQYALALVLKESFKIYCAINDGIINLVDKFFEMPRHEALKALEIYRRAGQQAGSLSDFYENCRGLELARNFQFPTLREPPQTFLVTMEEYVREAPRMVPVREPLELPERLLLTYKPEEQEEDSVPDPVEEEKPPVEEPVPVPPVTEAVSPPPPPKTKVADTGDLLGLNDPNPSVSAIEESNALALAIVPADAGASTSSTATWQDKGFDPTGWELALVTTPSNTNSSAADSQLGGGFDKLILESLYDQGDYRQRQQQQLYGSSAPNPFMSNDPFVMSNQVAPPPSVQMAAMSQQHQQIPTMMQANPFGPPMQPQHVGMGPATNPFLDSGFGPFPMANNGHQQANPFGGTQLL

SEQ ID NO: 165781 - protein, 206 aa, Oryza sativa
  Clone ID: PAT_MRT4530_64554C.1.pep
MDPGKSFSAAEEEATDSVSTKPEEVAAYQSSEAKQAKLQSMLAALLDDPILADVPRKPSLADVDTLINLELGSAMRLTVVKLDGTSFGTDVAMLNTATVKDLKMAIRKKTDEIEQEKMGHRHISWFLFFFMAFFQELSDPFTASSDHWKEIPTLLPLNLHIWCLTCWGFEPQPTEYVICLFLAARYVQGISKALKKKKTPLFPWSS

SEQ ID NO: 165782 - protein, 266 aa, Oryza sativa
  Clone ID: PAT_MRT4530_64555C.1.pep
MRLWRAAAAGEMVLSVAMKSRRRSGSSSGAVYAGSEHDDNHKPQPTATYALRHRVGVCVFGISMTSTLRPPACRPRGHDPTRAIGSAVRHGTGEESGVRGFGVAFAVYGGSIVGPRKQTARARERQARCPPIRCMRSCGLAWHGNGSFSRSRPLLCAVLPLLAPPRGAGSGREEKGTRVPTRGGTHAECDSRQCDSVIWRVELVRLGGLFLRHPCRSFHRGLFPPRIFSFGIQQLYVLELVVRVQALSCICHCFQPFQHTMGLFTQ

SEQ ID NO: 165783 - protein, 85 aa, Oryza sativa
  Clone ID: PAT_MRT4530_64556C.1.pep
MVELDLGGHSILEICLGVFGVEGCGFPQGPEVPEFLTRKFRVKGRDGEAALQRAGHLDTTAADSPRRSLAPSAGGADLPKPQRED

SEQ ID NO: 165784 - protein, 198 aa, Oryza sativa
  unsure (1)..(198): unsure at all Xaa locations
  Clone ID: PAT_MRT4530_64557C.1.pep
MNGVGLILKNIVKPAHNRKHSYSNRFTLARDVPLYPQDIAPKHVTMPSVPPRYXKRDCDSTLRITQFTAVHRSWIIINPFNQGIDSPVTPXDLSPLHSLVPRNEPCYTKWLSRGRRGDVALRWRLTGDNVDXHTGSTAVTLDGGGDGVRRPATGETGGELRIHGGDDFPATNGGNRGVAGLLLAAAMPRRAMALTGGD

SEQ ID NO: 165785 - protein, 227 aa, Oryza sativa
  unsure (1)..(227): unsure at all Xaa locations
  Clone ID: PAT_MRT4530_64558C.1.pep
MVPHLKEMYSSLAASKELVKALFGIWGPGDGLNLSTASMLYLARAHARQLAKEDRRRGDETVQMRAQLAEEAREWRSQQRKKVAATVRVAVXGLDGERRSRHHAERVNAKLGKALADAERELEREWRSRERLEKVCDELVRGGLTGGVDGNRGGKEEVEEMRREAERAQEELEKEREMLRLADELRHRGLPTRGAAHRHTKAMNCGDQLRRSSTGAYSHLSFSLRFP

SEQ ID NO: 165786 - protein, 66 aa, Oryza sativa
  Clone ID: PAT_MRT4530_64559C.1.pep
FFFFFLEKNEVKYITELWVHNHFHLQESNSSNLIKSSIILFFPLFFQVKHHTCLYKLSPRGSKEKL

SEQ ID NO: 165787 - protein, 150 aa, Oryza sativa
  unsure (1)..(150): unsure at all Xaa locations
  Clone ID: PAT_MRT4530_6455C.1.pep
MGMPSVQAALRCLPPLIWPHSATVNPATLXCLLPLISPPRPPQPCAKVYVXGAEHKSIAYVACHIGGQTWSKDDCTGGGTLNQVHGLKRAILKFIDLSDTTHEFKDRPFISLLKFYLFFINKINLSIHQIVSLSYSSTAYHSARGALLLM

SEQ ID NO: 165788 - protein, 202 aa, Oryza sativa
  Clone ID: PAT_MRT4530_64560C.1.pep
MDAVGAAGGGAMLPAAARRGQPPQPPCMTTAPEQQAAAGGAVIWPAAAAAEAKEKMVVDARTMQLFPTRSADGVVVSPAPAPAAAQERRRPEVHVTPSVPATAPTAPLTIVYGGQVLVFEHYTAEAAEKLVQRTQHLLAAAAGGGGGNKNNNVTVVTPPPDEPPMLLPPPQMPAASGVSAGGVMPIARKASLQRFLQKRKQK

SEQ ID NO: 165789 - protein, 87 aa, Oryza sativa
  Clone ID: PAT_MRT4530_64561C.1.pep
HRITLTPFASSSASPSVAQRHRKAEILHLGGDFHINFTIFFSFLSKYLYPVVRSPSLFTALCCSFFIYYNLLSPLVALFSSMDLMPV

SEQ ID NO: 165790 - protein, 58 aa, Oryza sativa
  Clone ID: PAT_MRT4530_64562C.1.pep
MAKPTSRAPAPSVGLASGGGGGGGRGLAHATALPHGRACLRVLERPAGATTTQMPVAG

SEQ ID NO: 165791 - protein, 107 aa, Oryza sativa
  Clone ID: PAT_MRT4530_64563C.1.pep
MPSVERGQALTKTLWHPLWKDGGGEEDGHDCSREEWSWMGDRDVEEVADEVLSREVATVGRGVIAGIRHYAMTTFALTCRCPSLGKRQTGSEHNMVKVVVQEIAVRE

SEQ ID NO: 165792 - protein, 81 aa, Oryza sativa
  Clone ID: PAT_MRT4530_64564C.1.pep
EKLTSGNNYTQHTYPEEKSGKPKVPNQGAHTHELTYTNCPVPTGQTSNANPINESAKTHRETVRERRTREGALGTSETGNR

SEQ ID NO: 165793 - protein, 87 aa, Oryza sativa
  unsure (1)..(87): unsure at all Xaa locations
  Clone ID: PAT_MRT4530_64565C.1.pep
FFFFFFLXMXXSFHTQPPGAIIISHHHHHTKGAQPLWTHVPRSKHPPARAIHTRASTRQPRVNYTLSTVXCPCNFTHNVASHSVVAI

SEQ ID NO: 165794 - protein, 368 aa, Oryza sativa
  Clone ID: PAT_MRT4530_64566C.1.pep
MADAAADDDAPPSPPPSAFHPASADTPMSDATPSAADTPNLPDTPASASAEPETPFSDAALADASDADASGVAAPPDDDGTNPLGGAMKHMALAPPAPPSKKSKKKNSNSVWTRPNSRKGKKKAKQPANALAGGSGGANGRLPKPSSGEDELVLTPAPRFAAERNDDAPDRPVLLSRVFKSDKVEVSDDRLTAGSTKGYRMVRATRGVAAGALVHKAWRANYAEQGYGDGDVLGFYIHLPDGELYEPKQPFLVHYKGLPFRAEAPKAAEQKTPDPVPGSEICYFKNGICQGTAFVDIPGGRYYPAASMYTLPDQPNCQVRFNFGPNFEFFPEDFGGRLIPRPMSDVPYRPFELANGGPAENGTAEKNI

SEQ ID NO: 165795 - protein, 89 aa, Oryza sativa
  Clone ID: PAT_MRT4530_64567C.1.pep
PSFQLDELTVVRPLLFLQRLLDLAQSPDPAKAAAHGYLPGIGVRNSLFTLAGCSLLGFLLTFRHLITRLPAAASRHRLCLARKPHGRRH

SEQ ID NO: 165796 - protein, 253 aa, Oryza sativa
  Clone ID: PAT_MRT4530_64568C.1.pep
VCTKSKSKKKNSNSVWTRPNSRKGKKKAKGRLPKPSSGDDELVLTPAPRFAAERNDDAPDLPVLLSRVFKSDKVEVSDDRLTAGSTKGYRMVRATRGVAAGAWYFEVKVLHLGSTGHTRLGWATDRADIHAPVGYYVFGFGYRDMDGTKVHKAWRSNYADQGYGEGDVLGFYIHLPDGELYEPKQPFLVHYKGLPFRAEAPKAAEQKTPDPVPGSEICYFKNGVCQGTAYRMQLARRRWSTASAREAHASLCS

SEQ ID NO: 165797 - protein, 382 aa, Oryza sativa
  Clone ID: PAT_MRT4530_64569C.1.pep
CLGRRRATRRRRDQPVGRRHEAHGPRAPGAAEQEVQEEEQQQRLGPGPTPARARRRPSSRPTPSPAAAAGANGRLPKPSSGEDELVLTPAPRFAAERNDDAPDRPVLLSRVFKSDKVEVSDDRLTAGSTKGYRMVRATRGVAAGAWYFEVKVLHLGSTGHTRLGWATNNADIHAPVGYDVFGFGYRDMDGTKVHKAWRANYAEQGYGDGDVLGFYIHLPDGELYEPKQPFLVHYKGLPFRAEAPKAAEQKTPDPVPGQYHTTIVFDSTLFNRLVVDCQPGKQQMLFFMKQLGSEICYFKNGICQGTAFVDIPGGRYYPAASMYTLPDQPNCQVRFNFGPNFEFFPEDFGGRLIPRPMSDVPYRPFELANGGPAENGTAEKNI

SEQ ID NO: 165798 - protein, 61 aa, Oryza sativa
  Clone ID: PAT_MRT4530_6456C.1.pep
MAFCVAAPGAHRSRAEQEGLPRDSHPLPPTAGLLPLPLPPTAGRLPLPLRQTRSPAGFALR

SEQ ID NO: 165799 - protein, 40 aa, Oryza sativa
  Clone ID: PAT_MRT4530_64570C.1.pep
LSVTKSKSETGKVIGVFKSVQPCDADLGGNLAKDVKIRAV

SEQ ID NO: 165800 - protein, 353 aa, Oryza sativa
  Clone ID: PAT_MRT4530_64571C.1.pep
MMSGMQTPVVAVGATDWAWRLGALVAGAVPLLALAVWHCTDAFHRAAFAFRRRGTRRARRLPPGHMGLPFVGETLALLWYFNLARRPDAFIQAKRRRYCYGDGDDDAGIYRTHLFGSPAVLVCSPASNGFVFRSAPPGSFGVGWPDPELVGVSSIVNVHGGRHARLRRFVLGAINSPNSLRSFAEVVQPRVAAALRSWAAKGTITAATEIKKVTFENICRMFVSMEPSPATAKIDEWFAGLVAGFRALQLDIPGTAFHHARKCRRKLNSVFREEVKRRKLKAKLEEHDDVMSGLMRMEDEQGRRLGDDEVVDNIVSLVLGGYKSTSSAIMWATYYLAKLSAVLAKLRVCKPIK

SEQ ID NO: 165801 - protein, 414 aa, Oryza sativa
  Clone ID: PAT_MRT4530_64572C.1.pep
MRCPRLPLHPHPRCHRRSSPRPPIPRYPTPPHPPPKPPIFPTPPPPQPDSPLSDAALAVDAFDADASAVAAPPDDDGTNPLGGAMKHMALAPPPSPSKKSKKKNSNSVWTRPNSRKGKKKAKQPANALAGGSAGANGRLPKPFSGDDELVLTPAPRFAAERNDDAPDLPVLLSRVFKSDKVEVSDDRLTAGSTKGYRMVRATRGVAAGAWYFEVKVLHLGSTGHTRLGWATNNADIHAPVGYDVFGFGYRDMDGTKVHKAWRANYADQGYGEGDVLGFYIHLPDGELYEPKQPFLVHYKGLPFRAEAPKAAEQKTPDPVPGSEICYFKNGVCQGTAFVDIPGGRYYPAASMYTLPDQPNCEVRFNFGPNFEFFPEDFGGRSVPQPMNNVPYRPYQLANEVPAENGTAEKTIKLQ

SEQ ID NO: 165802 - protein, 86 aa, Oryza sativa
  Clone ID: PAT_MRT4530_64573C.1.pep
HQDSGLSARRNDQSPEKNIHRVPHLIAAEYKRFGLSRNRGTAKRPYGGVVTGTVSLPEDFPAFFGLCSNYCCKRAVYSTLIRLSVK

SEQ ID NO: 165803 - protein, 75 aa, Oryza sativa
  Clone ID: PAT_MRT4530_64574C.1.pep
SALHCPFSGRFAFGSCLLFVAPPPRGATWGPGIAYQYGRVGLRVRLINRGSRGPAAFGILGAFFHLCCFLWFLFF

SEQ ID NO: 165804 - protein, 106 aa, Oryza sativa
  Clone ID: PAT_MRT4530_64575C.1.pep
MDGGGGGGTEHGGPPAVDVEGFARAAFDSSSIAFSSPAPSHLLYALEPATQRAPTPHTPTRQGPSRERSADGILPARTRPASSSPAHDGRRAPPARPAGKLLTLPP

SEQ ID NO: 165805 - protein, 91 aa, Oryza sativa
  Clone ID: PAT_MRT4530_64576C.1.pep
RARRDGARPAQRRPGRMRRISGDLPPAATAHDGAGASGAAWPPWPSSGVQGDRAVGGDLAGGGTAAGPARPWVLIAWDGESAKRGVAVGRR

SEQ ID NO: 165806 - protein, 83 aa, Oryza sativa
  Clone ID: PAT_MRT4530_64577C.1.pep
AATAAIAAAVRKHGGLPAELRGVQRPCAGVDGEVGVIDSRCDAVKVAHLVAARDLHPRARPRRRRRRLPGHSDGPTTRSHGMP

SEQ ID NO: 165807 - protein, 173 aa, Oryza sativa
  Clone ID: PAT_MRT4530_64578C.1.pep
MGRPSPAAGHRCSREKDEEEKRGNRETSPLLAAAANLIPPPRCRRPRPSPPPPQPRLPPPPPASHAAADLAHPRRCSRRRPRPSPPPLQPPLPPPSPASRAAVDLAPPRGSRRRPRLPPPQPPPTSALPAAAATSPSAASARISRRRRPRSSPPSAAAAAAADLAFRRRALAS

SEQ ID NO: 165808 - protein, 175 aa, Oryza sativa
  unsure (1)..(175): unsure at all Xaa locations
  Clone ID: PAT_MRT4530_64579C.1.pep
LAAGSGIVARARRPVPLPLPPAPASATARSRRRPPPLPPPDPGGTRXPPTASPPTAPAARSGREEAHRPHRRRPLPPLLWKAQGPLPPPDPGKRRLTARVAAASPPSWKAPTIPAAVVEGPRSPTVPAAKSGREEAHRSCRRPLLPPSWKTRGRRGCPLAGFAGSADPAARRPSP

SEQ ID NO: 165809 - protein, 553 aa, Oryza sativa
  unsure (1)..(553): unsure at all Xaa locations
  Clone ID: PAT_MRT4530_6457C.1.pep
IKSSANLITAVAKNVGLENTTTRRSATKYHHRENPTAAAKVFGDQLRELTHDMEDCIERFLHRVSCAEGASRXAPARFGDKIKALNRRLEELTNERLCQFVYDKPPPPPPLAPAAAQQREHVQLNPVGVEGESPEELRVIAIVGFGGSGKTTLAKAVFRSTDDDRIRVFRSCRAWVDRAKEKNAGEIFRSLLQQFGYRGQGLLVDDEQYLQAQLMDYLRGRRXENFCSCFPVKFVRYLIVIDDIGNGQWNSIKSAFEENSRNNGSRIIVTTTIKSEANTCCGNGKGFIYQMQNLEDQYCKTIALGEAPSPELQMGSEELLKKCDGHPLSLVCVANYLGVHDNGNFERLKGVIMDNYTSLSNHVVRACLLYLSIFPNDVPLEKKVIIRRWIAEGFARSEDVDIDDQTIARWNFETFVDWDIFHPIIDTSNNGDVKMCKTRSIVHEYMLYKASRLERFIMSFPDWRRKVRHLCIDHRTPHKRRTTTDMDLSCVRSLTIFGTAGDTICEFHRYKVLRVLDLEECNDVKNKHLKNIHKLWNLQFCHLEGTNGGLPPV

SEQ ID NO: 165810 - protein, 316 aa, Oryza sativa
  Clone ID: PAT_MRT4530_64580C.1.pep
MVVFLLKYELIEFRDGARSLLSASAGIILDSPLSNMDTIRVVLVISVYNYTHPSLSKTPICEKHSTRTPYLFEYLQKTKLTHFEIQCHHGRLTVDGVVPPDPPPSPLTVAEVAATPKGGRSPHPSLRAAPPDPSPSPPTVAARCRRGRRYTQVRRIHPPSPSRGRRRQIRRPPSPRHNRTRGRQIRHRCRGRVAASHRTLTVRPPPHPTAGLLVDVAARCHPRRRRRIRRLPSPSHSRTRGRQSRHRCGGCVATIRRTLTVRPPPHPTASLLIGVAARFRPRGFGGGEEREREERIGEKESRGEKYQIGKETGEKF

SEQ ID NO: 165811 - protein, 91 aa, Oryza sativa
  Clone ID: PAT_MRT4530_64581C.1.pep
MTSRDRMPHLLRAANGPIKAKIAWVQFRGLRYLRDGLRKQHSYVFNYYRVYKRTSGMTMVKETDNREMFARRESCGIHGGVRSSGGLARHL

SEQ ID NO: 165812 - protein, 76 aa, Oryza sativa
  unsure (1)..(76): unsure at all Xaa locations
  Clone ID: PAT_MRT4530_64582C.1.pep
TEEEKRQGGGHGAPGGAADEQLRQDCCRQIDGGDDRGCKGXGLNHIGGGXEQEHGATDDGHPMDEEDPGWQKGDWE

SEQ ID NO: 165813 - protein, 64 aa, Oryza sativa
  Clone ID: PAT_MRT4530_64583C.1.pep
FIATISYLDLIYNRGISILLPELLGVLFIKALNLNHQWVLQYGNLWAPNTTKYAHQLGSLQGAS

SEQ ID NO: 165814 - protein, 750 aa, Oryza sativa
  Clone ID: PAT_MRT4530_64584C.1.pep
MEQALLRILRTLGSTAHLTQAHARLLAAGLAASPRLLPALVAAAFSAHSPRYAAAALRAAGPAASTVSHNTLVERLAGARPRGRRPAPAPAPADALAAYAAMRAQGVPPNGFTFTFLLRACALLGLPRPCGCVHGQIVRCGFGSDVFVQNALMDVYHRCGGGGGGGVGAARQVFDEMVDRDVVSWNSIVGVYMSSGDATGAMGFFEAMPERNVVSWNTVVAGFARMGDMVTARAVFDRMPSRNAVSWNLMISGYAMSGDVEAARSVFDRMDQKDVVSWTAMVSAYAKIGDLDTVNELFDHMPVKNLVSWNAMITGYNHNSRYDEALRTFQLMMLEGRFRPDEATLVSVVSACAQLGSVEYCNWISSFIGKSNIHLTVALGNALIDMFAKCGDVGRAESIFYKMETRCIITWTTMISGFAFNGLCRDALLVYNNMCREGVQLDDTVFIAALAACAHGGLLQEGWSIFNEMVERYNIQPRMEHYGCMVDLLGRAELIEYVSKKITELEPFNSSYQVLVSNCSALEGRWDGVIDARTSMRNWGIEKVPGSSSIQVGSEVHEFLAKDTRHKRRKEIYETVDGLMALMRHTEQAHWDLFVARYWGYSMLDRATTVNMGKGDLPIVLQLYQEDHRSFDHQAAVRGLKLISPSNSCQRWEQGQPLDKLVVTTHKSHHHPGVYRNQRSPHKALIRSILAYWDTRNTWNHFHLVHSETCPALSPLLPKAGAGGMKLGDCCLEGPRIRWWLNYPGVHSEI

SEQ ID NO: 165815 - protein, 97 aa, Oryza sativa
  Clone ID: PAT_MRT4530_64585C.1.pep
GAVEGYRIAGGPLGEVGDPLYPGGRFDPVGLDDDPEAFAELKVKEIKNGRLAMFSMFELFVQANVTGKGPLKNLDNQLGEPVNNNAWAYSTNFVPGK

SEQ ID NO: 165816 - protein, 117 aa, Oryza sativa
  Clone ID: PAT_MRT4530_64586C.1.pep
IPGGQRPKEITGGGWRSAGEACSGRQWHSLAAAVLAGEDNDAEPIKDEEAEAAFAHKDATWIQHRIFHSRTPSSRGAWDAVAGTGDGGYGGLLRCGDKDSGWDVAVRTVAGDSAAYT

SEQ ID NO: 165817 - protein, 104 aa, Oryza sativa
  Clone ID: PAT_MRT4530_64587C.1.pep
MGGDRLLDTFLCLADAHGSFQETVATLKQDVAEALVTICRRNDARLASAVHLQRKAGKKLAYLAAAARDGARPSRLGLGRNSTEVEVTGLLSESAAPSPSPEKI

SEQ ID NO: 165818 - protein, 46 aa, Oryza sativa
  Clone ID: PAT_MRT4530_64588C.1.pep
PRDTERGHINERVIRPSLSHAVFLFISTRRITQILRGRRREKTREP

SEQ ID NO: 165819 - protein, 470 aa, Oryza sativa
  Clone ID: PAT_MRT4530_64589C.1.pep
MDGSNAGALPGGASAAWSCRQRRTAAGAMGGYELVRSDDAAAAGPPDLELGGSGSCNGGGVSAKSRPPSSPPSQGGARQRLVSLDVFRGITVLLMIIVDDAGAFLPALNHSPWDGVTIADFVMPFFLFMVGISLTLAYKRVPDKLEATKKAVLRALKLFCLGLVLQGGFFHGVRSLTFGVDITKIRLMGILQRIAIAYLLAAICEIWLKGDDDVDCGLDVIRRYRYQLVVALLLSTMYTVILNGVYVPDWEYQISGPGSTEKSFSVRCGVRGDTGPACNAVGMLDRTILGIDHLYRRPVYARTKQCSINYPQNGPLPPDAPSWCQAPFDPEGLLSSVMAIVTCLIGLQFGHIIIHFEKHKGRIINWLIPSFSMLALAFSMDFIGIRMNKPLYTISYALATSGAAGLLFAGIYTLVDVYGFRKLTIPMEWMGKHALMIYVLVACNILPIFIHGFYWREPKNNLLKFIGVGA

SEQ ID NO: 165820 - protein, 101 aa, Oryza sativa
  unsure (1)..(101): unsure at all Xaa locations
  Clone ID: PAT_MRT4530_6458C.1.pep
VLGFFFFFLFFFFFFXKEQVQRIFWFNQTSFCWFNLEHPPVACLEGAPWKNTIFGGNLYLTPFRAFFPTKIQKPHIFFAQLKFCLIERAWGGEEKISRKKD

SEQ ID NO: 165821 - protein, 122 aa, Oryza sativa
  Clone ID: PAT_MRT4530_64590C.1.pep
RVTTSSTVAEWSRGCSTVSSEDGAATRKLWTHDGCEWTASAGWMGSSRDGQRCRYATEKARPGRSRSTRWPAVDGGLDAPTVFPGSEDGAWLQDSGVAATDDDEICHDGWQAATVEKRCGTA

SEQ ID NO: 165822 - protein, 64 aa, Oryza sativa
  Clone ID: PAT_MRT4530_64591C.1.pep
MIRDRGRESFKEALGKYILLVGCVEHPVKAFQRWVQPTIRPGEGATIRVKVSDHHPRSRMAASD

SEQ ID NO: 165823 - protein, 307 aa, Oryza sativa
  Clone ID: PAT_MRT4530_64592C.1.pep
MGGCEVNLERHGLVPVGTGSGRDTLCDVSSFTVRLHRLFGVIFLNDCRDCVTVFVSSASSRTLLPDFGYNDHGYSTHGFINYGSLAPFALATLTTQRAGNHLFKYGDLMVTVTEATYGDLMVTVTEATATSKKVQVQGAAMANYHHQEYYQMAAAAAVAWPREPDSPQLSIMSGCSSLFSISTLRDDDDGGGVRLAGAALPATPVSLAGIAGGASTPGGDEVDMEVRQQSGGSGDDRRTIRMMRNRESALRSRARKRAYVEELEKEVRRLVDDNLNLKKQCKELKQEVAALVMPTKSSLRRTSSTQF

SEQ ID NO: 165824 - protein, 43 aa, Oryza sativa
  Clone ID: PAT_MRT4530_64593C.1.pep
MIDHRNGFHGAFQRRITRERKYMFADRQRGDFGKWVATNVTET

SEQ ID NO: 165825 - protein, 544 aa, Oryza sativa
  Clone ID: PAT_MRT4530_64594C.1.pep
MQGAITRARLQHRPARFHRAPYRCIPVTTTTCLPERRVHRGGGVQWCGSSAATGERARAVSEVRAAGARGGDARPPPQGEGDVAAGVAEAPSSGGGAKRGSVVGAAALVVGTSIGSGILAVPQRTAPAGFVPSAACMVTCWAFLVIEALLLVEINVHLRRKKGKDAGGDGDGGGGGQLEVISLKSMAQETLGEWGGNLAAAAYLFLSYTSMVAYTSKSGEVLSSVVAGVPEPVSGCAFTAALALLIAAGGTGVTDKVNQLLTFVMIGLLLTIEVSAVAFGAGLTLPANTNWEQVPATLPVIIFTLVFHDIAPVICAYLGGDLVRIRLSILVGSIVPLLSLLVWDDIALSISTDLDGFDILDMLNTEWSYTVVETFSLLAVGTSLIGTLLGASQFFIEQMTNLVSSSAQGHEEEALRHRGAKTAVDNNRLSYIAAGAVVAPTVLIAATVPNSFSIATDIAGGYCMTILYGVLPPLMAWAIASRMSDSRAGSVEAESSVAGGSGNVDLTSAKPVLVGMGVFSVLMVFEQMSQDFVSFQSYLLAWTG

SEQ ID NO: 165826 - protein, 117 aa, Oryza sativa
  Clone ID: PAT_MRT4530_64595C.1.pep
MGIDKYDGKTRDRLQQTLQTLHYESMTTGPRRSLHIAIAHPFFSHSGAQEQAASGRQRRCSLSLCPAAAATGEQMTGRRKGWGRWRPEAEIFTTAATAGLGSDRAAASDVEVAAARG

SEQ ID NO: 165827 - protein, 94 aa, Oryza sativa
  Clone ID: PAT_MRT4530_64596C.1.pep
TFGFFRKKAGAADKPAVGPSARAARQCKEKKQMSGKNLQQQTTTLPSSSYSSCSLHVHSINLSLSHFLGPWHLSATASMASNPATLSLSLSLDL

SEQ ID NO: 165828 - protein, 426 aa, Oryza sativa
  Clone ID: PAT_MRT4530_64597C.1.pep
MVSMRKKKKAFAVAAATTLLSPPRSSSSSSSTASSCIVPPRTESGKKKSKHRKRAKDGTGGDDDDAAVAAAPRKGSSIYKGVARHRGSGKYEAHLWDKQGWNPNQTRKRGRQGAYDTEEAAARTYDLAALKIWGSDHVLNFPIDTYRKELERMQRMTREEYLATLRRKSSGFSRGVSKYRGVAKHHHNGRWEARIGRAVGKKYLYLGTFDTQEEAATAYDLAAIQLRGRSAVTNFDASCYTYTDHLPPPPPPQPPSVCKTEPELEPPQPAAPPGSESLLRPKMEPCDDWEPPAICPSLRDADDADHAIAEILPALCMDRADFEARYPARRARDAAADGWSTSSDDVAAASVDDDVLRSLPDDVGFVDDVESLFLDAPGPAAAAAAAAMPDDVERAVQRAPSAASRRANAAAVSYAISSLASGRWWY

SEQ ID NO: 165829 - protein, 125 aa, Oryza sativa
  unsure (1)..(125): unsure at all Xaa locations
  Clone ID: PAT_MRT4530_64598C.1.pep
GEGRRCRTPGTAPHRRCPYRXPASLLRPNMGGRGRGEPPPAAPRAWSPPPAAPRASSSPPPPPSRAVVAAVAPLASPSLLRPDLGGRGRGEPPPPSPPRRCMESPSLPRRRSHRTAGEERRVSTA

SEQ ID NO: 165830 - protein, 59 aa, Oryza sativa
  Clone ID: PAT_MRT4530_64599C.1.pep
KKPSLKIWKLDPKRFKGRGNTGDSPSDSPQSKSPDKRPKNPPNGLKSKTGLRDLPPGTD

SEQ ID NO: 165831 - protein, 603 aa, Oryza sativa
  Clone ID: PAT_MRT4530_6459C.1.pep
MEKAVITAFVNTVMPPLFKVLSGSCKMVMNVIDDSDSMRRKLVLLAASMDDDLRRTKNPTAAAKVFGDQLRELTHDMEDCIERFLHRVSCAEGASRARRLGRFLLTICTRYRFGDKIKALNRRLEELTNERLCQFVYDKPPPPPPLAPAAAQQREHVQLNPVGVEGAKGDILAMLEESPEELRVIAIVGFGGSGKTTLAKAVFRSTDDDRIRVFRSCRAWVDRAKEKNAGEIFRSLLQQFGYRGQGLLVDDEQYLQAQLMDYLRGRRYLIVIDDIGNGQWNSIKSAFEENSRNNGSRIIVTTTIKSEANTCCGNGKGFIYQMQNLEDQYCKTIALGEAPSPELQMGSEELLKKCDGHPLSLVCVANYLGGLNEPTGQRCRELCRYLGSKIHDNGNFERLKGVIMDNYTSLSNHVVRACLLYLSIFPNDVPLEKKVIIRRWIAEGFARSEDVDIDDQTIARWNFETFVDWDIFHPIIDTSNNGDVKMCKTRSIVHEYMLYKASRLERFIMSFPDWRRKVRHLCIDHRTPHKRRTTTDMDLSCVRSLTIFGTAGDTICEFHRYKVLRVLDLEECNDVKNKHLKNIHKLWNLCETMCGYSSFVMGN

SEQ ID NO: 165832 - protein, 48 aa, Oryza sativa
  Clone ID: PAT_MRT4530_645C.1.pep
ISNATRHLTGVYKKHMGIQHHTHTPLTDIRWHKNLPNQSNSTPNKLCH

SEQ ID NO: 165833 - protein, 357 aa, Oryza sativa
  Clone ID: PAT_MRT4530_64600C.1.pep
MMAPSRPMASAVLLVVCTLMMAADAYYDNNGGGGGDDSVTMQMFEEWMAKFGKTYKCHGEKEHRFAVFRDNVRFIRSYRPEATYDSAVRINQFADLTNGEFVATYTGVKQPPPATHPHPHPEEAPRPVDPIWMPCCIDWRFKGAVTGVKDQGACGSSWAFAAVAAMEGLMKIRTGQLTPLSEQELVDCVDGGGDSDGCGGGHTDAAFQLVVDKGGITAESEYRYEGYKGRCRVDDMLFNHAARVGGYRAVPPADERQLATAVARQPVTAYVDASGPAFQFYGSGVFPGPRGTAAPKPNHAVTLVGYCQDGASGKKYWIAKNSWGKTWGQQGYILLEKDVASPHGTCGLAVSPFYPTV

SEQ ID NO: 165834 - protein, 86 aa, Oryza sativa
  Clone ID: PAT_MRT4530_64601C.1.pep
MDSFSSPSSAGSTASTEHLMEQIKAQLAQAYAQEFLETVGNKCFAKCVTKPGTSLSGSESSCISRCVDRYIEATGIVSRALFSSQR

SEQ ID NO: 165835 - protein, 35 aa, Oryza sativa
  Clone ID: PAT_MRT4530_64602C.1.pep
SQCIGFSTTNYKWVIPMVQQINAVATNYLNLHKRA

SEQ ID NO: 165836 - protein, 385 aa, Oryza sativa
  Clone ID: PAT_MRT4530_64603C.1.pep
MERVLMACLELDSSQFLLNGDGSVIGSPFDIQLECNSFTGSKAVQDHSRYTLPSQCTNAPDPPPLPGTSYGTHRTSRNAKACRCVPEEIQDFWDRMFFEAYQYDLRVLTEDGNEIMSHSCVVGIKSPVLRAMLEEAKVQGGIRHILIPGVPSEAVHVFIRFLYSSRFEQYQMKRYVLHLLVLSHVFSVPSLKRVCINQLETSLLSPENVVDILQLARLCDAPRLSLVCTRMIIGDFKAITQTEGWRVMRQANPSLEQELLESLVEEDTKRQERARRLEENKVYLQLHEAMEALIHICRDGCRTIGPRDQTLKSSQAVCRFPACKGIELLLRHFSACKMRAFQGENATSEQKGGGQVESFGVQGVGEQSNNQFHLRKEKISIPENI

SEQ ID NO: 165837 - protein, 453 aa, Oryza sativa
  Clone ID: PAT_MRT4530_64604C.1.pep
MARPAATAAAPKAPPPKHLIALAVVAILGLVLVADFLWASSSPAAPAWSSRIDLPGRPAALVPPSGKKQTKEKISIGSTDINATFADLPAPELQWEEMAEAPVPRLDGAAMQIKNLLYVFAGYGTINHVHSHVDIYNFSDNTWGGRFDMPKEMAHSHLGMVTDGRYVYVVTGQYGPQCRGPTARNFVLDTETKEWHDLPPLPVPRYAPATQLWRGRLHVMGGSKEDRHEPGLEHWSIAVKDGKALENEWRSEVPIPRGGPHRACVVANDKLLVIGGQEGDFMAKPGSPIFKCVRRSEVVYSNVYMLDDGMKWKEFPPMPKPDSHIEFAWVNVNNSLIIAGGTTEKHPITKKMVLVGEVFRFNLNTLEWTVIGRLPFRIKTTLVGYWDGWLYFTSGQRDKGPKDPSPKKVVGCMWRTKLHLMTDFYAILYRESEIIDLLFSDWSVTDTFALELL

SEQ ID NO: 165838 - protein, 36 aa, Oryza sativa
  Clone ID: PAT_MRT4530_64605C.1.pep
MGHLTHSFCRFYILPLELLMLHNNFILVGLPHIQLN

SEQ ID NO: 165839 - protein, 281 aa, Oryza sativa
  unsure (1)..(281): unsure at all Xaa locations
  Clone ID: PAT_MRT4530_64606C.1.pep
CVVERRGGTRARLLAWPGRRRAVDYSIPLASVHRXSGEQVSGTSAFDVLHXEKAAIRFLGSASRDCSLFVCDGSPSSPLACCAPLSTLATASISCLESATSVTISVSTVVLFLAVPLTPPTQRGFRRPSISFHRLDPLADALSSQRSSSRSVVGGRPEEKPPSLRGRILPLEKSWSAAIMGWLPTENSKLISSSWHRRFIARFCTGGGGSTTKSLEKEMRGPSAGGWPPPNAAPPSGLYMLMHAILTLWWWSWPLLARFCSLSCSPFSTVSSIRFELRGWR

SEQ ID NO: 165840 - protein, 229 aa, Oryza sativa
  Clone ID: PAT_MRT4530_64607C.1.pep
MMAIANGSLALALIGVITTGIVAVVTIVAIYKCAKIAIKMWYSSSRDHHTPIANGGGSSSSRGGIGGADADVVEMGSMSHFIEGLQNERPVRFSARQLRAFTKSYAHKVGSGGFGVVYRGVFPSGAPVAVKVLNSTLGKRAEEQFMAEVGTIGRTYHINLVRLYGFCFDADVKALVYEYMEKGSLDRYLFDSSPSPAAERIGFEKLHEIAVGTAKAVRYLHEEYAQRIK

SEQ ID NO: 165841 - protein, 74 aa, Oryza sativa
  Clone ID: PAT_MRT4530_64608C.1.pep
FPWIGFYFSGSFPKDNYVAFIFIEKSLSNFGEMPLRPPGPPRINADNTPRAQTVRIMPGFVFSFVFRVCLKFVI

SEQ ID NO: 165842 - protein, 428 aa, Oryza sativa
  Clone ID: PAT_MRT4530_64609C.1.pep
MASHGKASLALPCALCLARALDFKGFWESRFGGKKEQEPEQNGHANGVANGSVRKRTSDLAVYEQFEQQVFLDRRLVSCVVLDPRSVLLFQARQTEVRAAAIRDGNADAIQKPLLPSFESAEMRNLAETLLRDIIRGSPDVKWESIKGLENAKRLLKEAVVMPIKYPKYFTGLLSPWKGILLFGPPGTGKTMLAKAVATECKTTFFNISASSIVSKWRGDSEKLVKVLFELARHHAPSTIFLDEIDAIISQRGEARSEHEASRRLKTELLIQMDGLTKTNDLVFVLAATNLPWELDAAMLRRLEKRILVPLPEAEARHAMFEELLPSTTSKLEVPYDTLVEKTEGYSGSDIRLVCKEAAMQPLRRLMSVLEARDELVPEEELPEVGPLKPEDIEVALRNTRPSAHLHAHRYEKFNQDYGSQILSQEQA

SEQ ID NO: 165843 - protein, 161 aa, Oryza sativa
  Clone ID: PAT_MRT4530_6460C.1.pep
RKLGEVHLTGVTKFQERLPGKPTNLRQKEFPSKKLENWLTGLNFKKLVHLHWGAWFGRFPGRRRNGAPRNKGNFQGVCGGPNLPELRPFGIPNFKAIPTRALSWVHPFLWKGPGGQEYPMGIALPLYLPRCSKKSYTPTGAYYGPIGAIYGTAVGSTRGIP

SEQ ID NO: 165844 - protein, 35 aa, Oryza sativa
  Clone ID: PAT_MRT4530_64610C.1.pep
MADPSPGGRRRRIHGTIGHKGSVNERAMKTSTSTA

SEQ ID NO: 165845 - protein, 56 aa, Oryza sativa
  Clone ID: PAT_MRT4530_64611C.1.pep
LVQLLLEINMEGLKILQIDYETLETRINGGFSLFRPFDEALEGGENHEAVVKGITD

SEQ ID NO: 165846 - protein, 344 aa, Oryza sativa
  Clone ID: PAT_MRT4530_64612C.1.pep
MESRKISKIVLKGQKIRIDEIFRDTRKDTNIAMPSAKSELLQNECIVVPIALDTNILQASETNQECSIGKAPIIYEDENNKGNDNGATTTQEDRMNISNYLSSSSSCLNELQVGLQEGECCSFSTTKILGSNHMVIKKCSAQDVVIDKDKYNTLHDKVKLRTVSNQEGEDDEDTTSSDITMTILCINQPKSVQLLWETMNIFGSVIESLVNLKSLALAAGFLNGTSSTAHFSSATTRMSWQMCTPPRLLQRIDLSPHVCTFSTLPNWIRELGSLCILKIAVRKLGDGDMDVLGGLSELTVLSLHVSDAPEERIIFHEAGFPVLSYLKLRCSVANLAFDERAMPR

SEQ ID NO: 165847 - protein, 148 aa, Oryza sativa
  unsure (1)..(148): unsure at all Xaa locations
  Clone ID: PAT_MRT4530_64613C.1.pep
MAAHFLWVFGCWAGVGWGGPKRNILLRCWMGGSDRFARIQPPERPGKLGKRGRRSRHPRAREGGGRRASWPAGCXTVAGAGAATGSGSXAARRRGGGGEPEGGSSGRREGDDGGNASSAAAGGKLGSGAGCELVGGGRRARQRRQMRA

SEQ ID NO: 165848 - protein, 51 aa, Oryza sativa
  Clone ID: PAT_MRT4530_64614C.1.pep
VMIIVTFFISGFFFFLFHKDLTTWHLMDNLIGTGILETLLNLNDTRGPGDR

SEQ ID NO: 165849 - protein, 70 aa, Oryza sativa
  Clone ID: PAT_MRT4530_64615C.1.pep
PRVRPRVRSSHLHLMLFELVKNSLRAVQERYMNSDKDVPPVRIIVADGAEDVTIKVFIYYITKHLLLIAS

SEQ ID NO: 165850 - protein, 68 aa, Oryza sativa
  Clone ID: PAT_MRT4530_64616C.1.pep
TTTTKNRSPRCAITPQNDQETTKKTRPKKKNKSSPLSTPHDMRESLLASEKITLSWSCLSRTPARIWS

SEQ ID NO: 165851 - protein, 300 aa, Oryza sativa
  Clone ID: PAT_MRT4530_64617C.1.pep
MRIMVRTLRGDRVALDVDGATTTVAQVKGMVMARERIAVAMQRLFFAGRCLDDDHRTLADYGVRHDSVVFLSLRLATDAYQTEMHNVRLMQPETATAKQEMHQQQQQQLHVHVAADDEEKAIKRKPVSRRALRKILSRLQVDAWTSQHDAKFLDLLLRHTGGGGGARNVGELTGEDWSSIRAELNAATGSGFPVEELQRRLGEFRREFEAASRIKNHPRFSYDPRRRVVVAKQADWKNYILENPEAAAYEGRSPRHLGRLRAIFSGDGGGGGGGGAKCRETKARSCLRKLLRNFRLRFKL

SEQ ID NO: 165852 - protein, 55 aa, Oryza sativa
  Clone ID: PAT_MRT4530_64618C.1.pep
EHQLGLVVLGLVLHLLGVLPSLTLVLRHGWATGGGSLLPLGVDAHAKPSRFVRAK

SEQ ID NO: 165853 - protein, 158 aa, Oryza sativa
  Clone ID: PAT_MRT4530_64619C.1.pep
GVCRVAARWWWWWVGRPSEGVVARHGAAASWGRGERWSGARRGRGGVGVGVGVCRVGSGWGGGGLVGGWTSLSASAFRFRRADAVRCDAPVAFSNGEEPRRLVCAPSRPVNLRWRPISPANLFARRGGYGLRPPRPRACRAGVAAFGFAVQLGPIWKR

SEQ ID NO: 165854 - protein, 101 aa, Oryza sativa
  unsure (1)..(101): unsure at all Xaa locations
  Clone ID: PAT_MRT4530_6461C.1.pep
PAHTTQLVNKSSFVRTREACLHLIAFIGHRLSSQTNTSLFCTLCPHSCAPGNNFPVGHPSQIAPSQARLTLEFFGDRLXENKLQLIDISILLINLSPRQNT

SEQ ID NO: 165855 - protein, 54 aa, Oryza sativa
  Clone ID: PAT_MRT4530_64620C.1.pep
LRYSIPEGRPRTRPWRRRRQRRRRRGGGRLGVLEPGAHFVFLRLNYPYPAKPTH

SEQ ID NO: 165856 - protein, 50 aa, Oryza sativa
  Clone ID: PAT_MRT4530_64621C.1.pep
QRLPLAIGNAITARQGAHTVQHSSASSLSLGYKDASRPSDGPVRNCRRRS

SEQ ID NO: 165857 - protein, 398 aa, Oryza sativa
  Clone ID: PAT_MRT4530_64622C.1.pep
MRPPPRPRRPVPARLVAAAVLLSALAGGAAAGAAIAGDGYGRGRRLYMRNKVLEMFYHAYDNYMTYAFPHDELKPLTKSFTDSLSELGNLNLEHLPNDYNGSALTLVESLSSLVVLGNLTEFERGVLWLSENLTFDVDARINLFECNIRLLGGLISGHILAKEHSSHLKDGPYQDQLLHLAENLGSRFLPAFETPTGLPYAWINLKYGVMENETTETSTSGCGSLILEMGALSRLTGDSRYEAAALRALRTTLDVLTGKWIEYSSGIGAGVDSFYEYLIKAYVLFGSEEYWDMFHSAYLAVQKYFRHGPWYHEADMRTGEATHWQLTSLQAFWPGLQTLLGDVAAANISHREFYNVWQRFGVLPERYLLDSGMLHITQNDYHGSCAYARSIVYIYQAT

SEQ ID NO: 165858 - protein, 109 aa, Oryza sativa
  unsure (1)..(109): unsure at all Xaa locations
  Clone ID: PAT_MRT4530_64623C.1.pep
FIFAAMDQSWMYGKTVKHHSKEYRNGALNFINATEEDWKRRNNDYMCCPCADCKNENMFDSRVDVHAHLIXRGFMEGYTCXVKHGEQESGSGAATDRSGAQNQEDEDEH

SEQ ID NO: 165859 - protein, 65 aa, Oryza sativa
  unsure (1)..(65): unsure at all Xaa locations
  Clone ID: PAT_MRT4530_64624C.1.pep
GGSFHSDSSLLDDAFHRRXIVRRQATGMYAAEFFXDFAESMVKMGGVGVLTGGEGEIRKKCYVIN

SEQ ID NO: 165860 - protein, 70 aa, Oryza sativa
  Clone ID: PAT_MRT4530_64625C.1.pep
VLMRPSKCEIYRVAIWWYSSRIWIITCESRYGPRAWARPTIRHRQKRNSYMQTVRCYQRLLRPIPSRTSR

SEQ ID NO: 165861 - protein, 83 aa, Oryza sativa
  Clone ID: PAT_MRT4530_64626C.1.pep
MAIRGMGFLVVLWTTFILLGGFVSMLEKDFWSLTVITLAQTTGTDVRDSRTAVTSKSDREGQNNKDEVMGVVDWLTTTVFRSH

SEQ ID NO: 165862 - protein, 101 aa, Oryza sativa
  unsure (1)..(101): unsure at all Xaa locations
  Clone ID: PAT_MRT4530_64627C.1.pep
AEVTYLGQLHHENLVKLVGXCSDSDSNKLLVYEYMLRGSLENHLFRRGTQPLSWAMRVNIAVDXVARGLSFLHGLENPIIFLDLKSSYVLSRSLLSVPFLS

SEQ ID NO: 165863 - protein, 92 aa, Oryza sativa
  Clone ID: PAT_MRT4530_64628C.1.pep
MACHCHRPHPYPPSPQLIVRATSSAGLLDTLHKLRNVAAESKRNRKLLAAIPGMVGYWTCQCLLATYRATAHEPGDHTPPSLRLPSRVRRRL

SEQ ID NO: 165864 - protein, 59 aa, Oryza sativa
  Clone ID: PAT_MRT4530_64629C.1.pep
MNSTPHHGRCLLPELCCPPTFAPTSLATTKSTASVVIRDVIAVNVVVVVAESTMVEVGG

SEQ ID NO: 165865 - protein, 59 aa, Oryza sativa
  Clone ID: PAT_MRT4530_6462C.1.pep
MGLSQVKVEANPMNNRRFSLTLKKEEDLSPLGKYATLVDSNTNEEPRTSLLDGTRQSNL

SEQ ID NO: 165866 - protein, 105 aa, Oryza sativa
  Clone ID: PAT_MRT4530_64630C.1.pep
MTGEKGGRRRRRRQDAGEGEGVAAWARSRMETPAAARYNFMVLLLALVHVNSTIRNDGEDPKGRGFPRDECPRGRIDAHHKFTVTIGDGVSVAKAQRLWTVLVGP

SEQ ID NO: 165867 - protein, 88 aa, Oryza sativa
  unsure (1)..(88): unsure at all Xaa locations
  Clone ID: PAT_MRT4530_64631C.1.pep
FAPSAAVGSGXALPFSSCPFVLSGCVXLVFXXXSXXRLVLLSLVGLGRSVASPRCXVFXXXWXXXLGVDVAPESIAPFVVXXWGFAFD

SEQ ID NO: 165868 - protein, 211 aa, Oryza sativa
  unsure (1)..(211): unsure at all Xaa locations
  Clone ID: PAT_MRT4530_64632C.1.pep
GPKXXXGTRNXPXXGGKXGHPALXXXXXGXQXGXAQRXXXXPXXXGXFXXXXGXXGKXXQNGKPXFXNPLEWPRGRKHPPPPFGXKIXTERGXPPFPWVXXWXNRVFPLGRRESTPXFRVAGEGPPRGLVERSQLRGRRAAVFXXXNVXXNNXNXWAKSRFAPNGWPQVEFHXGQAKGKTPLAQGRAPNVRASXFLGEEVXVXLKNXPPPN

SEQ ID NO: 165869 - protein, 83 aa, Oryza sativa
  Clone ID: PAT_MRT4530_64633C.1.pep
TYHLKEKKKVFYAFSSKRPINNNLNACWWNKRSGWELITTIHYGFGLACTQSQQLPVDMPFLKQMWLHLFYNKNCKVTWPICE

SEQ ID NO: 165870 - protein, 471 aa, Oryza sativa
  Clone ID: PAT_MRT4530_64634C.1.pep
MLLEIHANVVHASGLAVPRHTRRQKIRIGFNVFTVAVKIGRKKEIVTLPVCHLPSSTRASTIAFQIKSSTMFGTPSSTLYEYYTGVGVVILSKAVSVTEERSHHHRLDAENQPRRDPRSPVFLVTIMLIKRQPPLIKEQAMEESNDQGLAQKSTAPTGFFRVPGLFVRLSSKGLNAVDPDSAWSPTSPLDFKNLSSSTGSTNLKSSGLLGVEADQKFRTNPPRVGLGLVDALTADESSSCLGVTSSFLDSIRPFLELGLPKAASDAAMQKNGSGSVTLDEIADFALSEEYTCVIEHGPNPRTTHILGDETLEVCKGVPRSSKKSIFTIEPIGELPSTLACAVSRSCCYCRKRLQQDRDIYMYLGEKAFCSNECRRDYIDEEIEEVEELMMLDSAGSSALLACIFLSFLVGSSFYFLNLPSVRLPIMPMFDDGSLCPSSSEKESLEVFCASGSISSGLAPYSKGLEGIQWAM

SEQ ID NO: 165871 - protein, 61 aa, Oryza sativa
  Clone ID: PAT_MRT4530_64635C.1.pep
RITLGEGLVCNTLSTKTMVQFEFSCTKCRQQHKQLISMIILIRTILHLIIHHKQLYHILTR

SEQ ID NO: 165872 - protein, 377 aa, Oryza sativa
  Clone ID: PAT_MRT4530_64636C.1.pep
MAVGLHVALMHVALDVTDRTCFMDFVQSVVDKYPPGYLEVAHVQHYDVLKTFPEVNSDQELLVMFDLHNKKKVVEMFIVYSDPSEPFKPINEWEFEEEEQPDNNIEPDGDNYLSNPNPLNEHVGVDEETKLKGSIIEGYKTEEAIEFYMDYMYETNLIGVPRPYADITRSASELVHLPSAITSSDEFKPRHGGTNSRRSLTTITPNVAIGPIDPLRHSDKPPRNPREFRLGMPRADKGLESTTTAIASSWTRRPSQPKEQRNTPAAAIEVRVQPDFTTSERLYSLARVQGNSPRENKKVESESPKISHLSSLGGAKPRLNPTARDHIRALKHDDIPDNVGSGCRGWQSRSDHRGIKASALLDVLGIKISMKEKQATN

SEQ ID NO: 165873 - protein, 120 aa, Oryza sativa
  unsure (1)..(120): unsure at all Xaa locations
  Clone ID: PAT_MRT4530_64637C.1.pep
SCLHKLRRTLGLLSSRPIRSRRSAXSHGEITDTSFVVVSYLCLVLLFVFLRLFQAAPPNSPARGGTKAGVWVATTLLTVXFSWRVSAXTPWPVDVIVWLMAXFTDLGGFYTLXLHRAGGD

SEQ ID NO: 165874 - protein, 97 aa, Oryza sativa
  Clone ID: PAT_MRT4530_64638C.1.pep
HFHAVSLPVPLYGPSFNLTPYRVIWSPSRIRFVISGYSLAPHVVMFAYSLVQCPEGSVLVPMLGVMALHVSGLHCQCLLCPKSHFPLFSANIVIKPV

SEQ ID NO: 165875 - protein, 97 aa, Oryza sativa
  Clone ID: PAT_MRT4530_64639C.1.pep
APFKKRPVICLVLLIKMDFSDSIGGEYFNPLSNQNADDDETTRDATPRNIPNLCPLPTTCSSHSCTSDYPVSKGHQNVPLESYNTSSLFKIIYFNKS

SEQ ID NO: 165876 - protein, 214 aa, Oryza sativa
  Clone ID: PAT_MRT4530_6463C.1.pep
AAGSARGHVLVDPRQYGVLMESLCAGGKCDGAVEVMDELLEKGTLLSPKSPVLEGPAYNPVIEYLCSNGNTSKAETFFRQLMKKGVDDKAAFNSLIRGHAKEGVPEAAQEILAIMTRRGVRTDPESHALLVDSFLKKNEPADAKTALDSMMEQGHVPSPSLFMSVMVALFNSGRVQTASRVMKSMIEKGVTENMDMAHKILEALFMRGHVEEAI

SEQ ID NO: 165877 - protein, 105 aa, Oryza sativa
  Clone ID: PAT_MRT4530_64640C.1.pep
MPLISERHSKKDCCLPYCQKAAPCGRIHCPYLTTTAAAKPDGGTDHKRKAVIVSSAQPARAERTTTGESSKRKGQGGEALNVHGAIASSAGGDHARKRFRMWGLW

SEQ ID NO: 165878 - protein, 44 aa, Oryza sativa
  Clone ID: PAT_MRT4530_64641C.1.pep
SQECTKYINCQFYMNLQSPMRNCCRVLSSPKGQEGNKTMTLVRG

SEQ ID NO: 165879 - protein, 164 aa, Oryza sativa
  Clone ID: PAT_MRT4530_64642C.1.pep
MSGSSVYPEADSAVQLDDLTCGDENMLAMFNVLKNKKSARLENLVLARNSFSRTVYNINTLSNLVYVGRVQITVDGDGRHIVYPRNAPTAEDIASGKMMKDMVVDGEELMHGPQLTTHGTNASNTPPIVVIQDEEAAATTSCEKMEMREARHKLNRSLFQDDDK

SEQ ID NO: 165880 - protein, 121 aa, Oryza sativa
  unsure (1)..(121): unsure at all Xaa locations
  Clone ID: PAT_MRT4530_64643C.1.pep
FFFFFFLXDIFLSPHSRLTPLINWVRGDIPHRGRQQFGFSTKHCACTRPALTRGETWPIGSNPRPPRQHIKQQHTINSIAQQQVFFFSWAHTSPISHLAHTPTEGAYPLTGGVIIIHTQGL

SEQ ID NO: 165881 - protein, 181 aa, Oryza sativa
  Clone ID: PAT_MRT4530_64644C.1.pep
MSGSSVYPEADSAVQVYPEAELDDLTCGDENMLAMSNVLKNKKSARLKNLVLARNSFSITVYNINTLSNLVYVGRVQITVDGDGRHIVYPRNAPTAEDIASGKVKNIHFIMRTDFRDWQMMKDVVVDGEELMHNPQLTTHGTNASNTSQDEEAAATTTCEKMEMREAHHKLNRSLFQDDDK

SEQ ID NO: 165882 - protein, 87 aa, Oryza sativa
  Clone ID: PAT_MRT4530_64645C.1.pep
LVMTVIIFITTLRVLYCFKFFVISSLFMAHHSTFFILRFNLLLAIIKDYQFFVGCYNGVDPPVSCFLFLFLYLVYSYRLYQFSVSFL

SEQ ID NO: 165883 - protein, 42 aa, Oryza sativa
  Clone ID: PAT_MRT4530_64646C.1.pep
AQEFLKLLKCCYCAYIALLTLDAALNAFGCFPTWINAYLFGL

SEQ ID NO: 165884 - protein, 149 aa, Oryza sativa
  unsure (1)..(149): unsure at all Xaa locations
  Clone ID: PAT_MRT4530_64647C.1.pep
LIAAKKAKTKSTSYEIDNDFVTSRSKRDGNKRSRESTDADNSEEEPTSDSELDAQNRKQKAVTESPANVRSEPLTTRRRALQSWMDGNSNSAIEFPDGLPPAPSRGKKDKLSDAEMLAKKAEAAQRRKMQVEKATKESEAXSYRKILGL

SEQ ID NO: 165885 - protein, 94 aa, Oryza sativa
  unsure (1)..(94): unsure at all Xaa locations
  Clone ID: PAT_MRT4530_64648C.1.pep
RPSPVRRKWRAPGGQRRRAVNGPVPGVAWPSPAWQFPPRAPEAAXPGAGGNQSAWEPSSRPGERAGSSTVPARGPAGRGPCTRPRRGHGAGGPR

SEQ ID NO: 165886 - protein, 61 aa, Oryza sativa
  Clone ID: PAT_MRT4530_64649C.1.pep
MTNMKMISPIRADEDVSGVNSRVIADDDDEVTYQQLRSRPTVKIIVELGVEAVGDASLGGK

SEQ ID NO: 165887 - protein, 101 aa, Oryza sativa
  unsure (1)..(101): unsure at all Xaa locations
  Clone ID: PAT_MRT4530_6464C.1.pep
MSMVVMVNIVVVMMVAAVDSSFIVVSLPMFPXLCXSAFFLFSSAAGIWPFFPLGSSLXAALSVSSRPRCVRRCVSWLPAFLARLLLLLSGRLGLPLLGPFP

SEQ ID NO: 165888 - protein, 81 aa, Oryza sativa
  Clone ID: PAT_MRT4530_64650C.1.pep
ARGCCTRPPTPLTMPQKTPTVVGRLAPTRRQPDLHRGAPIRPRARPGVLDVQGSLGQAGGAEEDALGTTTTGPDRFVLDFE

SEQ ID NO: 165889 - protein, 135 aa, Oryza sativa
  Clone ID: PAT_MRT4530_64651C.1.pep
MEGKASHDNGATDVRGSITGSSFMGGSVVGSPVTTMSLLHALTLRGVEVVGFGGGHETGRSAAVGLGRGGFSCACLKSLKDDGDGLSRGGSAMLVWVREEEEEAMKGFEGLLIVDVRDGELVVEVAQVASTSQWR

SEQ ID NO: 165890 - protein, 62 aa, Oryza sativa
  Clone ID: PAT_MRT4530_64652C.1.pep
QMSFGSIQYFNIQVKQDGDAIEGRFAFLRQVIDMLPLTFVSQYLSLGITIDLLSLCKVWFEI

SEQ ID NO: 165891 - protein, 64 aa, Oryza sativa
  Clone ID: PAT_MRT4530_64653C.1.pep
LKLGKVENDIKVNRPDKSDLGFKTKTQVDWANTLAPRHLSYALNYSRFPCMKNMFFFTPPIFKF

SEQ ID NO: 165892 - protein, 116 aa, Oryza sativa
  Clone ID: PAT_MRT4530_64654C.1.pep
GPRVEGGRRGVGVGIRRVRLRWKAEGLLGVAAVQAERVRIERGRRDGSTRQQRRRRRQEDGGVPCRHIRRAAPAVGEGGARSRGRGRRAPMAGLRRGWEGGGRLLGSSPASATRRK

SEQ ID NO: 165893 - protein, 295 aa, Oryza sativa
  Clone ID: PAT_MRT4530_64655C.1.pep
MADGELLWRASFVPRVPGYPYRRVPKVAFMFLTRGPLPLAPLWERFFRGHDGLYSVYVHALPSYRANFTTDSVFYRRQIPSKVAEWGEMTMCDAERRLLANALLDISNEWFVLVSESCIPIFNFNTTYRYLQNSSQSFVMAFDDPGPYGRGRYNWNMTPEVELTQWRKGSQWFEVNRELAIEIVRDTLYYPKFKEFCRPHCYVDEHYFPTMLTIEAPQSLANRSITWVDWSRGGAHPATFGRGDITEEFLRRVQEGRTCLYNGQNSTMCFLFARKFAPSALEPLLELAPTVLGFG

SEQ ID NO: 165894 - protein, 177 aa, Oryza sativa
  unsure (1)..(177): unsure at all Xaa locations
  Clone ID: PAT_MRT4530_64656C.1.pep
MDSPATPVGLSPPLHSLVLHNEPHYTKDGLQNERPRSNLIQTNGRDLTDLPRSTADMALTSTMTSSPAATRHLVLAGERRRGGANGGHQRVVGDAANSPKARTTADGKRRRRRXGRSGGDVRVDDDGDAPVVLGGNEGWDEDSDDLANPMAAFPSDDDNRSGGDARLDLRRRRRRTA

SEQ ID NO: 165895 - protein, 461 aa, Oryza sativa
  unsure (1)..(461): unsure at all Xaa locations
  Clone ID: PAT_MRT4530_64657C.1.pep
MLLLQMSPILCYPLVSLCTCIFAVVPRLITGRGFHAQISSEITSEFLGVTSMAVSEVQANDDGGTXGERXGHIEKRXQGKGSIMSKGKSKGKSXGNDELKKVIGDTSGGKQDNCYRCGGKGHWCRNCRVPKHLVEFNEKWSXHESHFIIEPDVHIEKHHDMLIDAKDGADVHMDDDXTNLLEEENGIFKDLKKTRYFHTLTKKTKNIVTIAGSNAHIVGTVSSNLVLPXGYSSSKRTLLSYNDICANDFHIETEVEQDVEYLLISKIDGYQKQVVXRLPSSPSGFXYTYIKPTKEYDENNIXNPKLFKIWHDGLGHPRLGMMRRIINNFAGHIVETRDFPNPEDFICFACEKGXLITRPSLLKIRDESPFXLVRIQGDICGPIXPLSGQFRYFMVHMYASSRWSHVVLLSXRNHAFSKLITQIIMLEASFPNNRVQSIWMDNTGGLRSKAFDDYCFAMSIK

SEQ ID NO: 165896 - protein, 58 aa, Oryza sativa
  Clone ID: PAT_MRT4530_64658C.1.pep
NVKALNVPFPLGQHEINGIQVWGWLDACPIRLFNKMMLYNLETIHNNLCCWSENVKET

SEQ ID NO: 165897 - protein, 395 aa, Oryza sativa
  unsure (1)..(395): unsure at all Xaa locations
  Clone ID: PAT_MRT4530_64659C.1.pep
MAASSSTAAASSMSGANGGGGGGSVFPGPPPPTPSNHHHALPSSGAAGGGTDAALSTILQRLLLSSPAPILRSPLSSRSRAPPSLPPLVSLGSSGTLXRLDAAADVGYFHLEGHGVPSQLPSSALAELSLVDASARRASNLLTLGFTEEDQQEADGAEDPALVFDVDDEGEMGALPAAAAEYARRMRDVGMQVVAMMSGCPEVGFGEAPFAEGRRKARCLMWVSKVAAGEAAPPAAGKAKAYPYVVGIHCQWEASGKEAAPASWVMDDGGEWTAVGARDGALLVTIGNIAQVWSNGKLKKVRGMARPVSSAPGAGHGAEADRLSVTVLITLPLDSVISPLVPVTDAGEEGGDDEVDGAGDDGDGWRFHSFLLEDLAWRVYNGRLQFKDPLVRYRI

SEQ ID NO: 165898 - protein, 626 aa, Oryza sativa
  Clone ID: PAT_MRT4530_6465C.1.pep
MESVGDPRDGPSTERAFEGQPVPPWTEQVTLRAVVASVALGVALSSVMMNLVFTSGIIPSLNISAGLLGFFLLYPSSRRLDQLGSPGRPFTRQENAVVQTCVVACASMTYSGGFGSYLLAMDRKTAEKTSTGDDSSASVSEPEFGRMMAFFFLVSFVGLLAIVPMRKWFYTGGPNCGFTSFPTFGLSAFNRGFYISLNGTYVGIGMISPHLINVSMLFGSIISWGIMRPYIRSKRGIWYDADLQETNLKSFSGYKVFCAIAMILGDGIFQLVAISLRTIHTVRHHQVAAETLRSFSDVDAMPRPVMSFDDRRRTQVFLREHIPSTFAISGYVVLATVSTVVIPLMYGQVRYYHVAAAYAFAPVLAFCNAYGTGVAETNFSAQYNKLVILMFASWIGIKNGGIVGSLVICGIVSSIVSTASDFMSDFKTSYLTLTSPRATLVSQVIGTAMGCVVNPAVFTVFHHFYEMNPNKTYQAPLAKIYRGIAVLGAGGLELPKYCLAISATFFVLALAVCAMREVAAHGKWRAEPYIPSVTGMAVSFLLVPAVSIDMCIGSLIVFLWNRNDKLGSQVFGPVLASGLICGDGLFSIPYALLARYDVTPPICIRFLGRVQNDKLDAFLASKAKAG

SEQ ID NO: 165899 - protein, 143 aa, Oryza sativa
  Clone ID: PAT_MRT4530_64660C.1.pep
MVTAGDHRRGGAAPERAERRGKANGGLRLTPGQRRRRERRPEWRKAAARLGMTMATALRRDGTSLSRIPPKSTIRPGLKHRFLIPFMSPLSWQCGAHASTCRISITFPKGLIRNYGYKDLKENNNKAWHNHKWDVDHCMQSCL

SEQ ID NO: 165900 - protein, 57 aa, Oryza sativa
  Clone ID: PAT_MRT4530_64661C.1.pep
MHDVDPAIAVSLSPPVYSTATPLPDLTGARQPLADPLSLSSPAADEFPAISVHRRLG

SEQ ID NO: 165901 - protein, 128 aa, Oryza sativa
  unsure (1)..(128): unsure at all Xaa locations
  Clone ID: PAT_MRT4530_64662C.1.pep
MRRPPLARKNRPPPGRQGGRLQISMPPLNAHLXAAPRTVXNRPSGGRQGGRLQISLTAVTRERTAVCHVTFAALWEAXVTTSVNFRNRKLFFDHAFQRQRTTPSNDXNGQSTVQHAFQRPIHPARITL

SEQ ID NO: 165902 - protein, 1196 aa, Oryza sativa
  Clone ID: PAT_MRT4530_64663C.1.pep
MSSQSVVAVKQITAPDKIVETCPSTKHSAHKLFDVKPDFQGLIDDNLSSSSQSSSIKIELIRSSSLPNILPFQKRSSEPEPESPLSHVSHPNVSEPVYSNSSTFCTSLFSSSSMETEPCRQLGTLPFLPHPPKCEQQVSAGHSSSSSLLVPGGDGDIGNAHDEPEQSDDLKDFLNLSGGDASDGSFHGENNAMAFAEQMEFQFLSEQLGIAITDNEESPRLDDIYGTPPQLSSLPVSSCSNQSVQKAGSPVKVQLSSPRSSSGSATTNKARLRWTLELHERFVEAVNKLDGPEKATPKGVLKLMKVEGLTIYHVKSHLQKYRLAKYLPETKEDKKASSEDKKSQSGSSGNDSVKKKNLQVAEALRMQMEVQKQLHEQLEVQRQLQLRIEEHARYLQRILEEQHKVSISSNSLSLKPPAESQPESPKPTSEKKEAESEAGAATSAQPSSEDKSPDAECKSSPPVCTTQDTQRRRLEKEKHGKTVDKETQKVSCNYCGKVVRTYNRLEHHLAGIRGNVYPCSLVPDSVRQSIKSSLEARKKDWIARKIGKHKSSELPPVRNLSLTSAHACRPLLQPITSGTDQEGSVSWHRCFVHFTNNLVQPGETTQVNAHDVSCNASSSQKGGQTIEVTRPPYQNPCMMNKPPEISSGQRIDPLSFSMENSSSQMQDSESSKEPTNDYLNSQARKSIGKLIFEAGLEPGILHLPSFKDMVDVLAWAQVAIPTYESIMEEQLREIQCHARDLKKHWEMNGCSVILDTWESRCGKSFISVLVHCSKGMLFIKSMDVSDIIDDVDELAVMLFRVVEEVGVLNIVQVITNDESPYMQAAEHAVLKRYGYSFFFTLCADHCINLLLENIAALDHVNEVLIKAREITRFIYSHAVPMELKGKYIQGGEILSSSNLKFVAMFITLGKLVSERINLVEMFSSPEWASSDLASRSSFRHVYEVVKTDNAFWSAAADILKLTDPLITVLYKLEADNCPIGILYDAMDCAKEDIKCNLRDKHGDYWPMVDEIWDHYLHTPVHAAGYILNPRIFYTERFSYDTEIKSGTNACVTRLAKNHYDPKKVAIQMDRYRRKSAPFDSDSAIQQTMEIPQVRWWSAHGTDTPELQTFAIRILSQTCFGASIYNIDRSISEQLHVVKRTYPEQERFRTMEYLHYNLRLAHCEPCVRGASGAQQHSRLTSQLGDWISSGQTTSYYK

SEQ ID NO: 165903 - protein, 46 aa, Oryza sativa
  unsure (1)..(46): unsure at all Xaa locations
  Clone ID: PAT_MRT4530_64664C.1.pep
PSLTPSYNEGPIISRDKVKEALLXLVQNDQFIDLVYRELQNAQYVD

SEQ ID NO: 165904 - protein, 69 aa, Oryza sativa
  Clone ID: PAT_MRT4530_64665C.1.pep
RGQGTSGCHIATLGSSACATPRPQPGHHVAGRSGGAGDAASRLQCTVPQPSRAAFNAVWAGVRRCSIDP

SEQ ID NO: 165905 - protein, 355 aa, Oryza sativa
  Clone ID: PAT_MRT4530_64666C.1.pep
MATRWQLLGQASGFLQDKYKQARLALGDVTPAELLVQEATNNDGGVGPDARTLASIADAAFDMDDYWRIAGVLRRRMARAGDWKEWRPVYKALVVLEFLLTHGPDEVPRDFLPDVAALRDLRGFTHVDDRGFDWGACMQRRCDSVLSLLTDAERLRDARRRIRVSHSTHELVQQHGSPSSSSGSPSSASSRTSSQSHASSWSVASSDSPTMVCHCAAAADYRHDKKFDAYTADDDWMQHLQVHNTTTTLEYDDDHDHDHDCPNHPPLTTPRSWDAHDDHDCPNHPPHTTPRSWDAHVHDLSLLQRRGRPGTDATFCSRMLGAVNVSSRASGFQSLSQPERRSASKKLQRQLSMEY

SEQ ID NO: 165906 - protein, 51 aa, Oryza sativa
  Clone ID: PAT_MRT4530_64667C.1.pep
MDTVDGRYCHHIYEPPRRAGTTPVCSAPVFQEVHPPSEATMQWRTQDFNNG

SEQ ID NO: 165907 - protein, 63 aa, Oryza sativa
  Clone ID: PAT_MRT4530_64668C.1.pep
VEHHHPRKCRHMHTSKTPFFCCHKRPTLTYSVQDFRRRLPLTFRRGDLTYWVFVDLLFDGWAF

SEQ ID NO: 165908 - protein, 37 aa, Oryza sativa
  Clone ID: PAT_MRT4530_64669C.1.pep
TAKLSVGHSLVLVRRTNDFYHHMLSAQCSRCLFNPPK

SEQ ID NO: 165909 - protein, 57 aa, Oryza sativa
  unsure (1)..(57): unsure at all Xaa locations
  Clone ID: PAT_MRT4530_6466C.1.pep
WPYTVSLLLCCTDNINDYGEXLAQVLWMIGVRPVADTFGRVNRVEPVSLDELGRSMI

SEQ ID NO: 165910 - protein, 49 aa, Oryza sativa
  Clone ID: PAT_MRT4530_64670C.1.pep
AHKKISLELKKTGEAIAEFLLKAIDEIGPRNVLQVITDNVSNKYRNTIL

SEQ ID NO: 165911 - protein, 97 aa, Oryza sativa
  Clone ID: PAT_MRT4530_64671C.1.pep
MPGHRSRPDLEESATASAAAPRARLPPPVLGRSGGGEPPDPLSFPPPPHPPPFRPFRRRMLPPTATAAGPVCLHAPPPPPPVARRPLSDALLVLREA

SEQ ID NO: 165912 - protein, 659 aa, Oryza sativa
  Clone ID: PAT_MRT4530_64672C.1.pep
MALAAKERKLSRLGSKGSGGGGGGGSFGARGQRAPAGTQRRLFAAFFAFLFAGAVLFGAAHVIGASFRPVLKTAWPSATLNAVSSERGAQQAGMVSVDAVLPSVHIQHAVALPDHVLLMLRDGSLLPASGQFECLYSPVNSSQLRRQPLSVATLPDGPSLVHCPAGPSRVAVSLSLAQSVPVAPLQWDRLVYTALIDSKDNSTVVFAKGMNLRPGRLGVPSRYECVFGRDFSKPKLVVTSPVVSAAQEIFRCVTPVRIRRYLRMTTGGKNSVNNDDKPMLVSIRTKGRGSSTLPSIAQPEPLPRYNKHWRRKAHSMCVCTMLRNQARFLREWIIYHSRIGVQRWFIYDNNSDDGIEEVLNTMDSSRYNVTRYLWPWMKSQEAGFAHCALRARESCEWVGFIDIDEFLHFPGNQTLQDVLRNYSVKPRIGELRTACHSFGPSGRTKIPKKGVTTGYTCRLAAPERHKSIVRPDALNPSLINVVHHFHLKEGMKYVNIGQGMMLINHYKYQVWEVFKDKFSGRVATYVADWQDEENVGSRDRAPGLGTKPVEPEDWPRRFCEVYDNGLKDFVQKVFTDPHTGNLPCACSVVHLSDNANKIVVKKATTEFSNHELVNWPFVMQTRMAIFTKAGGNVSEETASTSSGQQCLNFWQSKILHFAP

SEQ ID NO: 165913 - protein, 148 aa, Oryza sativa
  unsure (1)..(148): unsure at all Xaa locations
  Clone ID: PAT_MRT4530_64673C.1.pep
MGGRGAITRPLAFPLKRIPRNHTLTSQTRATEREAEHRTGRCYASSVATGLTTTTPXRKLKKNDSFHEGCDTKKMPSSLVQRNWTWFSPRDRRRGRRVPIQCPIGTTPEGVPTARLSPRTLCTESPWSXHQPNIGSTWPPPHRTSQLL

SEQ ID NO: 165914 - protein, 70 aa, Oryza sativa
  Clone ID: PAT_MRT4530_64674C.1.pep
MTSVPKKNLLQCSSTYFELNALFGVDAADVGRGCRVLTERRGHGLTGGEDPDNGNGAVEDGLGRRWRHFR

SEQ ID NO: 165915 - protein, 109 aa, Oryza sativa
  Clone ID: PAT_MRT4530_64675C.1.pep
TGRPIPTPSSAGSRCDVGLWLSVADATSVRPVTDRSFLSSTRQFSNLHVRPSSCNILPVMVGMKPGIYLTGANVPSLRGNTLAPVRDECLEALVLTGWGEVCVRPPIAT

SEQ ID NO: 165916 - protein, 807 aa, Oryza sativa
  unsure (1)..(807): unsure at all Xaa locations
  Clone ID: PAT_MRT4530_64676C.1.pep
MASYGGGYNGNEGGKGHDDDVYGHDGCTKDFLASGPWCARRGGAVGADAAHPPPDSSSGNTSRVRFESLDLNDSDGWPEMATYAGMLQADDDNIEIPPPPVQVPPRRISRTLGIRPTRSAGGGGVQGAAAGGGRAGAASAGGGVAGAVVGGGGVAVSARPASRASVCHNVSDLAAEHSDANDGIPVRKDKANWSARNTRTFCSIWCHQMDIGNCVRGIMQKNGWRDIIKRYFQATGLVHNREQFMGRHRQLRKQWAFCNKLRSSSGLGRNPDGTVVAEDDWWAANTKGHPDWKKFRKGLPEYLPEMDRMFEGVAVDGSTSFVATADQPVECDSSDEADDDEDDDELTPLSVDNKRTSSTSTTASSPSKKSRSPAVRVMDRNMSEYNEISRNKLSVLQTMMQVKQDAMQEERKAIERKVAKVNELGKECGVTPSETPTLFMGVLEIIKYQSVMDLFIVTEPEGRMLIIKKYAGDDDQSGYVEDDDQSGYEESRRRLKRWEDEIDELIIALMDDDDDGYVYGMYKYAMHIDKHLTRAEYRQPAMTGLEWSYELKSSSKSTSVEALTMFLWMVGAPQSVRQAEDRFERSMGTSVIKLAVDVIKPADPQFTTMHPRLRNRRFFPYFKDCIGAIDGTHVPCVVPSNKFVQHLCRKGMTTQNVMAVCDFDMRFTFVLAGWPGXGKYYLVDSGYPNRPGCLAPYKGTKYHLXEYRDAPEPQGXGVLKMKWRMLEKIPSYDPRKQAQIIVACCALHNFIRKSGIRDKHFDRCDCDENYVPPQASDDQPETEEVFDDCDLMNAFRDSIALALVHGS

SEQ ID NO: 165917 - protein, 759 aa, Oryza sativa
  Clone ID: PAT_MRT4530_64677C.1.pep
MASYGGGYNGDEGGNGHDDDVYGHDGCTKDFLASGPWCARQGGAVGADAAHPPPDSSSGNTSRVRFESLDLNDSDRWPEMAMYAGMLQADDDNIEIPPPPVRVPPRVGGGGVQGAAAGGGRAGAASAGGGVAGAVVGGGGAAVGGGGAAVSARPASRASVRRNVSDLAAEHSDANDGIPVRKDKANWSARNTRTFCSIWCHQMDIGNYVRGIMQKNGWRDIIKRYFQATGLVHDREQFMGRHRQLRKQWAFCNKLRSSSGLGRNPDGTFVAEDDWWAANTKGHPDWKKFRKGLPEYLPEMDRMFEGVAVDGSISFVATADQPVECDSSDEADDDEDDDELTPLSVGNKRTSSTSTTASSPSKKSRSPAVRVMDRNMSEYNEISGNKLSVLETMLQDDDQSGYVEDDDQSGYEESHRRLKRWEDEIDELIIALMDDDDDGYVYGMYRMSPTMFLRLHDLLVQSYELKSSSKSTSVEALAMFLWMVGAPQSIRQAEDRFERSMGTLAVDVIKLVDPQFTTMHTRLRNRRFFPYFKDCIGAIDGTHVPCVVPSNKLVQHLCCKGMTTQNVMVVCDFDMRFTFVLAGWPGSVHDMRVFDDAHTTYTHVFPHSPTGKYYLVDSGYPNRPGYLAPYKGTKYHLQEYRDAPEPQGKEENFNYAHSSLRNVIERSFGVLKMKWRMLEKIPSYDPRKQTQIIIACCALHNFIRKSGIRDKHFDRCDRDENYVPPQASADQPKTEEVFDDCDLMNAFRDSIALALVHGS

SEQ ID NO: 165918 - protein, 127 aa, Oryza sativa
  unsure (1)..(127): unsure at all Xaa locations
  Clone ID: PAT_MRT4530_64678C.1.pep
MDGREMDILWYXGFTGLGNQEPAIFSGRGKDHIGFGKPKADEKQNGETXKLEKPLNSKYFLRNEYIPDWGKIEYHYXEGKRHQMEMARPLFRIQPLLLLDKPPGVFNAQPKQVVQKALDKILSGRTT

SEQ ID NO: 165919 - protein, 137 aa, Oryza sativa
  Clone ID: PAT_MRT4530_64679C.1.pep
MEEEFKDKGLPPTLLHLIPDGREWKVKEADGEGSRNTNLDADEDKELELKLGLPGVQQEERAADSREKIQQQQRESSSEPSIGCFPTHSKPTTSIGTTGAKRGFFAIVGATLEGYNQSHRDTEECGKELTLGDENMA

SEQ ID NO: 165920 - protein, 42 aa, Oryza sativa
  Clone ID: PAT_MRT4530_6467C.1.pep
KFSRLSIAPISVNIGAFVKGFNPCLAIHKLCRPFDPALKMYH

SEQ ID NO: 165921 - protein, 83 aa, Oryza sativa
  Clone ID: PAT_MRT4530_64680C.1.pep
TPPRRRFHAAAPPPPRRRAAASTPPRRPEGAADPGEGQDPQDLEQGKSSLFFDHVDPNCAKIVLFTNKIACNDEHPTCDYAMP

SEQ ID NO: 165922 - protein, 81 aa, Oryza sativa
  Clone ID: PAT_MRT4530_64681C.1.pep
YPRALPPTAPPLPPPSPPLPHRPPPSPILSTLPRTTSCPSTSATACPLPSPSTSACPPPSPPPPCTLPCAPMASPSRALLP

SEQ ID NO: 165923 - protein, 597 aa, Oryza sativa
  Clone ID: PAT_MRT4530_64682C.1.pep
MAAAAVRVDKATSELLLGPDWTLNIDICDAVNSDHGQAKEVIKALKKRLQHKNSKVQFFALTLLETLMKNCGDHVHSQVVERDILQEMIKIVKKKTDMQLRDKILVLLESWQEAFGGNGGKHPQYYWAYAEMKKLGLEFPRRSPDAAPILTPPITRPTSLESYHQPSYGMPVNSSSRFDEAMPSNGPSLSSSEMERMLGAVELLSEMLKAVNPHDRGAVNDEIITELVKQCRSDQKKIISLVTSLRDEELLGQALDLNDRMQILLGKHDAIASGSPLPDEETDIMNESSAETTSTPVATGAPRAAVAAIVPTNVFDEEEEDEDDEFSQLARRNSKFRSTNAESTPSGVATSLSTAHDDEITSSGSSGTSTVSPPVQSHALALPDPPAPVRTAEEQVMSDLLALTISNPSPPQTPPTPEATTTMNQGGSQANDHPQPSYSNQGLAAASYNSYVAPWAQPQCQTPGIQLQQHQQPSQSQLPYNSSPYPPPPWASEDTAESNPFIAASLKNQPTSASPVNVPLNLRPLQQSNSFGVPLRSAGPQSPINGSTKQPMSAGARRPSYVSSNKYFDDLFEKNADGSLMKVGGSVGGGASSPYKT

SEQ ID NO: 165924 - protein, 185 aa, Oryza sativa
  unsure (1)..(185): unsure at all Xaa locations
  Clone ID: PAT_MRT4530_64683C.1.pep
GDVGCGEGRCAARHAPLRPRQCNLAAAIRLSPLPHPHPGNTAAGDEKANYGGGRAAFDHHPPAPLSRSYRPEPSALLSGAGRPATAAPPPLRAGRPPRHYPTPRRXPPPAVAPLPAAAPPPLITGRPPRRRRGPPRCCAPASPPRQPATAARPSAPPRRLPPGLLSLQAASLSRSDPSGLRKKKN

SEQ ID NO: 165925 - protein, 85 aa, Oryza sativa
  Clone ID: PAT_MRT4530_64684C.1.pep
IWMKALGRPGRILCEIGSRTSKSPTPFSTAISASHIKKLHCGEEQDQNQTRSPFAVSGGVRCRWRWDLGFSGLSGLVPIPAARGS

SEQ ID NO: 165926 - protein, 179 aa, Oryza sativa
  Clone ID: PAT_MRT4530_64685C.1.pep
EKKKKKKLKKKKNETKGGKKKKKKKKKKGDRKKGGKKKKGKNQKKKKGGPEARKKNLLERKSTNGKRGPQGNGGNGPRTGKQQGGGGTPKEWERNTAGEPPRPNGGKKDGPPGTRGPKGKGGGKHREKKKAGGAPPQKTIRGNRAKNRPGEAPNGDSKKKGVKRNPEGGNHPHTPGRQG

SEQ ID NO: 165927 - protein, 105 aa, Oryza sativa
  unsure (1)..(105): unsure at all Xaa locations
  Clone ID: PAT_MRT4530_64686C.1.pep
SGGEAVAAKRAQTARECNRRHGRGXNTNNNSSSGTNGLTPNTTGDGWEPGRNPNLHFTSSSTSGRRNYIYLYRARVWVEKRLASQIDLRESSCPAAQQSASTREA

SEQ ID NO: 165928 - protein, 135 aa, Oryza sativa
  Clone ID: PAT_MRT4530_64687C.1.pep
MHGDANPRQSRGGITASSLGPEAAEEDADNGATELAQTVLGLIGSSLRRWWQLSTNATSPFSLLALVPPSLQPAFNSSRRHRLSPLRALQDKEASPISGATTVPSSLVGQIRPSLSKPIEVAAVDMELDGGKSGV

SEQ ID NO: 165929 - protein, 53 aa, Oryza sativa
  Clone ID: PAT_MRT4530_64688C.1.pep
TCMAFLIQICITPMFQLVTHDDVLVYFSLLYYYIVTIQYQIPPTLPMLQGAVL

SEQ ID NO: 165930 - protein, 68 aa, Oryza sativa
  Clone ID: PAT_MRT4530_64689C.1.pep
CLDDRSLFFMKHALMRPTMCRNHNFRRIMVSNVCFSDLGGSAQTEGKETIILVRTECISMLTGERSCG

SEQ ID NO: 165931 - protein, 548 aa, Oryza sativa
  Clone ID: PAT_MRT4530_6468C.1.pep
MSKKKAVTTMTLKDFHGGSIPSELPLPSAPGVSARPADRPVASQAAAPAASARPRAPATSAAAAAAAAAAVPSFLTNPSRIGRHFDEDERTPLEAASTPRRPAPSPPSFAPSPAAGPTRSGPGNAWGPRREAAPTAAPVSPAASGGGGGQIWSATRIAQASAVEKVISGRWNSSKPSSPPAAPVSVPVVVETHVAPPEMERPKSVGVRELDGGIERSVAPVRPASHEGRVGEARGLEVQERPRVGDVPERPRVGDVLPERPKLKLLPRSKPIEASEPSPVYVEEKQVHQVPVVANTVQVDVIHDVHQNVVAPKAGVAGADAEGRAVERPRLNLKPRSNAVGQSDESAPKERQSLFGGARPREQVLRERGIDALASDLDKTSPVGRSKSEFAKGEQKVEAMSINPSGEKAESFPAGSRGPRNADKKDYRRDTDRSDVYRPTRREDNRRVARDVEKPEQQRPEPETWRKPVEPPKPEVVAPRFGKGASALELAQAFSKSMSDTVPQSRLTSVPSPKVPQSPGTRDQVGFSRLTDNRALHSSPSQRKINGY

SEQ ID NO: 165932 - protein, 128 aa, Oryza sativa
  unsure (1)..(128): unsure at all Xaa locations
  Clone ID: PAT_MRT4530_64690C.1.pep
MEEITLGHLARQVGGAFVIFEVLSSADEISVAPQMRGKAXPPQEFRATLSRGLGPPXSSPGMAGGQFRPSLTERYHGSVNPFESLQIHTMIIEAVWCDDRAKANFFPMALQGQARVSLMNLPPASVYS

SEQ ID NO: 165933 - protein, 42 aa, Oryza sativa
  Clone ID: PAT_MRT4530_64691C.1.pep
PPLFLFGLIILTDLFRPVILPVLFAPSLSLYLKALQLPYYRN

SEQ ID NO: 165934 - protein, 132 aa, Oryza sativa
  Clone ID: PAT_MRT4530_64692C.1.pep
MSLSHHLPPPPGDPYYVYAPHPYPDPQRQGVLTLFVAGLPDDVKPREIHNLFSSRPGFDHCLLEYTGRGTHEDESSIAVGAGEGSRESAAAAAAAPALCRRDEPLPPPPPAAGRPLLRVRAAPLPCSPGRGS

SEQ ID NO: 165935 - protein, 1171 aa, Oryza sativa
  Clone ID: PAT_MRT4530_64693C.1.pep
MVNRAHFVILVLVYRLLVPLSAEPDQTRESYVVYMGGGGGGAGAGAGVEEEAARAMHMEMLTSVAPAGDDQGRAAAALTQSYHHAFQGFAAELTEAEAAALSGHERVVSVFRDRALELHTTRSWDFLDVQSGLRSDRLGRRASGDVIIGIVDTGVWPESASFSDAGMGPVPARWRGVCMEGPDFKKSSCNKKLIGARYYGSQPGSASSSSAAGAVTATGGSPRDAVGHGTHTASTAAGAVVPGAGYYGLARGAAKGGAPASRVAVYKACSLGGCASSAVLKAIDDAVGDGVDVVSISIGMSSAFQSDFLADPIALGAFHAHQRGVLVVCSGGNDGPNPYTVVNSAPWILTVAASSIDRSFHSTIVLGNGTLVKGIAINFSNQSITGGQYPLVFGPQVAGRYTPVSEASNCYPGSLDAQKAAGKIVVCVGTDPMVSRRVKKLVAEGAGASGLVLIDDAEKAVPFVAGGFPFSQVATDAGAQILEYINSTKNPTAVILPTEDAKDDKPAPVVASFSARGPGGLTEAILKPDLMAPGVSILAATIPTADKEDVPAGKNPSPFAIKSGTSMACPHVAGAAAFVKSAHPGWSPSMIRSALMTTATTRNNLGQAVASSTGAAATGHDMGAGEISPLRALSPGLVFDTTTRDYLNFLCYYGYKEQLVRKLAGAGAAGAAFACPRGAPSPDLIASGVNYPSISVPRLLAGRTATVSRVAMNVGPPNATYAAAVEAPPGLAVKVSPERLVFSSRWTTAAYQVSFEIASGGAGAGAGASKGLSHKFLCGGRLIFGPDAGSLFLSTVLIVAPLVGLCCQCITKMNSISSEKQVLGLPVLIATIVLGLADLAFLLMTSSRDPGIVPRNARPPESCGGGDEEGVAGDVTTPSAEWVTAASPHLRLPRSKDVVVNGCVVKVKYCDTCLLYRPPRASHCSICNNCVRKFDHHCPWVGQCIGLRNYRFFFLFISTSTLLCVYVFVVSWLNIVAHKDGNDGSLLKSMAGEPLSVVLIVYTFVSVWFVGGLTVFHLYLMSTNQTTYENFRYRYDKKENPYNRGAISNIAEVFCAGIPPSMNNFRSWVAPPPLEEPDDVSGQLPPRNGADLTGGVKEKVDLEMGRNGGIIPAILRGLDYDEMEKNDVSVHIKDRGAAPAAPDPFMAGRWHNEDCESTPTAVSHHVNSERL

SEQ ID NO: 165936 - protein, 87 aa, Oryza sativa
  Clone ID: PAT_MRT4530_64694C.1.pep
PQGFPGGDLAQVQRAVCIFSPPPRVVGVFSPLGIKFGLLFSQGAFVPLLFAQGLEEGGFFRGPGGPPPLGKGFQGGGPQFSHGSQGF

SEQ ID NO: 165937 - protein, 451 aa, Oryza sativa
  Clone ID: PAT_MRT4530_64695C.1.pep
MASAPPVQEEALQPGTNHFRSRLAAAVRSISWSYTIFWSTSTSLPGVLTWNDGFYNGEVKTRKISNLEDLTADQLVLRRSEQLSELYYSLLSGECDHRARKPVAALSPEDIADTEWYYVVCMTYAFRPGQGLPGRSYASNRSVWLCNAQSADSKTFLRALLAKSASIQTIVCIPFMSGVLELGTTDPVSEDPNLVNRIVAYLKELQFPICLEVPSSTPSPDETEDADTVFDGLIEEDQMVILQGEDELGDVVVAECETNGANPETITMETDEFYSLCEELDLDLGSYQLVPTSARETVAAAAAAANDVDGVAYSHASCFVSWKRANPAEKVVAVPMTAGIESQKLLKKAVGGGTAWMSNIDDRGSVAITTTPGSNIKSHVMSERRRREKLNEMFLILKSLLPSVRKVDKASILAETITYLKVLEKRVKELESSSREPSRWRPTEIGQGKAP

SEQ ID NO: 165938 - protein, 93 aa, Oryza sativa
  Clone ID: PAT_MRT4530_64696C.1.pep
KTIESSVCLCAVKAERFLSARCSTHCSGLVFTSKRKPVPVEIHRLSKLSIGRRKYLLKIWLSTATNCISRESILPLKLILTPVFWQMTREKII

SEQ ID NO: 165939 - protein, 590 aa, Oryza sativa
  Clone ID: PAT_MRT4530_64697C.1.pep
MRVLLLVSDDGLLDFARLLGGGRKTKRKRRRRCLCLRLQATVSSFPPATIRWPRGLFLSPLTKPRPTRRAHQCVPHPRPRLPPTTASCAAGGHQLHALLAKLGLLHHPEFLSALLSRIPPSPSALSLLLEASPAVLSPSLVCPVIVAFSSSPAPSSALILFNHASSCSLPTPLPTFPALLKSCARAFNRSSRAGVASVFVSKGMELHCRVLKLGCGKDRYVRNALVSMYGKFGRLGDARKAFDEMPDKNAVSWNALVGAHRAAADWMGAERVSQAMPERNLSWWNAEIARNVSIGYMDEASRLFREMPERDAVSWNSLISGYTKLGKYTQALGIFQEMQENGIEPTELTLVLVLGACAKDGKLELGTDIHRNLQSKGIVADGLVGNALIDMYAKCGRLDLAKKVFDRMSMRDITCWNAMIVGFSVHGCSREALELFDSMKIEPNPVTFLGVLTACSHGGLVNEGRKYFNSMIEDYRIVPDVKHYGCMIDMLCRYGKIEEAYLMIKENPSTASSVLWKMLLAACRVHGHIDLAYMFFHELRELILTDNGGLVTISNVYAEAKRWDDVEHLRMKVRRNSALKHAAHSQMDVM

SEQ ID NO: 165940 - protein, 61 aa, Oryza sativa
  Clone ID: PAT_MRT4530_64698C.1.pep
LFMKKLEQNLDPQKPQTGQEPLWFDGKGFPLPRALINSREFSINPGYFFRTNRRGGFLIGG

SEQ ID NO: 165941 - protein, 64 aa, Oryza sativa
  Clone ID: PAT_MRT4530_64699C.1.pep
MVNDCPGLMNNHGHDQVAQEQCGQSHRANVKVQQRGGHDAAPSGRDAAALIWLSASLVPPVSVP

SEQ ID NO: 165942 - protein, 155 aa, Oryza sativa
  Clone ID: PAT_MRT4530_6469C.1.pep
KLELATSLIEKAKSKGVSLLLPTDIVVADKFAADAESKTVPASAIPDGWMGLDIGPDSIKTFSETLDTTKTVIWNGPMGVFEFEKFAAGTDAIAKKLADITAKGVTTIIGGGDSVAAVEKAGLADKMSHISTGGGASLELLEGKTLPGVLALNDA

SEQ ID NO: 165943 - protein, 504 aa, Oryza sativa
  Clone ID: PAT_MRT4530_646C.1.pep
MPGPKGTITVQGNAKLAVQCDKRSLDMVDHTPNPPTIAEPPKKVSKTNKTLKLDAALSLVSPGSGSGGPRPARIRRRATSGGDLGQRRHHHLLLTAAADNDEEATGQIRPCRSSSLPDPEAAGLVPPGSGGGLGRRVPRRPWEAGAAGGGSGNGRRRERGGRRQRERGRAAAGAGAGGDGGSGGGRQNRERGQAAAGAAGKLGWRLGLPTSEFFDLCFTGFRRSNWRDTCGQTGGKRRSDRRWLGGQTGGGDRRGRGLQRSDWRFNTGQTGGIHPVGGLGAQGSTAMTSSLPDDNVNAGVNQGASTSTMQVWTQVGEIVFPVYTTILISTRPAIMGSENGVIMTPVDNPVSKGPPAQAEDGTSTTTEPEKDPNAAKSCPFYKKYEPTRTTSRATRAWCPIHRTSKHTLQACSVFFNVQAEIHACKERGIQRTSPTRDVHCPIHKTKNHDLSSCKVLLSAMKTSPPKVQQSQIPPRDTDKEQGLVIDKYATRRVRYRWNQHIQRH

SEQ ID NO: 165944 - protein, 171 aa, Oryza sativa
  Clone ID: PAT_MRT4530_64700C.1.pep
MERDGRQLEWGGGWSRRWAATGLGWRQEGRQGPGAALLLLLLMGCGQADAGGGLGGEPLSLTVAVGREISAAALGGDSLSLTVAVDGAAAVAVEGFGIGEPAGASSSSALGPSPRVVAEEETIQMRSMPVVEGCTRMESCHVLLLSFCPSATARRSYPAACRPPLNSRRRG

SEQ ID NO: 165945 - protein, 214 aa, Oryza sativa
  unsure (1)..(214): unsure at all Xaa locations
  Clone ID: PAT_MRT4530_64701C.1.pep
PFLFNTVIDGPNLRELQMSGKNYTWANILTVPTFEKLDRILISTEWEEINSLSSVLALSXDISGHTPLLLNSNSAFSSFLPSFKFELGWXLRDXFFDMVKEVCASVQVGNTPTKGXQAKLRRLRXRQHLRGXXKYLXGSFRKQKKELLDRLYSQDKKAEXMLLNNRSAMLLRYEEIKWYQRAKVRDLLEGDSNTKYFQLLANGNEALKANYSEK

SEQ ID NO: 165946 - protein, 140 aa, Oryza sativa
  Clone ID: PAT_MRT4530_64702C.1.pep
TYKLSQLHNILIITAILLYHISIVNQCKTSTNYVPQQLIHLPMQDRVNELISLADRFIQARSLILATTTIEHTNMDQWISSTCWGIWGRRRIADGVEALEAIVALDELLELERQAPPAVAGDGARARTATGARTPCTPGS

SEQ ID NO: 165947 - protein, 100 aa, Oryza sativa
  unsure (1)..(100): unsure at all Xaa locations
  Clone ID: PAT_MRT4530_64703C.1.pep
MLGCEHMVLRVVLMTIKSRSQSLGCETXTVPTTSQRGHRLYLLYSMVHCAAPDXEVPEISPRGSLRSLYLVYKGVIMIQERCTALNCVVRGELSQLLSKV

SEQ ID NO: 165948 - protein, 414 aa, Oryza sativa
  unsure (1)..(414): unsure at all Xaa locations
  Clone ID: PAT_MRT4530_64704C.1.pep
MSFRGEESGGEDGGRTASASDLRKPFLHTGSWYKMSSAGGGGGMGSRLGSSAYSLRDSSVSAVLCTLIVALGPIQFGFTCGFSSPTQDAIISDLGLTLSEFSLFGSLSNVGAMVGAIASGQIAEYIGRKGSLMIAAIPNIIGWLAISFAKDSXVPVYIAEIAPQTMRGALGSVNQLSVTIGILLAYLLGMFVPWRILSVLGILPCSILIPGLFFIPESPRWLAKMGKMEDFESSLQVLRGFETDIAVEVNEIKIGIGLLVLQQLSGVNGILFYAASIFKAAGLTNSNLATFGLGVVQISTTGMTITLVVVSVSFFVKDNITNGSHLYSVMSMLSLVGLVILPVNIKSLAGSVATLANWLTAWLITMTASLMLSWSNGGTFAIYAAVCAGTLVFVCLWVPETKGRTLEEIAFSFR

SEQ ID NO: 165949 - protein, 76 aa, Oryza sativa
  unsure (1)..(76): unsure at all Xaa locations
  Clone ID: PAT_MRT4530_64705C.1.pep
ERRVKLLYKKLNPAPPKAVLSTHALFGVPSHYHTRHVRQQATHAISGCYPRKRRRIHRSTRRAAXNHFAPPACLPL

SEQ ID NO: 165950 - protein, 185 aa, Oryza sativa
  Clone ID: PAT_MRT4530_64706C.1.pep
ASRGEESGGEDGGRTASASDLRKPFVQVVATGVTTWVTDKAGRRLLLIISTTGMTITLVVVSVSFFVKDNITNGSHLYSVMSMLSLVGLVAFVISFSLGLGAIPWIIMSEILPVNIKSLAGSVATLANWLTAWLITMTASLMLSWSNGGTFAIYAAVCAGTLVFVCLWVPETKGRTLEEIAFSFR

SEQ ID NO: 165951 - protein, 823 aa, Oryza sativa
  Clone ID: PAT_MRT4530_64707C.1.pep
MAETAILLAIKKISIAVAGEMLSLSRPIIAKKSELVVALPTNMELVKDELEIINAFLKKVKTRDCRDNVLETWITQVRRLAYDIEDIVDQFIYVVGEHQGKGFWGNLKKFVKKPESLFSLDRVATEVEKVKLKLKELSSRRDRWVQSTICRPDAEIPNYDDEQGVYQFRHSQVPDYDDNELVGVDEYRETLTKLLYSEHCSLRIVAVCGMGGLGKSCLVYNVFKRERSHFDCSSWISVSQSCKMDDIFRNMLNQLLGDSSEVNYDTSRMGIEVLKEELKRFLEDKSYIIALDDIWRAPVLLEIRDTLFNSGKGSRLIITTRIDEVAAIAEDACKINLEPLSKYDAWILFCRKVFWKTENHACSPELQKWGEKIVNKCEGLPLAIVALGSLLSLRDKTEAVWKCFHSQIIWELQNNPDISHVEWILNLSYRHLPNHLQNCFLYCAMFPEDHLLRRKKLIRLWIAEGFVEQRGSISLEEVAESYLIELVHRSMLQVVERNSFGRIRRFRMHDLVRELAIKMSEKESFSSLHDDTSGVVQVVSDSRRVSLIRCKSEITSNLASSRLHTFLVFDTTMLQCSWSCFVPPKSKYLAVLDLSGLPIEAISNSIGELFNLKYLCLNDTNLKSLPKTITRLHNLGTLSLERTQVTSFPEGFAKLKKLRHVLVWKLLYNEHSSFSNSLGMGTIEGLWNLKELLTLDEIRANKKFVSRLGLSLCWCDLTEDPIPYLSKLSNLTSLNLRRTPVQGSHMLAKLVRWWSIALFPKLKGMTLQDMVEVREIYMDEGTLISLEYLKLDGLKQLAHVPDGIEFLILKGGEIYKKVLEWED

SEQ ID NO: 165952 - protein, 61 aa, Oryza sativa
  Clone ID: PAT_MRT4530_64708C.1.pep
GLVLDLFERFSALTLISSSSQKTRPFLVRLCMCPCSSQKANSCKLDIPGFHVLKGNVLRSC

SEQ ID NO: 165953 - protein, 223 aa, Oryza sativa
  Clone ID: PAT_MRT4530_64709C.1.pep
MAEERKKEKEKKKKHKEKEKEKAGTHGGEAHFKPSGEVKGVRFGGQFIVKSFTVRRASPLELLRLLDIPPAYLSECQSLPFPSTTAYMPTSFTILAHQAWHTLTLGLGTKKSKVVLFVFESEGMKAAVDQLWPSMIPLGDVNKKLIRGLTGSEMARFKFRKGCLTIYVYAVRRLGAAGFMCADDLRRILESVVELKDFLDHTAMLAMPSQKSITLQSRVAVAH

SEQ ID NO: 165954 - protein, 328 aa, Oryza sativa
  Clone ID: PAT_MRT4530_6470C.1.pep
MAAAGGLEQWQKDGFFQAAEEVQESADLSVLLLFLPSFSCPVMMESIYRTWMRERDSGANLEELSDLQRELKTALGTAKWQLEQFERAISMSNDKYSLEEGTLARRRQFVVAMEDQISQVEKQINDYSIDNDRRGLNWVKLDDEERDDLVAFLSAPAQLSQDTKKRDNTYHSPSKQKNALIGANDPRDMAAISKDRHKTEALCREISNGQSEACCLAEQLNGHSTSPSSGGEHWKIDISDDKDDDRKLSPNKVEASSQATAFSGIMKTTESFTRVRWLRNSLWKAKSDEHLPLRYDMPNHLDWRVITLLAQCHFSCTQLDNAHIGGCW

SEQ ID NO: 165955 - protein, 382 aa, Oryza sativa
  Clone ID: PAT_MRT4530_64710C.1.pep
MAAAVTVEEVRRAQRAEGPATVLAIGTATPANCVYQADYPDYYFRITKSEHMVELKEKFKRMYLYENPNMCAYMAPSLDARQDIVVVEVPKLGKAAAQKAIKEWGQPRSRITHLVFCTTSGVDMPGADYQLAKMLGLRPNVNRLMMYQQGCFAGGTVLRVAKDLAENNRGARVLAVCSEITAVTFRGPSESHLDSMVGQALFGDGAAAVIVGSDPDEAVERPLFQMVSASQTILPDSEGAIDGHLREVGLTFHLLKDVPGLISKNIERALGDAFTPLGISDWNSIFWVAHPGGPAILDQVEAKVGLDKERMRATRHVLSEYGNMSSACVLFILDEMRKRSAEDGHATTGEGMDWGVLFGFGPGLTVETVVLHSVPITAGAAA

SEQ ID NO: 165956 - protein, 124 aa, Oryza sativa
  Clone ID: PAT_MRT4530_64711C.1.pep
MDGWPDMLAPRPLTPAARALLFAVAAEPLQPATWQLLAVVATASSLAGPPSPATLIAARVCGLHTNGAAIETTEAAGDGEADAAAVDRTARHALGIEHWTTVAEFTQSADLTTTAALAKGTRGR

SEQ ID NO: 165957 - protein, 398 aa, Oryza sativa
  Clone ID: PAT_MRT4530_64712C.1.pep
MAAAVTVEEVRRAQRAEGPATVLAIGTATPANCVYQADYPDYYFRITKSEHMVELKEKFKRMCDKSQIRKRYMHLTEEILQENPNMCAYMAPSLDARQDIVVVEVPKLGKAAAQKAIKEWGQPRSRITHLVFCTTSGVDMPGADYQLAKMLGLRPNVNRLMMYQQGCFAGGTVLRVAKDLAENNRGARVLAVCSEITAVTFRGPSESHLDSMVGQALFGDGAAAVIVGSDPDEAVERPLFQMVSASQTILPDSEGAIDGHLREVGLTFHLLKDVPGLISKNIERALGDAFTPLGISDWNSIFWVAHPGGPAILDQVEAKVGLDKERMRATRHVLSEYGNMSSACVLFILDEMRKRSAEDGHATTGEGMDWGVLFGFGPGLTVETVVLHSVPITAGAAA

SEQ ID NO: 165958 - protein, 1114 aa, Oryza sativa
  unsure (1)..(1114): unsure at all Xaa locations
  Clone ID: PAT_MRT4530_64713C.1.pep
MSPFSGASLARSLSPDTHPRHHRLRPSPNPPLLPLPPDPPASLASPTLEFFPPVGPSRQPPTLPSLGVPASDPAFVSRRYRVPGTGCPFRSAVSSPDLQNPMLDSSSAPNPRLSSRCQGSPKGELPGFKRLYSDVVTAPPQPPAAKSSDFIAVQPPSRFSGAVAKDIRILQSGRLLDLSTQNLSASAQGTGDIQVGENPWKEVKGKRRWRNHSAFTTPNNLEQMHSRKARFLQHMEGKCFRCLSTKHKIVDCREPFRCWRCLKFGHLASSCSKKFAYKSTLPPLKTHTEAFPALAPLCFPPRSFPSPPKSPIMDDLTARPLLDSVVISATGEIERNRERFSAHSLVAWQVGAQEGRVELNTFADDVPSAFNIRRADIQFTKFHPEDFFITCSNQAAKVIGRKCSIHYVEEYSRRRNYNRTFDLWIWTDEPRAIPRGGTFAITSADEEGLATDIPLPDLEPLRNPPPSEPKKGWTYNVLVHVDTLEDLLSRKARAYKWDYDVQDDGTLYKEYPLPCRAEPDPTRGPADDDEDKDRDNHSRSRHRSRSLWDRLRRRSSSRSREPDRRDGHCQDNENRGRPRNRERSEHRSRSCRSRDPSEGSEEVLTLLESHLDPMLHEATVQHSIYSPDTSSPRAVSPVFVPSFAVQGTSQEELAATQASPVQEFIAALSTPVQPPLLPAPETQARRPGRAKVTIPALSSAQRHSERLLRKRRAGAKLESFAQEILSKNFGIMDERSSFDHNIKKIYLQRYKKPLSPASLKTIAELVEKGGCKSIRLKASKKATVAPLGLNSKAKQDSVRCILQQHGATIVCLQETKLSSISDRIILNTLGQRFLRHCVSLPATGTRGGVLLACDENYFSISDVLLGTYSVSAVLTMRGEGLQWSITVVYRPQLEPDKINFLSELEALQTSMKSAWLIIGDFNLIYKASDKNNDRHNRRMMQRFRGLIDKLQVKELYLPGRRFSWAGEGINPTQTKIDRAFVTTDWDMMFDCSNLYPLSSACSDHAPLLLVGNEKMNRFPSFRFEAFWLKIPGFLDIVTDSWTNPILSTNRLAIIRLKLRRLAQDLKRWSRNHVGDIKLQLAVATEVIFQLEXLADGERALLSNLKNRILALSVL

SEQ ID NO: 165959 - protein, 247 aa, Oryza sativa
  Clone ID: PAT_MRT4530_64714C.1.pep
MWRRRWRGRGEGEGRAATGKRERIAIRRIDNLAARQVTFSKRRRGLFKKAEELSILCDAEVGLVVFSATGKLFQFASTSMEQIIDRYNSHSKTLQRAEPSQLDLQGEDTSTCARLKEELAETSLRLRQMRGEELHRLNVEQLQELEKSLESGLGSVLKTKSKKILDEIDGLERKRMQLIEENLRLKEQVSRMSRMEEMQPGPDSEIVYEEGQSSESVTNASYPRPPPDNDYSSDTSLRLGLSLFSSK

SEQ ID NO: 165960 - protein, 89 aa, Oryza sativa
  Clone ID: PAT_MRT4530_64715C.1.pep
GGLFARPGKMEALPPFCEIWDRALFFGVKPYFVHPKRHQGLFVFPHPCWGPPPFLTSFRFFPTRGACLVGGFGIKRAFCSPPLLKPPAP

SEQ ID NO: 165961 - protein, 124 aa, Oryza sativa
  Clone ID: PAT_MRT4530_64716C.1.pep
MDAGGEEEKQERHRVDGASPSMVALRSDVLHAVLGGKSHNQDTSELVTLSEWSKNKFPLYAYAAAFMFLVMQEYDKRSHGIDFLNRDFVVRELFDNILKHMSEALIEGNQDILHTHMGSSCCRS

SEQ ID NO: 165962 - protein, 81 aa, Oryza sativa
  Clone ID: PAT_MRT4530_64717C.1.pep
PTRATTRPRSTTLSSELCNEAPSSVRRRPQRTAAHGALPSSVHNGRAGQIERRKRCANVPAALAEPERYGICCCVATRTLP

SEQ ID NO: 165963 - protein, 99 aa, Oryza sativa
  Clone ID: PAT_MRT4530_64718C.1.pep
RILANRQSAQRSRVRKLQYISELERSVTTLQMEVSALSPRVAFLDHQRSLLTVGNSHLKQRIAALAQDKIFKDAHQEALKKEIERLRQVYHQQQIKATG

SEQ ID NO: 165964 - protein, 624 aa, Oryza sativa
  unsure (1)..(624): unsure at all Xaa locations
  Clone ID: PAT_MRT4530_64719C.1.pep
MVFDAGTGSSGGGSPAAPSPPPPWQNPLRVILTAAFARQVAVGRWFTVFASLLILTASGATYIFGIYSPALKASLGYDQHTLNTVSFFKDLGANLGVLSGLINEVTPPWVVLAIGAAMNLSGYLMVYLAVAGRTAAPPVWLVCLYVFVGANSQSFANTGALVTCVKNFPESRGVVLGILKGFVGLSGAVYTQLYLAFYGDDAKSLILLIAWLPAAVSVVFVHTVRIMPYPRRRGGQETSVDPFFCFLYISIGLAAYLLVMIVVQRQFAFSRTAYSCAAAALLIVLFLPLXVVIKQEFKIHRERLELASRRPAAAHHHRPRNVERDGAVAAAXSPAPAETSWVKGMFRPPARGEDYTILQALVSVDMAVLFVATICGVGGTLTAIDNMGQIGQSLGYPARSTNTFVSLISIWNYAGRVAAGFASEAFVERWRLPRPLVLTGILLLACAGHLLIALGVPRALYAASVIIGFCFGAQWPLVFAIISEVFGLKYYSTLYNFGGMASPVGSYILNVLVAGRLYDAEAGRQPGAGLAAGAGRDKVCLGVDCFKKSFLIITAATVFGALVSLVLVWRTWRFYKGDIYARFRDGDGAVAGEGGDGRLPVDQRRRPPPPEEEEESTAVNGRKE

SEQ ID NO: 165965 - protein, 598 aa, Oryza sativa
  Clone ID: PAT_MRT4530_6471C.1.pep
MGVLGSRVAWAWLVQLLLLQQLAGASHVVYDDLELQAAATTADGVPPSIVDSELRTGYHFQPPKNWINDPNAPMYYKGWYHLFYQYNPKGAVWGNIVWAHSVSRDLINWVALKPAIEPSIRADKYGCWSGSATMMADGTPVIMYTGVNRPDVNYQVQNVALPRNGSDPLLREWVKPGHNPVIVPEGGINATQFRDPTTAWRGADGHWRLLVGSLAGQSRGVAYVYRSRDFRRWTRAAQPLHSAPTGMWECPDFYPVTADGRREGVDTSSAVVDAAASARVKYVLKNSLDLRRYDYYTVGTYDRKAERYVPDDPAGDEHHIRYDYGNFYASKTFYDPAKRRRILWGWANESDTAADDVAKGWAGIQAIPRKVWLDPSGKQLLQWPIEEVERLRGKWPVILKDRVVKPGEHVEVTGLQTAQADVEVSFEVGSLEAAERLDPAMAYDAQRLCSARGADARGGVGPFGLWVLASAGLEEKTAVFFRVFRPAARGGGAGKPVVLMCTDPTKSSRNPNMYQPTFAGFVDTDITNGKISLRSLIDRSVVESFGAGGKACILSRVYPSLAIGKNARLYVFNNGKAEIKVSQLTAWEMKKPVMMNGA

SEQ ID NO: 165966 - protein, 120 aa, Oryza sativa
  Clone ID: PAT_MRT4530_64720C.1.pep
MSSTQAKVVGGYANAPRATAVAEGSGRGGSGEVDSSQSDTGASASAVRSFQDGGARRRLPLLMGSQARGVSEKGDLGGMRVQAPAGRHMHLYRKGIAQLSASYPVDKRMQQITKFPCLII

SEQ ID NO: 165967 - protein, 676 aa, Oryza sativa
  unsure (1)..(676): unsure at all Xaa locations
  Clone ID: PAT_MRT4530_64721C.1.pep
MYLQYYFNYYYQYYIWRGRLLSAIGLCIASYSYLLNVRKRLREGVTYSPMALRDVERDARLKRLFNGTEANCVSELRMQKAIFHKLCGHFISRGLLVDTLHVTIEEQIAMFMHIVGHKWSNRSVGFEFYRSGETVSRYFNAVLDSLVSISKELIYIRSTETHPKITSSPGRFHPYFEGCIGALDGTHVPATVPAHMQDRFRGRKTIPTQNVLAAVDFDLRFTYILAGWEGSAHDSHVLQDALSRPSGLKIPEGKFFLADAGYAARPGILPPYRGVRYHLKEYKGAREPEDYKELYNHRHSSCRTTVERAFGTLKNRFNILKSQPNLPLKTQVKTVIACCALHNWILENGDDEYVYDEKMGKGKGKGKVEGEGSTRERSISWDDDQTKFMLDWYIEYKKEQHAGFIWKTQHHLKCADVLNREFAMGVTSTQVTCHYRHYKENXQIVERALNNSGNGFDASKCKLAISEFEKAKLRVSILHLNLLAKPIKYFHXDEELFSGSNTNGSLAIDXQTCCDIDNKSGSSDHEGLNDVSTYAHPIDIVEEDSDTLPSPTGPDNCSPGTSGVSKKRPKGVKSPSKRQPKPKSRFTDATEKIGNTMDRLVNQLASPPPPPMPQLDPYATMWKRIDALPIGSKDKVAVGNYLGRQENEGVRGFLAASCDTTLETWVYQFICDRDGV

SEQ ID NO: 165968 - protein, 483 aa, Oryza sativa
  Clone ID: PAT_MRT4530_64722C.1.pep
MSSSTSPPAVPSAEYAEHLSYLVAIPNLSHANYYFLCPVGNPDPTEFVIGKTNRIPFRLTNPDLGHWRNTFKSWPSLKKTSPEKSWITWFKRMSASKRVHWDEIRIGQAVDLTIANSAKDEPLMAAASYFWSNTINAFLFNQAPMTPTLIDIIMITGLDVTSSANPMSLNTKKQYDFRTKSIGGWHQRRKTKPKKTKLADDLPALDPSIDQALDEKQIEEDVDQAAAEPPPPSSSPVQRISSDCTPSAADSHNVEEEEQPAVPNIPVLADLFSFDIKDYLDEETETDTTSKALAPLSDDVKKTLEDISHRLEASLDNLVTNCGSISARFADIQALLSDELADALTPAVYLEQHRFKLEKAKQRLATIQANRQLVHEEKAKLDLLSDGPIKANIDRLESRKIELLAQLQECNAELDLEHKKLADLSQVVEGQKARLKSAIKNVADLTKSLKVIPGTDAQDAQAIEEVEQIRRKAILAIQSYLSQ

SEQ ID NO: 165969 - protein, 691 aa, Oryza sativa
  Clone ID: PAT_MRT4530_64723C.1.pep
MSSSASPSTAPSAEYAEHLSNLVAIPSLSHENYYFLGPVGNPDPTEFIIGETNRITFGLTNPDLGPMTPTLIDIIMITGLDVTSSANPMSLNTKNQYDFRTKSIGGWSGYVAAYMGQGSVTPREHVAFLLMWLEKILFCGSSCGPTTNWQFAAKALETKRQFPLGKILLGYLYQMLNNTSAKLAVGSVVGAGGPWWLLQSWLNLVVMKFVNRPSVTEAEFPRLEPTVDDDGEERTHRRCTFYGEYTSTPTDAGAKLSAELLKDWFCSFYEGFQKDTRVWFLYEDSTLLENPLDFRTSTLLQGLVREPADAGKKRRTRSSAVDTSAPAPKKKVKLKKHKPTDDLPALDLSIEQALDEEEIEEDIDQAAAELSDIGGKTPSASPKQTPPTPVAPANFSRKKKTAVRKKSAATTLKPAPPPPPPSSPPVQQMSSDRTPSAAGSHNVEEEEQPAVPNIPVNVTFKMFSIGPDLFSFDIKDYLDEETETDTTSKALAPLSDDVKKTLEDISHRLEASLDNLVTNCGSIRARFADIQALLPDELADALTPAVYLEQHRFKLEKAKQRLADCRERKDIEVTIQANRQLVHEEKAKLDLLPEGPIKANIDRLEARKIELLAQLQECNTELDLEHKKLADLPQVVEGQKARLKSAIKNVADMTKSLKVIPRIDAQDAQAIEELEQIRQRAVSVIQRYLFQ

SEQ ID NO: 165970 - protein, 767 aa, Oryza sativa
  Clone ID: PAT_MRT4530_64724C.1.pep
MSSSASSSAAPSAEYAEYFLGPVGNPDPTEFVIGETYRIPFRLTNPDLGHWRNTFKSWPSLEKTSPEKSWITWFKRMLASKRVHWDEIGIGQALDLTIGNSAKDEPLMAAASYFWSNTINAFLFNQGPMTPTLIDIIMITGLDITSSANPMSLNTKNQYDFRTKSIGGWSGYVAAYMGQGSVTPREHVAFLLMWLEKFLFCGSSCGPTTNWQFVAEALETKRQFPLGKILLGYLYQMLHNTSAKLAVSSVVGAEAEFPRLEPTVDDDGEERTHRRCTSYGEYASTPADAGAKLSAELLKDWFCSFYEGFQKDTRVWFLYEDSTLLENPLDFRFENINHERYQKPREIFSAVISPCILPVGIHQGRNIQTTEFSPPRQRNSGRNIEYAPGLIPNGGGPSPHVIGYNAPRTLTLLQGLIREPADAGKKRKTRSSAIDPSAQAPKKKTKPKKTKLADDLPALDPSIEQALDEEEIEEDVDQVAAEKKKTAVRKKLAATTFKPSSPPPPPSSSPVQRISSDRTPSAADNHNVEEEEQPAVPNIPVLADLFSFDIKDYLDEETETDTTGKALAPLSDDVKKTLEDISHRLEASLDNLVTNCGSIRARFADIQALLPDELADALTPAVYLEQHRFKLEKAKQRLADHRERKNIEATIQANRQLIHEEKAKLDMLSDGPIKANIDRLEARKIELLAQLQECNAKLDLEHKKLADLPQVVERQKARLKSVIKNVADLTKFLKVIPGTDAQDAQAIEEVEQIRRKAILAIQSYLSR

SEQ ID NO: 165971 - protein, 120 aa, Oryza sativa
  unsure (1)..(120): unsure at all Xaa locations
  Clone ID: PAT_MRT4530_64725C.1.pep
EDRRAGEQEGSPGSCSRRRRYGSRSRRHRSPPDPPPSPPRQPPPSSRRRIRPPPSSRRRIRPPPSASAADPASPVVVAVXRPLLSASVADPTSPVVVAADPARGVPPPRVPVAPPPRATH

SEQ ID NO: 165972 - protein, 713 aa, Oryza sativa
  Clone ID: PAT_MRT4530_64726C.1.pep
MSSSASPSAAPSAEYAEKTSPEKTWITWFKRMSASKRVHWDEIGIGQALDLTIANSAKDEPLMAAASYFWSNTINAFLFNQGPMIPTLIDIIMITGLDVTSSANPMSLKTKNQYDFRTKSIGGWSGYVAAYMGQGFVTPREHVAFLLMRLEKFLFCGSSCGPTTNWQFVAEALETKRQFPLGKILLGYLYQMLHNTSAKLAVGSVVGAGGPWWLLQSWLNLVVMKFVNRPYVTEAEFPRLEPTVDDEEEERTHRRCTSYGEYASTPADAGAKLSAELLKDWFCSFYEGFQKDTRVWFLYEDSILLENPLDFRFEDINHERYQKPREIFSAAISPCILTVGIHQGRNIQTTEFSPPRQSNSGRNIEYALGLIPNEGGPSPPVIGYNAPRTSTLLQGLIREPADAGKKRKTRSLVPKLVLMVKNARRPPNSNVPKCKNYRREGYPEVLAGTSVHRLFVKKFLNAARKFLALLPGTSWQVSSSNLSSPRRLGVARDFQISCGYPGKVCEGFPHLRKEMSLNLSQLPGSSWLKNSGSSGLLFLPGSSSVYHREAADSHNVEEEEQPVVPNIPVLADLFSFDIKNYLDEETETDTTSKALAPLSDDVKKTLEDISHRLEASLDNLVTNCGFIRARFADIQALLPDELADALTPAVYLEQHRFKLEMAKQRLADHRERKDIEATIQANRQLVHEEKAKLDLLSDGPIKANIDRLEARKI

SEQ ID NO: 165973 - protein, 96 aa, Oryza sativa
  Clone ID: PAT_MRT4530_64727C.1.pep
QKMGDFKCTTHARLKWPLVYTYCHLTPIVTEAEPQTHREPNIHSGVQYHTTLWTADVLLYDELEKPKHTFESPMIVLDRGSHGANFILGRHIGVSL

SEQ ID NO: 165974 - protein, 285 aa, Oryza sativa
  Clone ID: PAT_MRT4530_64728C.1.pep
MTRRVKKTKEQFLTEQTRTLTLDGLFFFFFFDRRGTMRAREHVQQPSSKRIGRTTYYCSTSAVVLRISALFTLRGIRPGSWILPDPSAFVHIDSGLGLTASHTLSCALLLAGSNETHTRRAPAPARVGPVPPPHRTSYHHHRLDSCAAARRAYKRPCTVNETGARSGGRGVSFHPEEAEAAWRCRLERTQPCTHTARSDSSTPAFSTCVRTVALYTSEIHHDTNERSPPSRRHIAHGGQSSKLIKLRAQTTEHTTEQPKMTGRPATALPTALHCTTTPTIPIKLS

SEQ ID NO: 165975 - protein, 201 aa, Oryza sativa
  Clone ID: PAT_MRT4530_64729C.1.pep
MSLVRSAPARPRAAGTRQEEQNFFNALRQVGKNFEKITLRVQSKSKDQVRHYYYRLVRRMKKLLGPEFSLDAKNSKDTIAAMLCWWSLLEKFSCSASKLHLKPRRFKTFVEALGNQLLKDRNKTRKKCPRGDVCLSSSSSAVNRTPGNESFSVKLLPVDVSNGSKVASSKGAVFKRGAEPNSSNKSGATKGDLSATSTVKQ

SEQ ID NO: 165976 - protein, 160 aa, Oryza sativa
  Clone ID: PAT_MRT4530_6472C.1.pep
MAFIKVVFSVLLPVVVSMLVATTTMADHRGQVVYTPGQLCAAGRGYPMYPLPRCRALAKRQCAGGAVDEQVRQDCCRQLAAIDDSFCRCPALSHMLVGMYKELGAPAKGQPMDEVFPGCRRGDMKRVAASLPAFCNVDIPIGIGGVCYWLSYPMNPATGH

SEQ ID NO: 165977 - protein, 65 aa, Oryza sativa
  Clone ID: PAT_MRT4530_64730C.1.pep
MTGGLPTVRGPGGSETGVRPCGNWKTMAITQPHSQTSPDITPLNSLETIKSSLMAYGDVIAKCPM

SEQ ID NO: 165978 - protein, 325 aa, Oryza sativa
  Clone ID: PAT_MRT4530_64731C.1.pep
MAAPIPTLFPQPQATTAANAYEGPLLSPPSATKAPSSNGRHHVLAESEAGWKGRLIQQAGRKTLVTSVLSSIPTYFLTALKPPKQFIQDMDKMRRKFLWAGHQELSGGKCKVNWEKWECPHKPWIGTPPPCDDLDRKIFATATMVSIGNGRKADFWESNWVGHQPLKYLAPTLFTHSKGKHRTVHKALSDNQWIRDIRHDLTLALVQEFVQVHQQIWESGITLVEDTEDTILWKWTNNDKYSAKSAYMAQFSGGTGSRAANLTWKCWAPSKCKNFMWLLLQNKIWTADRLQLRQWPNNYFCQLCYRNLETTQHLFKDCPYTKEVW

SEQ ID NO: 165979 - protein, 120 aa, Oryza sativa
  unsure (1)..(120): unsure at all Xaa locations
  Clone ID: PAT_MRT4530_64732C.1.pep
MAHLYFGYWVDYSGTCMANDAKAENKDEGRQVNGLCDVXSKTLESDDMVGGHRGCNIFCVGVIDYRALGFGTYDCSKPLSIVGNLXDNFLGRISLCWRITIGAGLGXNPIDTDRRPMMMT

SEQ ID NO: 165980 - protein, 93 aa, Oryza sativa
  Clone ID: PAT_MRT4530_64733C.1.pep
RKPWEPRSTSPTTFTRTTRRRTGEVTNCLSPLSDRYRPNMRPGTLVPLPPPSIRPLTTPTTRPPPTRITLKRMPSTVGDPQHEQLKHSGLLFL

SEQ ID NO: 165981 - protein, 100 aa, Oryza sativa
  unsure (1)..(100): unsure at all Xaa locations
  Clone ID: PAT_MRT4530_64734C.1.pep
LALALVARCRDYWLIHLLATGEWRGGVVREGYISQGGWVAPMLPRTGYKVCNDNLLIVASMLTLFDVEFLLSSKVDSVQDGXSLYSCIGLHGADDHTLGS

SEQ ID NO: 165982 - protein, 582 aa, Oryza sativa
  Clone ID: PAT_MRT4530_64735C.1.pep
MLLLAAAVFVGWLMMWVMLPTRTFSSTWAPTLASHTNSTYFGKQEEYSVREWRPGGDLCWWQAKLDRAALRLGHVGSFCCAFLFFPVARGSSLLPLIGLTSEASIKYHVWLGNLVMLFFTAHGLCYIVFWASTDQIHEMLKWTRTKVANVPGELALLSGLVMWVTALPRVRRQMFELFFYAHHLYALFLVLFALHVGVAFFCSILPGVFLFMVDRYLRFLQSRVRVRLVSARLLACDAVELNFCKSPHLTHSPMSTVFINVPCVSRLQWHPFTVTSSSSLEPDRLSVVVKRAGRWTEKLYETISSLPPSQPGHLDVSVEGPYSQATPASFLQYDSLVMISGGGGITPFISVIRELVHRSGTAAEAATPSLLLIAVFKTSADLAMLDLIVPASGGFSDISRLELRIEAFVTRESVPSAGDVVAIAHKVPAEEVLFKPSPSHAPIAPVLGHNGWLWLAAVVSSSFFIFLLLVGAVQRLYIYPVDGNSNRVYPWAARTLLNLLLLCVGIAVAASAAVLWNKRRRAEEAKQVENVATPASSPATWLDKPRRGDAEVGRRPDLRSTMHRSILFSFWVELVLLPLKSA

SEQ ID NO: 165983 - protein, 41 aa, Oryza sativa
  Clone ID: PAT_MRT4530_64736C.1.pep
MVHGLGQQSCEQQRNWHSCGCGKAGVTSHRITTRGQLALIH

SEQ ID NO: 165984 - protein, 106 aa, Oryza sativa
  Clone ID: PAT_MRT4530_64737C.1.pep
VLISRRNIGDVACVNVEEVVDRSSPTFCSSCVRLTVLPRQLAPQTSGASTGIHTWAFEAHKSPTQIPIRNSCTLGCNPKTPFRSTCQQRLLAEYIDPSDIHKDHIG

SEQ ID NO: 165985 - protein, 113 aa, Oryza sativa
  Clone ID: PAT_MRT4530_64738C.1.pep
PMRAPSCAPWPPHAAVDDTEARERRIPARRAPSDASWTSLLSAARPPSTSSTWWPTSSVICNHIDNRIYASRWLEEEVATAGGRATTGSRRRSRWLGCGAAGEWGRMRGIAVA

SEQ ID NO: 165986 - protein, 172 aa, Oryza sativa
  Clone ID: PAT_MRT4530_64739C.1.pep
TPNSCWVKEQSSQEEATTGQLGGDGDDDLRRPRGLASPCVLHPVPRGLLTLPSTTPRREREGSRPGEHHLTHPEMRERGGEEAPYLDIVAQRRQASLDLIHLVADVVRDLQPHRQPDLCQPLARGGGSDGGRAGDHWLEEEVALARMRCRWGVGTNARNRGGGGGAWEGERK

SEQ ID NO: 165987 - protein, 74 aa, Oryza sativa
  Clone ID: PAT_MRT4530_6473C.1.pep
MAEGEAVGDGDGLVEVAPLTLGANTVWEDYAVHLSIVTRAADDGAPTMGGYSVVRSNFVLGIMMNREEPQARTD

SEQ ID NO: 165988 - protein, 493 aa, Oryza sativa
  Clone ID: PAT_MRT4530_64740C.1.pep
MASLLLLLLLVLSLAAVHTDAAAFPSPADSIVRQLSSVVKWPRVPSSSSSSSHGHKQPSHPQYDGGVALQFESGYFVETLVEGDKLGVTPHTIRVSPVEGGELLAVDSAHSNIVRITPPLSEYSRGRLVAGSFQGHSGHIDGKPSDARFKRPTGVAVDDTGNVYVADTANLAIRKIGESGVTTIAGGKSNIPGYRDGPSEDAKFSTDFDVVYVKKMCSLLVIDRGNAALRKIALPQEDCTYQDATLLSSDIILVIGAVVAGYIFSVVQHGFGSSTAEKIEAPEDEHQESSTVGKPPLVVESLKEEPSAGWPSLGTLIGDLLKLVIEGVGNQLLRLVPSRLQHGKRKTDLTPLKDRLVMPEDTEETPVAQKLSSTPMRPETLHGPNPVNETAPKAQKSVKSSKFRDSTLSSKHRSSKRQEYAEFYGSSETPQVSSKVPKDRLRHRHREKSGEAVYGTSHPEPKPAEVKPADYSDPKYDPYNIRSKYGADSGYRY

SEQ ID NO: 165989 - protein, 70 aa, Oryza sativa
  Clone ID: PAT_MRT4530_64741C.1.pep
MMVDQVRVVLPDTATPMQGPVGVRVCTVSAKSMASSACAAHAPTLLRRSHAGGVRIRRGRVSEARVNELE

SEQ ID NO: 165990 - protein, 74 aa, Oryza sativa
  Clone ID: PAT_MRT4530_64742C.1.pep
LVPIRPTDAAARCGRTHFSCPALLLRPAQRRASCGAGPRSLLLCTRAREREMRHETLLPLPRCRCARFSLPPCA

SEQ ID NO: 165991 - protein, 49 aa, Oryza sativa
  Clone ID: PAT_MRT4530_64743C.1.pep
VRSFTFNYVFVKLIYTNQMWRQIIKYFIRLQFQVDNCITFKPHYCSFLC

SEQ ID NO: 165992 - protein, 193 aa, Oryza sativa
  unsure (1)..(193): unsure at all Xaa locations
  Clone ID: PAT_MRT4530_64744C.1.pep
VAISGPAPTAARPGPAAACSRSRSHRRPPPLSPDPSRTRPATTGFGQDEARRRRIREGRGPRRRPVAAQSSLSSGSSLGSSSRRSRPPPPTGSGRPLVVGVVIVIAGSAETSXPLSAASARQIRAPYCRHRPVVIVVVVGVVRIGVVVVVAQLSAAXHAPRRSRQTPPSAFSCRSPCATPLSAAGAAARHAPP

SEQ ID NO: 165993 - protein, 647 aa, Oryza sativa
  Clone ID: PAT_MRT4530_64745C.1.pep
MPLPAFVAAAARLAVLVAAAATAANAASYARYRRRHLRRIPSPIDESADPLADFRAFPSSDADDSEEDNFFFGLATAPAHVEDRLEDAWLQFATETSCDDNGNVRDQRPVDALMASAAGDGGSQQSWRSTGGENIGDREQRKPLRVAMEAMLRGFEILAESGESAGGDNCSHNVAAWHNVPCPQERLRFWSDPDAELKLAKETGISVFRMGVDWARLMPEEPTEELKSSVNFAALERYRWIIQRVREYGMKVMLTLFHHSLPPWAGKYGGWKMEKTVTYFMDFVRLVVDRVSNLVDYWVIFNEPHVFVMLTYCAGAWPGGDPNAIEVATSTLPTGVYNQALHWMAIAHSEAYDYIHSKSKNERKPIVGVAHHVSFTRPYGLFDVAAVALANSLTLFPYVDSICDKLDFIGINYYGQEVISGPGLKLVDNDEYSESGRGVYPDGLFRILIQFNERYKRLNIPFVITENGVSDETDLIRKPYILEHLLATYAAIIMGVRVLGYLFWTTSDNWEWADGYGPKFGLVAVDRANNLARKPRPSYFLFSRVVTTGKITRQDRMSAWRELQQAAVQKKTRPFFRAVDKHGRMYAGGLDRPIQRPFILRDWRFGHYKMEGLQDPLSCFIRCIFAPFSRQKKIHYIEDDVISYSIN

SEQ ID NO: 165994 - protein, 136 aa, Oryza sativa
  Clone ID: PAT_MRT4530_64746C.1.pep
MQTCIADSAAAYARRPRATAAAAAAAAHSTATAARPVFMWVKDQDWIVRRSASSALSRRANCGEPSLRAHGRACTAARVPDEHAVVYGCASRARGGYTHMVTCHTAHTATPRRVASQGWNLAAAWPAVLRRASREK

SEQ ID NO: 165995 - protein, 99 aa, Oryza sativa
  Clone ID: PAT_MRT4530_64747C.1.pep
ILSYPLKFLWNGRSYKYFGGNLARGPTSWKISFESISLIQFLCFSCGPIKQYFLCFSCVLQSFVLHLHAYQHIVFFLFLQFFIPTQRALLCVALLSSTS

SEQ ID NO: 165996 - protein, 325 aa, Oryza sativa
  Clone ID: PAT_MRT4530_64748C.1.pep
MSFVFRGSRGDIEAGGFPGFAPERRAMRIHAGGRPVNSNLAFLVTVLMLFMVLNSHQMSPNFLVWLVLGVFLMATSLRMYATCQQLQAQAQAHAAAANGFLGHTELRVHVPPTIALATRGRLQSLRLQLALLDREFDDLDYDALRALDADNSPHAPSMSEEEINALPVFKYKVQAHQGSASFRKSDGPSQPSVSSTESGNEKKQDRFKADATDNTLEDELTCSVCLEQVVVGDLLRSLPCLHQFHANCIDPWLRQQGTCPVCKHRVSDGWHGEADASNMVVIFLVDLYPVQYELTYNPFYSVSVGKLAYYGCLRLKISRGFKIQE

SEQ ID NO: 165997 - protein, 115 aa, Oryza sativa
  Clone ID: PAT_MRT4530_64749C.1.pep
ALSMLCHSISRARVLDERPDIKSQYSALLYQLVVDPSDRVCFEAILCVLGKVDNTESTEERAGGWIRLTREILKLPEAPSVASKGILSKSEKSSKARRSQPLIKLVMRRLESSFS

SEQ ID NO: 165998 - protein, 585 aa, Oryza sativa
  unsure (1)..(585): unsure at all Xaa locations
  Clone ID: PAT_MRT4530_6474C.1.pep
MDSSARSGGGGTGGYTSTRVWMVAGVAIAGAIVFVEAARRRRRWLRDRSEVPPDFGAFCYRFEIAPAPQPPPPAARQLLSGLTFAASDNFEIEGYVAGFGNPDWKRTHKAATRTAVPVTMLQKQGGTYVGSTVMDELGFGVSGGNLHNGTPINPASPSLFPGGSCSGSAVAVSAQLVDFALVLIFYNEDYXWFARDPSVLHRVGDVLLXQLLQLLKVPNEKTVNVIENAIQTLPGYQPPKHINIGEYISSHVPSLKDFCEPTVEMLEGMSALKALSTVMLLLQRNEGAIDCFVMHNDSNRYEFKTNHEDWVNTVKPKLGLDTSTRVLQAVNSKSDNIKSLYIVRNELRAALKNLLKDTGILVLPTTAGYPLKRNARQRLSPGFEDRMSAFVGIATLSGCCQAVIPLGSHNDHPISLSLLAAHGSDKFLLRNVLYMFSSIKEQVVLASKLVTAPVINRDADFGAAELLKEKGNSAFKGRKWSKAVEFYSDAIKLNGTNATYYSNRAAAYLELGRYKQAEADCEQALLLDKKIIYVLNVKAYLRRGIAREAVLNHQEALQDIRHALALEPQNKAGLLAERRLQKKLR

SEQ ID NO: 165999 - protein, 59 aa, Oryza sativa
  Clone ID: PAT_MRT4530_64750C.1.pep
FRSRELVSTTWCPYKKILRTPNISSSGRPLTVRNTTNDILYTHHSCGYHRQLRLSPRIP

SEQ ID NO: 166000 - protein, 161 aa, Oryza sativa
  unsure (1)..(161): unsure at all Xaa locations
  Clone ID: PAT_MRT4530_64751C.1.pep
MLGASRRSVCTAAAAAAAGSRRRAAAGVASSVTGDSSVSSSSAPPRSVINGQPGVPQLQKRLLSVLAAPKLTGTDNAASLKLREGSLVGRRYESSAAAVDSSDTPPVEKHEYQAEVNRLMDLIVHSLYSNKEVVLRELVRNASDALDKWRDLNXTNPDLIK

SEQ ID NO: 166001 - protein, 59 aa, Oryza sativa
  Clone ID: PAT_MRT4530_64752C.1.pep
PSTTNPAFLIYALIPNWLAWLLSIPYQVGRLHKTKQCARTHTNSSISVELHAKELKLIG

SEQ ID NO: 166002 - protein, 104 aa, Oryza sativa
  Clone ID: PAT_MRT4530_64753C.1.pep
EKFFHWKNPSPPKTKRGRETFLKPFFPPKGVGSFPPPKKKNFPRAPLFCFWGALFLFQKGPPVQLIFPPQKKAQTLEKSFKGAGSKKLGQKIWEAFSTIQNGFF

SEQ ID NO: 166003 - protein, 608 aa, Oryza sativa
  unsure (1)..(608): unsure at all Xaa locations
  Clone ID: PAT_MRT4530_64754C.1.pep
MDDVDSVVGSGDKAGEAPGDDGSSTPLPETVQVANSPTYKLDRKLGKGGFGQVYVGRRISSPGVTDRTPGANALEVAIKFEHRTSKGCNYGAPYEWQVYNTPSGRHGVPSAHXKGRQGDYYIMKIMDMLGPSLWDVWNNNSHSMSVEMVACIAIEAISILEKMHSKGYVHGDVKPENFLLGTPGTLEEKKLFLVDLGLATRWKDTGSGEHVEYDQRPDIFRGTVRYASVHAHLGRTGSRRDDLESLAYTLVFLLRGRLPWQGYQGENKGFLVCKKKMATSPESLCCFCPQPFRQFIEYVVNLKFDEEPNYAKCISLFDGIVGPNPDIRPINTDGAQKLIYQVGQKRGRLTMDEDDDEQPKKKIRMGMPATQWISVYNARRPMKQRYHYNVADGRLAQHITKGNEDGLFISSVASCSNLWALIMDAGTGFTSQVYELSQHFLHKEWIMDQWERNFYITSLAGANNGSSLVVMSRGTQYAQQSYKVSDSFPFKWINKKWKEGFYVTAMATAGSRWAVVMSRNAGFTDQVVELDFLYPSEGIHRRWDNGFRITATAATWDQAAFILSIPRRKPADETQETLRTSAFPSQHVKEKWSKNLYLASICYGRTVS

SEQ ID NO: 166004 - protein, 71 aa, Oryza sativa
  Clone ID: PAT_MRT4530_64755C.1.pep
PAGTALIEFFLTAFCCFSYSPRRSHGFVKALSLFGGDLREARDTPTWRGPDGRGSPRIQNIIRDQARGACD

SEQ ID NO: 166005 - protein, 76 aa, Oryza sativa
  Clone ID: PAT_MRT4530_64756C.1.pep
MRWDEEGSGRRRRRKKGQSPGPTIPGRSDRLYVAGQTARMQPVRPVPRGRSDRHHQAGQTAHIAPVRPPGPPADCA

SEQ ID NO: 166006 - protein, 197 aa, Oryza sativa
  Clone ID: PAT_MRT4530_64757C.1.pep
MADGVAQLGHDAGDLEGEEVARVSCEEGFEVRLDVGWTWPRKADEQDESSGDVGEALVAELVLFMWMCMFIDQQTSVSCMHNQRRQQRGGDGQMVAVGDEIRLDAVVLHPSELARTGRSCAISRVSVVADGVGEREQRGDDAPPQPAVTLNKTKTKTAYKMRIANIRYKTRDLRCTSSFEKHEGIIQPTEVKHDVEL

SEQ ID NO: 166007 - protein, 86 aa, Oryza sativa
  Clone ID: PAT_MRT4530_64759C.1.pep
MEWTGRRPSLSCALAAPRPAQIPRSTAVRPPCATPFSRAHCQTTCNTIPCDQFEEAFQAVELWIADRAVLLVENSSHAHMHYNQTY

SEQ ID NO: 166008 - protein, 91 aa, Oryza sativa
  unsure (1)..(91): unsure at all Xaa locations
  Clone ID: PAT_MRT4530_6475C.1.pep
MTVVTVGMVGNTLQLSFGLHLHRPTKTXIQRRRGRFXGLPNQPIFQLAASSVAPLCRLANFGLVXRVNSEFLAHSYISLILDIVRFTYRLS

SEQ ID NO: 166009 - protein, 68 aa, Oryza sativa
  Clone ID: PAT_MRT4530_64760C.1.pep
CFRYGGWCHTGLIFCYRSLCECLVLGARCIARCILQPSYVSLVGLFFHKCPGLKGLMFRVVMFPTFCG

SEQ ID NO: 166010 - protein, 97 aa, Oryza sativa
  Clone ID: PAT_MRT4530_64761C.1.pep
DGERLIYFNVLLQKHVISFFIFYYFYFKRGDRKIMIWGGVKKQKTTMQAWIKNEPCFANLNIQKKRGTLWLFKNQQGWWIKKKKKEGCKKKKYMFPM

SEQ ID NO: 166011 - protein, 332 aa, Oryza sativa
  Clone ID: PAT_MRT4530_64762C.1.pep
MASPSLAAANTLREILLLLLLPRRSEIEAHTPPFTSPSLLLAAQGKGKGGGILAYIGPRGASASSLLLLVLFAGIEGNSFFFLRWIWFGWFAGKEGSLNMKLDMPSRDNFSSMSWKWRGLHQKIGGTTSGLCLGFAVSGIANAEVPVEISISNSAASTSSTHGKEVYTDYSVTGIPGDGRCLFRSVIHGACIRAGRPIPNEDLQRKLADELRAMVADEFVKRREESEWFIEGDFDTYVSHIRHPHVWGGEPELFMASHVLEMPITVYMHDEDAGGLITIAEYGQQYGKEDPIQVLYDGFAHYDAVQIPAKKCSREMTSEFLKFQGSNGRIWS

SEQ ID NO: 166012 - protein, 105 aa, Oryza sativa
  Clone ID: PAT_MRT4530_64763C.1.pep
MAMAAARNLPHSLQPPALAGEPHNALAGEGDFVLPTGYKEGRRDIIGDGRGHGDARTWELWQSGGLVRAVLLSKGTRHSSDRRGGAAHGREARGWAEIERLADNE

SEQ ID NO: 166013 - protein, 499 aa, Oryza sativa
  Clone ID: PAT_MRT4530_64764C.1.pep
MATAAVMAAVPSSSPADAAEAVVMTEAVPSLPQRQQPVFVEGRGGKLRDHAYSRKQKSLGLLCSKWGSLVHLGDSWILAFWFPVLTEFFCAFSSFVALYNRDDVESIGLDDAARRLGVERRRIYDIVNVLESVGVSSFFLRLSWTGFLFFLARFDSDICFRFICEKILVRKAKNRYSWIGFGGVPMALRELKERALREKSGLAPLPVEEPSAAIMSDDEDEDKMGDADGDTESEKLSQPVDNPSDNKPGAPRCRLRSDHRKEKSLGLLTQNFVKLFLTMEVDTISLDEAAKLLLGEGHAENTKVRRLYDIANVLSSLNFIDKIQQADSRKPAFRWLGSAGKPKAENGVTIAVPPPGKTISNKRAFGTELTNIDINRSRLDSTIPKKAKLTLSGGEILKNCKLSVQKQLGQGSKGGFVYGPFHPAGARKQELDNGNKGHTDNVQNWESLAASFRPQYQNQALGDLFAHYVEAWKSWYSEFAQGSSMMQQHFGMPVINQFL

SEQ ID NO: 166014 - protein, 148 aa, Oryza sativa
  Clone ID: PAT_MRT4530_64765C.1.pep
YWLDRMRLYSSAVNLRRPSKRTMYSQSSQFHGGLTQSLGLRKCSRSQTSSYNVKLGLVDCSLHRNIKSSDPPSLRYFVSLVGRQFRCGLSGKEGSLNMKLDMPSRDNFSSMSWKWRGLPQKIRGTTSGLCLGFAAPGIPNAAVPVEIS

SEQ ID NO: 166015 - protein, 512 aa, Oryza sativa
  Clone ID: PAT_MRT4530_64766C.1.pep
MRRPSLFLNAVAAGAAWPPLVAPPHCTDPVPPPTASGGADGSAAGDDAGWLGDASGDAADGSAGGDDGRRRGRRIWRGRRWRAAGETEAVAATTAAAGATDPVLPPGFHLPHGAAVTAPRRWKNDIQKQLRRKHFRKNQGLLLEQLISSDENASDKTKIFSLDELEKATNNFDPTHILGHGGHGMVYKGILSDQRVVAIKRSKDIKEGEISQFINEVAILSQINHRNIVKLFGCCLETEVPLLVYDFIPNGSLFDILHSGSSNRFSLSWDDCLRIAVEAAGALCYLHSAASVSVFHRDVKSSNILLDANYTAKVADFGASRLVPIDQTHIVTNVQGTFGYLDPEYYHTGQLNEKSDVYSFGVVLVELLLRREPIFTTVSGSKQNLSNYFLWELKARPIKEIVAAQVCEEATEEEIKSVSSLAEMCLMLRSEDRPTMKQVEMTLQFLRTKRLTSSHAAAENDEEMQSLLHTRSEVSCESLANNLGVSANPESGNSHKCYSLEQEFISSIGLPR

SEQ ID NO: 166016 - protein, 87 aa, Oryza sativa
  Clone ID: PAT_MRT4530_64767C.1.pep
MEPANLPWFPADFSLFSGAKTSDASAIAIAMDSWGIDRHVLALLQASGRLELLMLLPAGPGCCAAPRRACPNAGEGLPGYFTSWANG

SEQ ID NO: 166017 - protein, 255 aa, Oryza sativa
  Clone ID: PAT_MRT4530_64768C.1.pep
MSFSQPDAFSPSQFTSSQNAAADSTTPSKSRGASSTMPLTVKQISEAQQSGITGEKGAPFVVDGVETANVRLVGLVSGKTERNTDVSFTIDDGTGRLDFIRWVNDGADSAETAAVQNGMYVSVIGSLKGLQERKRATAFAIRPVTDYNEVTLHFIQCVRMHLENTKSQIGSPAKTYSAMGSSSSNGFSEMTTPTSVKSNPAPVLSVTNGSKTDLNTEVLNVFREPANVVAIDYLADIGHIYSTIDESHYKSAFNE

SEQ ID NO: 166018 - protein, 205 aa, Oryza sativa
  Clone ID: PAT_MRT4530_64769C.1.pep
PELNQHDHAHRGSEMVLYSEQMEEDVIWEDGHPLIWNPIDWEYQPLNPETHQHDHGQPMGSEMVLYSDQIEGNVIWEDGHPLIWNPTDWEYQTLNPEPHHLDHGQHRGSETDLYSDQVEGDVIWEDGCTLIWNPTDWEYQPLNPAPHHHDQHSGRYHRGGDTYSEWGYDAGEPTYGANEGRRKGGIHSEYQSKPVGSSDVAPDIY

SEQ ID NO: 166019 - protein, 71 aa, Oryza sativa
  unsure (1)..(71): unsure at all Xaa locations
  Clone ID: PAT_MRT4530_6476C.1.pep
PVLQPSANNCDXEALLVAASLLLTHNTSHLMGSMTIMQFATKISPMICKLLLFCSNPSNLVLKKKKKKKKK

SEQ ID NO: 166020 - protein, 279 aa, Oryza sativa
  Clone ID: PAT_MRT4530_64770C.1.pep
MMSFSQPDAFSPSQFTSSQNAAADSTTPSKSRGASSTMPLTVKQISEAQQSGITGEKGAPFVVDGVETANVRLVGLVSGKTERNTDVSFTIDDGTGRLDFIRWVNDGADSAETAAVQNGMYVSVIGSLKGLQERKRATAFAIRPVTDYNEVTLHFIQCVRMHLENTKSQIGSPAKTYSAMGSSSSNGFSEMTTPTSVKSNPAPVLSVTNGSKTDLNTEVLNVFREPANVESEHGVHIDEIVKRFRLPEAKIKVAIDYLADIGHIYSTIDESHYKSAFNE

SEQ ID NO: 166021 - protein, 199 aa, Oryza sativa
  Clone ID: PAT_MRT4530_64771C.1.pep
MSMPEAGRSERDGREQDDDYEQQQARVLMALMQGFCAARYRKADNIPCPIVQGLYLGSVGAAMNKDALKSLNITHILIVARSLNPAFAAEFNYKKIEVLDSPDIDLAKHFDECFSFIDESISSGGNVLVHCFAGRSRSVTIIVAYLMKKHQMSLENALSLVRSKRPQVAPNEGFMSQLENFEKSMQVEQERKLMQPVQN

SEQ ID NO: 166022 - protein, 127 aa, Oryza sativa
  Clone ID: PAT_MRT4530_64772C.1.pep
MIERLRAGVGRQTHQRRGGASRGEEVWRAQGKEQCRGGGGGGKAQGIKAGRCGLPGRGGTEGFEAGRCRPRLSHVAPGSPFSRNRFSRLRRSRARRRRHPTPGAYNGAARERAHLTASEDIPKRGVG

SEQ ID NO: 166023 - protein, 134 aa, Oryza sativa
  Clone ID: PAT_MRT4530_64773C.1.pep
MTTVQQDGGAGSTARTSSGAAISVNGQHDAIFVVIARIAWVWVSGVIPIRYQTIRHNRMIPSRYQVSDDFNHVSRDTHEVSCDICHVSDDFYHVSRDTREVSCDTCQVSDDFYHVSRDTCEVSDDTYQVSGDSY

SEQ ID NO: 166024 - protein, 165 aa, Oryza sativa
  Clone ID: PAT_MRT4530_64774C.1.pep
MAAEKKEVADAAAGSGSDTILLISSDGEHFNVPSAAASLSQLVSNMIEDDCTTNGVPLPNVASKVLAKVIEYCIKHAAAGEEEEKDLKSFDAEFMIDVDKNMLYGLLLASNFLNIKSLLDLCCQHTANLIKGKSPEQIRKEFGIKNDFTPEEEEEIRKENTWAFE

SEQ ID NO: 166025 - protein, 235 aa, Oryza sativa
  Clone ID: PAT_MRT4530_64775C.1.pep
MAARRFSFSWADEVEREEAAEQQQQQQEEDDDEENQPPPPPRRCGETGEQAKANPFGAARPREVVLAEKGVDWRARDRELDDASRRGSAIRSRSRVHGSKRHARDAPVAARRHEDSTPASRRRMISLPPVSYGSAWGGKRKCAGQDEPSRQDRPVAEHCRRVFGQLNIGEGGEFSRRSSTESRGSVCTDRTEASNAAAAETETSVGQRRMSRRRSRKNVRKMESTKSKKQQTLQL

SEQ ID NO: 166026 - protein, 65 aa, Oryza sativa
  Clone ID: PAT_MRT4530_64776C.1.pep
SALMIQTNELVVRLLHKFRQTENSVQFSIRWGYIIRLLLLISDEPSTTVPTRYSLSCNMHPCQGT

SEQ ID NO: 166027 - protein, 66 aa, Oryza sativa
  Clone ID: PAT_MRT4530_64777C.1.pep
TQPCQLLGFFSLGTGQMRSTYACFHRVAKLIKNNPQACLRNFWSSNFSLNIRSNYLCHQWERTIPE

SEQ ID NO: 166028 - protein, 103 aa, Oryza sativa
  Clone ID: PAT_MRT4530_64778C.1.pep
MDRVMKLASERAVVIFTLSSCCMCHTVTRLFCDLGVNALVHELDQDPRGKEMERALLKLLGRGPPVPVVFIGGKLVGGTNKIMSLHLGGELIPMLKNAGALWL

SEQ ID NO: 166029 - protein, 102 aa, Oryza sativa
  Clone ID: PAT_MRT4530_64779C.1.pep
QLYGNKHKCFSSNQFQERSSQVGRTIPKLQTYFTDIYIYIFLFSIFCKVPVLYCSWHGCVHQNIECQIERRRQPIAINDMDTMVQIHKFGDHGCLGSEIFGF

SEQ ID NO: 166030 - protein, 89 aa, Oryza sativa
  unsure (1)..(89): unsure at all Xaa locations
  Clone ID: PAT_MRT4530_6477C.1.pep
PPPKFVFKTFVGPPGGGVGLKKAVKAHVLCPKMGGVKAKNPPPKGFKGKTPPGFKNXPSEILKKFKKTPPPPRGGFWPPLFFFKKLKVG

SEQ ID NO: 166031 - protein, 790 aa, Oryza sativa
  Clone ID: PAT_MRT4530_64780C.1.pep
MESEDKFDMLLRMLEEFERRREEADQRRRADFQSLKAAVESWMLEIQKTAEDLQISVGDMQSKVTPTTCLTKCTSTDVEPDPPVVVVVTRATPDTTSMELVAVEDAIGATYTNNHNHPKVMPAKCSMNCSTPNLTVAAMVSCTSTSLASICQDITCTTDIDALVCPKETHIKCLTLSLDVKGGIHDQAEVMFQAMTAASKVVPAYVQSMDNFSSRMNANRKLATLTPARCSVKWHGPHKHFDVNPWPPPNFNASDSSRWFGILIDKHFPLGEPLKHLHIMLVPLVWDPGDSKVHLHKILLNDWLQCQYFHLGDNCWNIELVISVGVPEELCVWVSYIAVAKKEACVDQNKGVSYSEEMRFWCELYSHCYISARLIGKGNYILEPSKDQPTCLGPQNFEKGSFLFTTIDDVDRYNLDIGTVVRLFAGNLKELVKHGRGFDIGISVMQEQIDGQGIHMVWFPGVKCSFKLRLNTCWVICHLEPVSMIFVLAPLKCGSFLEAWSPENAPLLDESWVELKQLQSCVQIEQHKYAGLASEPTTFGFHIKISRELACVHADLFQTALVIQPQRNSCTNIKIHDVLVELSFIKQEHSKLLKLFQYLHILALLGWTLIAKMEVHLDFNGAPPCLLIAAARISAQGHTSTLGLLKGESISMLQIQWDLEFSAIMCFSYILLVYYTEEWSWPMENERNKEKCNQEFHFSIEEHFYSSHQIIIARLVGHHEYYGEGKETKLQRKIVRTRKSNGDRDDLITLIIRVLQVPWDPGGLRFQKFNWHQLEDKLNFKEKGLLGSQP

SEQ ID NO: 166032 - protein, 148 aa, Oryza sativa
  unsure (1)..(148): unsure at all Xaa locations
  Clone ID: PAT_MRT4530_64781C.1.pep
DLGGCLGWEFPTLYIIFRKRNVSIATVMNFVPLNVSFRRTLVGQNXINWYNLIVLILYTSLNGSNDSFKWNLHQNXFSVRSIYLSLINNGFIERNKFIWKLKVPIKINNFCGFCSKSCDLTKDNLARRNWNGSQRYFCLYNETIQHFF

SEQ ID NO: 166033 - protein, 53 aa, Oryza sativa
  Clone ID: PAT_MRT4530_64782C.1.pep
MALAGGDIEMDSFLAVVIEVPHMRFVVIGRKGAEPEGGDTLAMSRRRAEVAAR

SEQ ID NO: 166034 - protein, 64 aa, Oryza sativa
  Clone ID: PAT_MRT4530_64783C.1.pep
LNNQTFEQLFTNKLNLEITFTLSIGGLLGWTGHTFFKPSFKFPVYFATKCKKPIMRNALIEIPR

SEQ ID NO: 166035 - protein, 70 aa, Oryza sativa
  Clone ID: PAT_MRT4530_64784C.1.pep
MRAQLDEEKKEQAVKMKGEEEDGVFSTPLSPEVGARPWVCCGAKEAPKVSDKWAQVVAVYEGERGGLNRE

SEQ ID NO: 166036 - protein, 175 aa, Oryza sativa
  unsure (1)..(175): unsure at all Xaa locations
  Clone ID: PAT_MRT4530_64785C.1.pep
MPRSITMILQRGKSQWAVPSCATVNPAAGQPNISADPTPSRPPSPPVPRKGSSYTSDQAVTHSRLWADIIQGGGAAPTGGAHVSAAQRGEEGGAGMWAPRAVAKGGRSTVDRDHAGGPPPXPDRPGGRSDGTAAARHGSARLQNRPAGHGNRRRRARFRRRLPSWGGRLEEGDDL

SEQ ID NO: 166037 - protein, 177 aa, Oryza sativa
  unsure (1)..(177): unsure at all Xaa locations
  Clone ID: PAT_MRT4530_64786C.1.pep
GVKRKRKREKRGRKGRRKKGKGKKEKEREKXEVRKRIERKKERKRESKAKEKEKGMVRKEGKKERRKGKEGRKEGKRXQKRKCKKGKGKERNSGVKKRGVEKGGKKGEKEEGKRKEVKREKRKRKKEKKKKGKEXEEEKRKKNRKRKRKRREKEKKIVLPKRPIIERAYANDASVHT

SEQ ID NO: 166038 - protein, 186 aa, Oryza sativa
  Clone ID: PAT_MRT4530_64787C.1.pep
MGEGDYPHHLRLRDCYLACGSRGNRKAHVEYSDTDLAPQEDQMALEAILRAMPHCCHRGNALARRGEPEHVDEPRHRRLIHVKINATARSATPGAPPHVPPTSTSTSKFRPPQLVTQELDLDKAKVSANLHREELAEDDGIWHLGTVHENFTINSYNLFANSVAPIVHDEQEAFTVVVRIGPDIWE

SEQ ID NO: 166039 - protein, 213 aa, Oryza sativa
  unsure (1)..(213): unsure at all Xaa locations
  Clone ID: PAT_MRT4530_64788C.1.pep
VSPPPLKRQWAVPSCAAVNPAAGQPDTPADPTPSRPPSPPVPRKGSSYTSDQAVTHSRLWKAXGAAPTGGAHGSAAQSGRSTVDQDHAGGPPPVHGTDGPDRPRGRSDGTAAARHGSARLQNRPAGHGNRRRRARSPATAIGGVGSDGGRGEKRRQRLKATAHARRTAAXTRERGKKRERRGASPASTATKAEDEXGGGDPAMLRCGRAAAAR

SEQ ID NO: 166040 - protein, 84 aa, Oryza sativa
  unsure (1)..(84): unsure at all Xaa locations
  Clone ID: PAT_MRT4530_64789C.1.pep
HPFEPSYHSPPRGGLIINWRFYKHXPXHHHHLLLSRCPPTSPPSFSPPPSPLLAPTSVLPHCTCPDIHPSLPHFHPSHCCPSTP

SEQ ID NO: 166041 - protein, 94 aa, Oryza sativa
  unsure (1)..(94): unsure at all Xaa locations
  Clone ID: PAT_MRT4530_6478C.1.pep
FPSALEKNEYGYLSDRIILRLFGYGYEYEYFLLDTDMDMVSGFPLNTDNNSDIRKKCFSSHVQSYSILIXYLFPYSSYPYSFPYPAKNMKTNMV

SEQ ID NO: 166042 - protein, 306 aa, Oryza sativa
  unsure (1)..(306): unsure at all Xaa locations
  Clone ID: PAT_MRT4530_64790C.1.pep
MLVPSTTTRTPISTIANDSILLRAAVEEEDEERESHITPQAILDGSDETNFDKTAPTRKIFSSGVGEKRARLSTTHCTQQVIPEEEAVGGPLLRRGESGSWTTGHPGRPNSVTPTLATGAXERVELYFRSSSYPLPLVAGPACQRLKRGEREAPASGPHGSXHKVAGPPWTGTTRVVHRRSTGPTVRIGREADRTARRRLGTARLGFKTGRPAMATGGDAHGRRRRQSTAWEATXDGAKSGGSGXRRRRTREGRRRTRERGKKGERRGASPASTATKAEDEXGGGDTATRRGGRAEATPIGKEERD

SEQ ID NO: 166043 - protein, 210 aa, Oryza sativa
  Clone ID: PAT_MRT4530_64791C.1.pep
MARLGFSALTNVLVVSYLKSTRNGKKNMLIWISYREPIDNHCGCPNWCFLGGALQPRQVTCIVLAAKRMTDDRSTTPPMYWDDVASTSSSSHPVAPYSSSSVIGENLLFHELWVCSFRDSCLWRAMSLDTFLMITPFGPTGECLLMTTLMTRKGVRCRSGNAELGQITDCQITVQLIVTSLRSLLPIEGHKQEEYCGFYRQEKFFDQQNA

SEQ ID NO: 166044 - protein, 121 aa, Oryza sativa
  unsure (1)..(121): unsure at all Xaa locations
  Clone ID: PAT_MRT4530_64792C.1.pep
HLHQYPLKTGRIRRGMAMTTAGDDDLGDDGTATSXWRRIWRRRRQRLATASTTADDGAASGNDDLGDDGADDGWRRLNDDLADLATARRRRRLATADLTTVRRRLATAASGNDSLDSTSDG

SEQ ID NO: 166045 - protein, 369 aa, Oryza sativa
  unsure (1)..(369): unsure at all Xaa locations
  Clone ID: PAT_MRT4530_64793C.1.pep
MSRSCCRTEPTSIFLCRIGTYHVRYLGIPMHFRKLNYKDWKIIEERIENNLSSWKGKHLSIGGRLVLVNSVLSSLAMFMMSFFXKIPRGVLQKNXFLILRFFWQGDNHKKKYILARWDIICQPKQLGGLGIHNIEIQNQHLLSKWLFKLINEQGVWQQLLRXKYLKKYSITQVGSKQGDSYFRSGLMKVKDKFLHLGTRVVNMXKQVRFWKDIWVGNSSLQDKFPFSYNIVRKRNISIATVINFVPLNISFRRALVGQNLINWHNLVALILHTXLNGSTGSFKWXLHQNGXFSIRSMYSSLINNGHIERNKFIWKLKMQIKSKIFMXFLFKGVILTKDNLARRNWNGSKTCCFFXMKNETIQHILFDCH

SEQ ID NO: 166046 - protein, 44 aa, Oryza sativa
  Clone ID: PAT_MRT4530_64794C.1.pep
HKWQYRISREEAQRLKHNRGDEFGAFTPRQYKSYQDVYNVPESS

SEQ ID NO: 166047 - protein, 126 aa, Oryza sativa
  Clone ID: PAT_MRT4530_64795C.1.pep
MAARGGAAALSLAPSASGCVAEELPPRASLPFPNTPRSRVPLAWLGWQTGRAAKSATWESAALSSLAMDGGRGRPLSGRCPLPCVVQMEMAMVYYGVANDVSAFANDDGTAVESELLDVGRQARQQ

SEQ ID NO: 166048 - protein, 83 aa, Oryza sativa
  Clone ID: PAT_MRT4530_64796C.1.pep
MATCYGLCLVAPGLEIGSVQPSMVVQIWWGICNRNQSVSRSSKFKMLAALRNFTGVIANVGPKDFSPDWPMGVRDVALLDIWY

SEQ ID NO: 166049 - protein, 182 aa, Oryza sativa
  Clone ID: PAT_MRT4530_64797C.1.pep
MACTELASDVYALPCGDDGTTALSTPVVVSVLASLLERHIARNERDQAAAADGEAARRRALRQRTAGHEPSRVPGAVLPRLLTTAILVASKFVEDRNYKNSYFAAVGGLTAAELSSLELDFLFLMQFRLNVSVSVFQSYCRPLEKEVSYGGGYQVERCLKKALVCSGEAQAQQRQAASAAAQ

SEQ ID NO: 166050 - protein, 94 aa, Oryza sativa
  Clone ID: PAT_MRT4530_64798C.1.pep
GPSPTTGQEGMYMDPFPPLLSARKNKGSSSRSFSIHKWWVSPCFFLSVFLLRLWIETQPFLPAFLFEQQILGGTMEKPEKQQNKKPGQISNSFS

SEQ ID NO: 166051 - protein, 284 aa, Oryza sativa
  Clone ID: PAT_MRT4530_64799C.1.pep
MPISFVSLLLPRVPFSWSVPPLFIASFCPHACLPLVYKGLHLQEFSVYLCSIGFVKNQAFAIEILQEMASTELASDVYALPCGDDGTTALSTPVVVSVLASLLERHIARNERDQAAAADGEAARRARAFDSGTVLDMSLHAFLERFSRYANVSPQVYVVAYAYLDRLRRGDGVRVVSANAQRLLTTAILVASKFVEDRNYKNSYFAAVGGLTAAELSSLELDFLFLMQFRLNVSVSVFQSYCRHLEREVSYGGGYQVERCLKKALVCSGEAQAQQRQAASAAAQ

SEQ ID NO: 166052 - protein, 260 aa, Oryza sativa
  unsure (1)..(260): unsure at all Xaa locations
  Clone ID: PAT_MRT4530_6479C.1.pep
SLSMRILSWNIIGLGDKKKKNXLLLSTLIEHRPDIVCLQETKLASIDRFTMPALLPVFLRDFHWQPALGSAGGLLTAWDSRELPTTLVHENSDSISCTFHSRTDQTKFWVTNVYAPHSEDEKLIFFNQLSTLRIANKELWCCIGNFNIYRYPFEENNDNLNTRGMVGFNCWINEEGLVDIDIPNRSFTWSNKRRNPTLVKLDRILVDTSWNQSFATSSARALVATTSDHIPILAECSNNXTHSDIFRLENFWLQLPDFVS

SEQ ID NO: 166053 - protein, 175 aa, Oryza sativa
  unsure (1)..(175): unsure at all Xaa locations
  Clone ID: PAT_MRT4530_647C.1.pep
MQCSLLPILALSQNDSILLKDVRPSLFIRSETTSFIRTIIDTGTTEPYCDGTVVFFTARXGWGYVIRDSDGDVVQAARGRINHLLSSFQAELLACVHRVRAAASLGIGKLILESDATMVKQAILTADYDLFDCNTVIWELKHLFSSNFQILSFQVKPREGNRVAHRLASCGCCCA

SEQ ID NO: 166054 - protein, 398 aa, Oryza sativa
  unsure (1)..(398): unsure at all Xaa locations
  Clone ID: PAT_MRT4530_64800C.1.pep
MAELLIISSLMMLLALVLYLCIGWPILSTLELPSIAANLHNLHDHLAGVLAASGHTVMARGTAATSSIRFFITCDPENVRHIFTSNHGNYPKGHEFAEIFDIMAGVSFTLDGEPYLRLRAKMLSILGDPRLVASMAASCLDKVRDGVLPFLARVATAGAPFDMQDLTGRLMFDVTSMAVFGVHPGYLSPGPDMPPAHAAAAMDTVMEVGLIRHAVPASWWKSMRRLNIGPERRLAAAHRVLXASSAALFETLRLYPPGHMERKTAVADDVMPSGHEVXRRRRGDAVLISLYSMGRMESLWGKDCREYRPERWLTGGDGGGSGGAQLRHVPSHKFLAFNSGARMCPGKSIAVMLMKTIAAAVVWNFDVEMVEGQAVEPKMSCLFQMKNGLMLKVKKRQI

SEQ ID NO: 166055 - protein, 179 aa, Oryza sativa
  unsure (1)..(179): unsure at all Xaa locations
  Clone ID: PAT_MRT4530_64801C.1.pep
MFTSVLLPVMKRPAANPSASVSPAYPQRGGGDAMPAWEMPSSSATARRCLRWISGPALRLLYRPNGSQHPFALSVCTSLGPLGSPTRAPFAISTEFNLLCSNLPVFSLLFKPXIGDFSLAKCDDHNGHRARQMWPPRGRAVVGSTHCCPGCASRPGACCRCGARRAYGSSGGCRCRSTN

SEQ ID NO: 166056 - protein, 208 aa, Oryza sativa
  Clone ID: PAT_MRT4530_64802C.1.pep
MPHAVELAVSPNPTSDDGDVVYGGRGDDNVYGDGTGCGGCVYGGDVFGSAAATASMESALVQESALAANTQYQLTADFRQCCATITDPPPVHLSTAGFAARMPSHLYIHCQRNSAALALPPPTRRYQIHRLYTSAPPAQNYSLSCYRRATVVVPLPPDPQPAHLDNVGSVAQMPKHCRIHHRSQSFAAWASPPLLVLVIVGPLPPLLV

SEQ ID NO: 166057 - protein, 136 aa, Oryza sativa
  unsure (1)..(136): unsure at all Xaa locations
  Clone ID: PAT_MRT4530_64803C.1.pep
EEDDPPLPAPFALPSGRXWRSRSGSAPPAGAPVLRPPHLTWPSRRHPDCPVTTPSRHRGLDAEETHRAQGAVAASWAAAGRPGQASXAALGRLRCPPPPRGLPWPSAAQLPXPGRPSRSSPPPRCPKPPPAAAAQI

SEQ ID NO: 166058 - protein, 510 aa, Oryza sativa
  Clone ID: PAT_MRT4530_64804C.1.pep
MGRIAQQRMQQAMLANNAANNLSEGNARTSNLGGGNMTSDNQVHQATQSGGAAVSHDGGNLQGQESDRSNVEGGTSAGHDQASAFDAAKDIMEALRSKHTNLANELEVLLSEIGSRFVTLPEERLLAVVNALLHRCYKYPTATTGEVPQSLKKELSGVCRACFSQDAVNKHVDFVKEYKQDFERDLDPESATTFPATLAELTERLKHWKNVLQSNVEDRFPAILKLEEESKILRDFHVVDIELPGQYFTDQEVAPDHTVKLDRVGPDIPIVRRHGSSFRRLTLIGSDGSQRHFIVQTSLTPNARSDERMLQLFRVLNKMFDKHKESRQRHLAIHTPIIIPVWSQVRMVEDDLMYSTFLEVYEINCARHNREADSPITIFKEQLNQAISGQVSPEAVVELRLQAYNEITKNIVNDNIFSQYMHKILPTGNHLWTFKKQFAIQVALSCFMSYMLQIGGRAPNKILFAKNTGKIFQNDFHPAYDPNGMIEFNELVPFWLTRNMQAFFSISVLK

SEQ ID NO: 166059 - protein, 3662 aa, Oryza sativa
  unsure (1)..(3662): unsure at all Xaa locations
  Clone ID: PAT_MRT4530_64805C.1.pep
PPAIFPLQAYHTPLHGTLRPSPVQVGLELAMEVRDSLEMTHTPDYLNFLRCYFRAFSAILSNFTGQQGTENAEHKLRNMVIEILNRLPHSEVLRPFVQDLLKLSLRVLTQDNEDYVLLAIRIVFDLLRNFRRTVEVEVQTFFEFVVTINRNFPNTVPHFLAKPCKRAIDRPTARGPKTLGVMAGKVLSSPAPRTSTASDRRPASILTSWAVDTVLQVCVAHDCRRLHAADPDQVSTAVATNQVHPSGAINPRLRNRIPARRSSPTHISARQERQGALRPSMTGXALHGAAQDLLRLRQGRHARAFDRRPPTADKQRKLQEWRARHQPRQVQCHLEQAQRHRRRALGSHTPGSGTGTLPEXTREGFLPLPRAPSRQSSSAARCSGTDSYEINHYKSLIRTLVLGMKTIIWSITHAHWPRPQQQSQQSSNLSVQPFRGLREDEVRKTSGVLKSGVHCLALFKEKDDERDIEQGFSPVRAITFPATLAELTERLKHWKNVLQSNVEDRFPAILKLEEESKILRDFHVVDIELPGQYFTDQEVAPDHTVKLDRVGPDIPIVRRHGSSFRRLTLIGSDGSQRHFIVQTSLTPNARSDERMLQLFRVLNKMFDKHKESRQRHLAIHTPIIIPVWSQVRMVDGLSYDVQXTFLEVYEINCARHNREADSPITIFKEQLNQAISGQVSPEAVVELRLQAYNEITKNIVNDNIFSQYMHKILPTGNHLWTFKKQFAIQVALSCFMSYMLQIGGRAPNKIXYLLKILARSSRMISIQLMIPFLVPLDRSIHFAVSAVIQRTCFSNFDRKQALQFIRVCLDSLLNLRENVPGEGVRFGVCFSRDELLSWSWRRPLGIPSVPVAAGMINPLDFQQKVINNVEHVITRIKLISPHYLADEEENSSEPPQSVQRGVTDLVEAALSSRNLCMMDPXMAPVVLKSENKLSLLSPGQIFTIAFCSLTEIAXGDVXLTLFGNNRELVVVSSYLVSEHXIKIFNQGTPRLLHCCYGSTWQAQMGGVMGLGALVGKVSVDTLCIFQVRVVRGLIHVLKRLPMHANKEQEETNHVLTQVLRVVNNADEANSEHRRQSFQGVVEFLAVELFNPNTSIVVRKNVQACLSLLASRTGSEVSELLEPLYLPLLQPLISRSLRSKNIEQQVGTVTALNFCLALRPPLLKLSPELVNFLQEALQIAEADETVWVTKMMNAKIIMTWNKLRTACIELLCTAMAWGDLKAPNHSDLRAKIISMFFKSLTCRTTEIVNVAKEGLRQVVQQQRMPKDLLQSSLRPILVNLAHTRSLTMPLLQGLARLLELLSNWFNVTLGAKLLDHLKKWLEPEKLAQSQKSWKAGDEPKIAAAMIELFHLLPPAASKFLDDLVTLVIDLERALPEDQFYSEINSPYRAPLAKFLNRYAVEAVDYFLARLSHPKYFRRFMYIICSDTGELRDQLAKSPQKILASAFSQFYSQTEAAGNQSSSVKDEGLTGAITEGFTGQSSSNMATGSDSYFNGLELISTLVKLMPEWLCNNRVVFDTLLLAWKSPSRIDRLQNEQELSLPQVMESKRLIKCFLNYLRHDRTEVGALFDMLSIFLYRSRIDYSFLKEFYVIEVAEGYAPNLKKIILNHFLNIFQSKHYGQDHLVVAMQILILPMLAHSFQNGQSWEVVDPSIIKTIVDKLLDPPEEVSAEYDEPLRIELLQLATLLLKYLQSDLVHHRKELIKFGWNHLKREDNSSKQWAFVNVCHFLEAYQAPEKIILQVFIALLRTCQPENKLLVKQALDILMPALPRRLPPGDSRMPIWIRYTKKILVEEGHSIPNMIHIFQLIVRHADLFYSCRAHFVPQMVNSLSRLGLPYNTTAENRRLAIELAGLVVAWERQRQSEMKVVQESENTSQIGDMLSPVIGGDPKRSSDVPTFGDDLSKRVKVEPGLQPLCVMSPGGASIPNIETPGSSGQPDEEYKPNAAMEEMIITFLIRVSLVIEPKDKESSSMYKQALDLLTQALEVWPNANVKFNYLEKLLGNLTPSQSKDPATALAQGLDVMNKVLEKQPRLFIRNNINHISQILEPCFNNKMLDAGKSLCSLLKMVFSAFPLEAATTPQDIKLLYQRVQDLIQKHLAAVTTPQISLEPSNANSIISFALFVLNALAEVQKNFIDPFIGLLLRVLQRLARDMGSSAGNHVRQGQRPEQDSSVNSRPTVDPMVISNMKTVLKLISERVMASSEFRRSMGQTLQALLSEKGTDPSVLLCILDMIKAWIEDDYRLASSTGSVSSLNPKEIIAYLQKLSVVDRKSFPPSVQEEWDAKYLQLLYSLCGDTAKYQMALRQEYFHKVERQYMLGLRAKDPEMRKRFFKLYHDYVGKTLFARLQFIIQTQDWEAVSDVFWLKQGLDLILAILVENEPITLAANSARVPALMTSGPVSDRMIMPQQAPDAQESLDGTSLSFDSLTTRHAQFLNEASKLVVADVMAPLRELAFADPNVAYHLWVLVFPIVWVTLHKEEQVALAKPIIALLSKDYHKRQQGCRPNVAQALLEGLHLSHPQPRMPSELIKYIGKTCNAWHTSIALLESHMMHMNEAKCSESLAELYRLLNEDDMRYGLWKRRSITAETRAGLSLVQHGYWQQAQNLFYQAMIKATQGTYNNTVPKAEMCLWEEQWLSCATQLGQWEVLADFGKGVENYEILLDCLWKAPDWTYMKENVIPKAQVEETPKLRLIQSFFTLHDKGTNGVGEAENLVSKGVELALEQWWQLPEMSVQSRMPLLQQFQQLVEVKESSKILLDIANGNKPASGNSGANSNHHNSFADLKDILETWRLRTPNEWDNMTVWYDLLQWRNEMYNSVIDAFKDFGQTNPQLHHLGYRDKAWNVNKLAHIARKQGLPDVCVTILDKMYGHATMEVQEAFVKICEQAKAYLEMKGELVSGLNLINNTNLEFFPVKNKAEIFRLRGDFLLKMNDCENANVAYSNAITLFKHLPKAWISWGNYCDMVFKETKDEIWLEYAVFLQALYYWLRTYLMERRDVATKTEMGRIAQQRMQQAMLANNAANNLSEGNARTSNLGGGNMTSDNQVHQATQSGGAAVSHDGGNLQGQESDRSNVEGGTSAGHDQGQPSSTGADGSQMPARRNNGLGWVTSAASAFDAAKDIMEALRSKHTNLANELEVLLSEIGSRFVTLPEERLLAVVNALLHRCYKYPTATTGEVPQSLKKELSGVCRACFSQDAVNKHVDFVKEYKQDFERDLDPESATTFPATLAELTERLKHWKNVLQSNVEDRFPAILKLEEESKILRDFHVVDIELPGQYFTDQEVAPDHTVKLDRVGPDIPIVRRHGSSFRRLTLIGSDGSQRHFIVQTSLTPNARSDERMLQLFRVLNKMFDKHKESRQRHLAIHTPIIIPVWSQVRMVEDDLMYSTFLEVYEINCARHNREADSPITIFKEQLNQAISGQVSPEAVVELRLQAYNEITKNIVNDNIFSQYMHKILPTGNHLWTFKKQFAIQVALSCFMSYMLQIGGRAPNKILFAKNTGKIFQNDFHPAYDPNGMIEFNELVPFRLTRNMQAFFSNFGVEGLIVSAMCSAAQSVVSPKQSQHIWHHLAMFFRDELLSWSWRRPLGIPSVPVAAGMINPLDFQQKVINNVEHVITRIKLISPHYLADEEENSSEPPQSVQRGVTDLVEAALSSRNLCMMDPTWHPWF

SEQ ID NO: 166060 - protein, 120 aa, Oryza sativa
  Clone ID: PAT_MRT4530_64806C.1.pep
GYPPGLAGTRSPLGWPLGVVLVSPRGVWGMRAGTRTVPAPAGIVFPARNGNPPRQPSGRCQATARRSSIPPERFAPARRLRVGTADRHRSRGLTRAPWARPIPPLGHGDLPRVSALCPPF

SEQ ID NO: 166061 - protein, 953 aa, Oryza sativa
  unsure (1)..(953): unsure at all Xaa locations
  Clone ID: PAT_MRT4530_64807C.1.pep
MAEVLMAVERNREAENAVLQQIAASAAATATHIAQGAGGGGHHAAGGLAEFQRTQPPVFTRSDDPLDADDWLRTIERKLTLIRCPDAEKTNLAAEQLQAAAGDWWENFLAMQPDGRVVTWAQFRDAFRAAHVPKGIMDLKQCEFLSLTQGNKSVMEYLCEFNHLARYAPDDVKTDTRKQNRFMNGLSAEMQLELAAHSFLDFQDLVNRQAGHYINQCPYPHRAQLQGPRPAAPRPNPPLRSAPQGQQTQKRGRVNHVTAEEANDAPDVLVGTLLVHSYPASVLFDSGATHSFVTKGFASDHKLPISRLHPPLIVTSPDSEIIAEFISRDTKIAIQGVEFTAELTILHTKGLDVILGMDWMHKNHGVIDCGHRLVTLENNTGELIFLALDDHSPQLHALSGAKAIDITAVPVVCEYPDVFPEELPGMPPDREVEFVIDLLPGTAPISKRPYRMPPNELEELKRQLTKLQAKGFIRPSSSPWGCPALFVKKDLSLRIPEDIPKIVFSTRYGLYEYTVMSFGLTNAPVYFMSLMNLIFMEYLDQFVVIFIDDNLIYSKSEEEHEKHLRLVLEKLREHHLYAKFSKYLNLRQRRWLELIKDYDMGLHYHLGNANVVADALSRKPQCNCLSVIVDRLTKSTDFLPIHSTDMVSKLAELYLSRIVCLHGVPTKIISCLHKAMGTKLFFSTAYHPQTGGQTERVNQILEDMLRACVLEYGKNWEKCLPFAEFSYNNSYQSSLQMSPFEALYGRRCRTPLNWSESGERPFFGPDIVMEAEEQVRLIRDRLRTAQSRQKSYADRRRRELSFKVGDHVYLKVTPFKSTHHFGVKVKLAPRYIGPYRIVAKRGAVAYQLDLPSTLSSYHDIFHVSQLKQCLRVPTEEXSIEDLDLQPDLSYQEHPIRILDEIERTTRRHTIKFFKVQWSNHTPDEATWEREDHLRDAYPFLLTDPSQSQGRDSF

SEQ ID NO: 166062 - protein, 191 aa, Oryza sativa
  unsure (1)..(191): unsure at all Xaa locations
  Clone ID: PAT_MRT4530_64808C.1.pep
WILTFTRSFGTAELTSWEELEGLLQNVALQANPDKLTCGFQRKTGXYYQKSVYRALTFRRVLDLRMKDIWGAPIPLKHKHFPXLACKNIIQSTSQLKRRNWVRSKFCQLCDQLEDANHISFTCPIDTFIWCVCRVALGWDMIPILAFRILLTLTLGELDLNFLELRLCFVLQRIGNSGLCEMALFSDTSWF

SEQ ID NO: 166063 - protein, 1086 aa, Oryza sativa
  unsure (1)..(1086): unsure at all Xaa locations
  Clone ID: PAT_MRT4530_64809C.1.pep
MRQRRPEAEQWQQRHCCRWGCTSGGLRGKWTACRGRGGDCDAGGGDGTAGRRKARTCAAHAEGREGEEGGGLGRQVGWAGIGQGRPKRKRREERKLTLIHCPDAEKTNLAAEQLQGAAGDWWENFLAMQPAGRVVTWAQFRDAFHAAHVPKGIMDLKQREFLSLTQGNKSVMEYLREFNHLTRYAPDDVNTDTCKQNWFMNGLSAEMQLELVAHSFLDFQDLVNRSVVIESKMKNLEAECKRKRAAQISAAGGSQKPHGWQPPPPRFQAPPPPRPQGFVPCPPQQRVAPPVGGNQQAIRPPVRSNNCFNCGQAGHYINQCSYPHHAQLQGPRPAAPCPNPPLRSAPQGQQTQKRGRVNHVTAEEANDALDVLXGLGVILGMDWLHKNHGXIDCGHRLITLKNNTGEPIFLALDDHSPQLHALSGAKTIDIAAVPVVCDYPDVFPEELPGMPPDRDVEFVIDLLPGTAPISKRPYRMPPNELEELKKQLTELQAKGFIKPSSSPWGCPALFVKKDLSLRMCVDYRPLNEVAVKNKYPLPRIDDLFDQLTGAHVFSKIDLRLGYHQIKIRPEDIPKIAFSTRFGLYEYTVMSFGLTNAPANFMSLINSVFMEYLDQFVVIFIDDILIYSKSEEEHEKNLYLVLEKLREHRLYAKFSKCEFWLKEVGFLGHVLSEGGVAVDPSNVQKVLDWGQPKNPSDIRSFLGLAGYYRRFIENFSKIAKPMTQLLKKNEKYVWSAECEQSFQTLKEKLTTAPVLILPDIHKSFDIYCDASRQGLGCVLMQEGRVVAYASRQLRPHEVNYPTHDLELASVVHALKIWRHYLIGNRCEIYTDHKSLKYILSQSDLNLRQRRWLELIKDYDMGLHYHPRKANVVADALSRKPQCNCLSVKPRSETLCSEIHKLGLEMVPHGSLAALEVKPTLYDQIKEAQKDDKALYGRRCRTPLNWSESGERPFFGPDLVKEADEQVRLIRERLQTAQSREKSYADRRRRELTFDVGDYVYLKVTPFKSTHRFGVKGKLAPQSLARSVTVHQEVLASIRDWKQPKTVTQIRSFLGLAGYYRRFIENFSKIARPMTQLLYKTFLTLFIS

SEQ ID NO: 166064 - protein, 195 aa, Oryza sativa
  Clone ID: PAT_MRT4530_6480C.1.pep
MARLGAAGMVRGRHGSGRKDVARLRRPPAGGDGSPSSPLACCAPSSTPATASSSCRATGLSATSADSIDGARKCSSTFLALTSNLPNGDDGSAAPPPLPPTSNSGRGDPAMVVSSSDIKRGAETSLAVDKVADVAMATRAHGSCGGTAAWLGGGPTRALCAVVRCTGGRCEAAWALLARPGAMWDFQDVTIGAGQ

SEQ ID NO: 166065 - protein, 170 aa, Oryza sativa
  Clone ID: PAT_MRT4530_64810C.1.pep
MTRPSTRSQSHDAPEGSRSRGDEPPPPPTMAEVLMAVERNREAQNAVLQQIAASVAATAAHIAQGAGGGGHHATGGLAEFQRTQPPVFTRSDDPLDADDWLRTIERKLTSSPYRPPAAPPPTAAASSIADCRRPPPLPPCTVGLAEKGKSERDEEGREEGKRERRLMWPC

SEQ ID NO: 166066 - protein, 35 aa, Oryza sativa
  Clone ID: PAT_MRT4530_64811C.1.pep
VGACSDVLLERESSPQVADSRQEDLARRTLNKHHA

SEQ ID NO: 166067 - protein, 69 aa, Oryza sativa
  Clone ID: PAT_MRT4530_64812C.1.pep
YPHRVIHFDLLTPRRHITVSCQVWYLSEHLSEYFELKNPVGLICIIQHNILPLQSIFTPFSQFLQGIFS

SEQ ID NO: 166068 - protein, 238 aa, Oryza sativa
  Clone ID: PAT_MRT4530_64813C.1.pep
MTRLAAAALRRATAASGIPSSSSRSSVLAPFAPRLFSTEASGETPAAGAAAQGSQDEPFFKPSDEGVAYGRFYSVIPGGSRLPKSMLKTDIIHHLDKSELSLDDVKIDYNRGYYPVGALLRFSSVPLFNTAVRQTREGRQYRLEMISREEFDLKQSYDGKAILLQGVPRNAVPEDIERFLCGTNVEPPPFESFLRPGVPDPIRVVLVKFRSRTDAANAFITKNRGFCLNNPVSMRVLQ

SEQ ID NO: 166069 - protein, 116 aa, Oryza sativa
  unsure (1)..(116): unsure at all Xaa locations
  Clone ID: PAT_MRT4530_64814C.1.pep
MARAIRIYVPYWISFARLPPINLQLIDISGRKDKRRFLARPRSERSEKILYEINHEELVEGYTIASGLNFKGLXLSASACRHGSGQFGLLXELSPLGDMDGAXDISAYDDDGKCTH

SEQ ID NO: 166070 - protein, 370 aa, Oryza sativa
  Clone ID: PAT_MRT4530_64815C.1.pep
MSPPADTAALASTSGAPLAPLVAAQLNFVLSQANLPIRVGQIWSGCRDGRYADRFTLAIPFCLDYVYWDFLYNALSPKVAPDVVFGPDDEGFQPLVDFDETGSGEKSCLANWDCRDTSALLSLIKELREFYIEYQKKRAAEVDDARLKFEISTVLSKEGIEVCTVSSNGRPDEVKFAVPLLDLDLAKLVPGCPWKLPQKIHLQAVFPISRSYSSVPSAPRLKLVSTPDLKSFFSVDDVKLPPWLDGMCMAEYLPNLEENLKIQVVEASASIGSRRRFIEALAPTFGRPLEADPVHFVIPLQFPKHQPVLTLESSQHFNAQGLPIMSAPVNDYPWSPRWDPTEMVERIYDFLVDECQTFKKFCSDSIPQQK

SEQ ID NO: 166071 - protein, 202 aa, Oryza sativa
  Clone ID: PAT_MRT4530_64816C.1.pep
SIDDEAIYIVVGLIDRAMAEERRRDDGGDVEVELSLRLRTGDDSTSADPAPATVAAEARRNLTIFYNGRMCAVNVTELQARTIISMASQGNFGKQQQQQIQGRDDHHYHQGESSSGGGVSTAAARHCDVAGSSSSHSGSGSGSATPPRPALVSPRAGLQAAAAAAPTMNQPPAASGLSMKRSLQRFLEKRKTRAAAPLYARR

SEQ ID NO: 166072 - protein, 32 aa, Oryza sativa
  Clone ID: PAT_MRT4530_64817C.1.pep
KIKKKKKIKNKKKKKKSLKKKKKKKKKKKKKK

SEQ ID NO: 166073 - protein, 1074 aa, Oryza sativa
  Clone ID: PAT_MRT4530_64818C.1.pep
MAFAFQSAAKAKRLQARSAEIEQRRLHVPIMDRSIGEPPPFVVVVQGPPQVGKSLLIKCLVKHYTKQNLSEVRGPITVVSGKSRRVQFLECPNDINGMIDAAKIADLALLLIDGSYGFEMDTFEFLNIMQVHGFPKVMGVLTHLDKFKDVKKLRKTKQRLKHRFWAEIKEGAKLFYLSGLIHGKYTKREVHNLARFISVIKPIPLSWRMAHPYLLVDRFEDVTPPESVRLNRKCDRKITLYGYLRGCNMKRGTKVHITGAGDFSLSGVTSLADPCPLPSAAKKRGLRDKEKLFYAPMSGLGDLLYDTDAVYININPHLVQFSKTGENDASKKQGKGQDVGVTLVKTLQNPRYSLNEKLDQSFINLFGRKPAAQSEDISGNQNDQGDANILEEADGNNICNANTLESNDHSYSECSSDSEHDNDEATQQNDHEVGLREEVEFCNGRMRRKAVSANFKDDDDDEGAEEDDVDSENSGDDQLSEGSADDSEESLDSDDETENNSKWKESLLARTLSRRSANLMQLVYGQASKKLDEGNDSSAEESSDEEFFVPKGQKKQAKNESTSFDDMDAEDYSKFFKTELRDWSDEDLIKSIRDRFVTGNWSKAALRGQEINENDVDDEEVDGDFEDLETGEEVDNDTKKSKREETNGGGYFDKLKEEIEIRKQMNISELNDLDEDTRVEIEGFRTGSYIRLEVHGVPFELVEYFDPCHPILVGGIGLGEENTGYMQASLKRHRWHRKVLKTKDPIIVSIGWRRFQTTPVYAIEDRNGRHRMLKYTPEHMHCFAMFWGPLAPPKSGVLAVQHLSNSQVPFRITATGFVQEFNNTARIMKKIKLTGVPCKIFKKTALVKGMFTSDLEVARFEGATIRTAAKIEPGDMPRRKGESIDGIARCTFEDRILMSDIVFMRAWVNVEVPTYCNLVTTALQPQDETWQGMRTTAELRRAHNIPIPHNTDSVYKPIERKVRKFNPIEIPAKLQHLLPFKSKPKDTPKHRKTPVENRVPVLMQPSEKKTHAAIQQLRLLKHEKARKKKLQDEKKKKAYEAEKAKSELLTKKRQREERRVRYREEDKQKKRARR

SEQ ID NO: 166074 - protein, 268 aa, Oryza sativa
  unsure (1)..(268): unsure at all Xaa locations
  Clone ID: PAT_MRT4530_64819C.1.pep
PEFPGRPTRPGIGLGEENTGXYMQASLKRHRWHRKVLKTKDPIIVSIGWRRFQTTPVYAIEDRNGRHRMLKYTPEHMHCFAMFWGPLAPPKSGVLAVQHLSNSQVPFRITATGFVQEFNNTARIMKKIKLTGVPCKIFKKTALVKGMFTSDLEVARFEGATIRTVSGIRGQVKKAAKIEPGDMPRRKGESIDGIARCTFEDRILMSDIVFMRAWVNVEVPTYCNLVTTALQPQDETWQGMRTTAELRRAHNIPIPHNTDSVYKPIEPE

SEQ ID NO: 166075 - protein, 119 aa, Oryza sativa
  unsure (1)..(119): unsure at all Xaa locations
  Clone ID: PAT_MRT4530_6481C.1.pep
MERRVSLLLPLILSPCSPPPPXRPPPTPDPPREPHRCRIVVGTPVDAAYLPPTPNLLWETSPLPDLPWENPLTPPHPLLTLPPLYPPREKPPPPMPDTGRRTRRRWREQERGGGQRVVD

SEQ ID NO: 166076 - protein, 259 aa, Oryza sativa
  Clone ID: PAT_MRT4530_64820C.1.pep
MPHLADQPTISKYMESLWGMGVRVWQEKSGGIQREEVERCIREVMDGDRKEDYRRSAARLMKKAKEAMHEGGRQCGAHVSTCRISITFPKPSGAARLPATKEGGRAYRSGDDGGGVDAGARRGDEAQRGGGARRLRGGGGGFQIGGDAGDGKERGKGEKVMRTNMLIECRKSRVFVASRLHELMSEAKRHSLYFCRLGKQRAQLTVFGHMIHPFAEEAGDLRSWAFFNWMVLVAIGALSNAITTIVSYLSAKSTCLNLR

SEQ ID NO: 166077 - protein, 458 aa, Oryza sativa
  unsure (1)..(458): unsure at all Xaa locations
  Clone ID: PAT_MRT4530_64821C.1.pep
MGEASSSSGHPRQNPHVLGYGFHGAMPNSLPSANLFEQQGGANYFGELEEALMQQVATLRRTQQTATTTSTLHHGDTTPFSTTATAAATARPPPTLDIFPSWPMRSLHTPKEGSNVTADTTDSESSSKNNSNQNASSDQHVLVGDMAGQFDQIPQQEQHKKMATNSPTHSSKTGKALDPKTMRRLAQNREAARKSRLRKKAYIQQLESSKLKLAQMEQDIHRARSQGLLLGAPGGNTSSGAAMFDVDYARWLEEDSQRMAELHGGLHAHLPDSDLRAIVDDTLTHYDHLFNLKGMAAKADVFHLITGMWATPAERCFLWMGGFRPSELLKTLTPQLDPLTEQQVVGICNLQQSSQQAEEALSQGLDQLHQSLAETVAGGSPLDDPNVGSFMGHMAIALGQLSNLEGFVIQIKIGVALSLCXLNFINXVRQAARCFLAIGEYHNRLRALSSLWASRPRE

SEQ ID NO: 166078 - protein, 121 aa, Oryza sativa
  Clone ID: PAT_MRT4530_64822C.1.pep
MGANGNDVVAAAAAEESPMGAARVVAEGGATVFRGADYSLPRTTVALALRLGGIHFNVFLVLASLFLFPLRVAAMVVAFQLLFMLIPLNDKDKLCRKIARFICRYAMGYFPISLHVEDYKC

SEQ ID NO: 166079 - protein, 78 aa, Oryza sativa
  Clone ID: PAT_MRT4530_64823C.1.pep
CYIVTNQDASSLSSSSCLFLHDLLPCGSQQSGTIGSGTAKPPCEHPSSIFHSSRMAFLGTCKATHLKSFILVLLASTQ

SEQ ID NO: 166080 - protein, 370 aa, Oryza sativa
  Clone ID: PAT_MRT4530_64824C.1.pep
MGANGNDVVAAAAAGESPMGAARVVAEGGATVFRGADYSLPRTTVALALWLGGIHFNVFLVLASLFLFPLRVAAMVVAFQLLFMLIPLNDKDKLGRKIARNVAPFPPIAENFSHLFLGCWTDREHVPCCRFICRYAMGYFPISLHVEDYKCFDPNRAYVFGFEPHSVLPIGVAALADLVGFMPLPKIKVLASSAVFYTPFLRQIWTWLGLIPATRKNFQSYLGAGYSCIIVPGGVQEILHMDHDSEIAFLKSRKGFVKIAMQSGCPLVPVFCFGQSYAYKWWRPKGKLFVKIARAIKFTPIVFWGRYGTPIPFPTPMHVVVGRPIEVEKNSQPTIDEINEVHEQFTVALQDLFDKYKTETGYPGLHLRVL

SEQ ID NO: 166081 - protein, 114 aa, Oryza sativa
  Clone ID: PAT_MRT4530_64825C.1.pep
MDGDTLSAAAAEDGKVLHAFQTSFVQVQSLLDQNRVLINEINQNHESKVPGDLSRNVGLIRELNNNIRRVVDLYADLSSLFAASSPGPAASEGASVGTAVRHAGHKRVRSTHLD

SEQ ID NO: 166082 - protein, 1039 aa, Oryza sativa
  Clone ID: PAT_MRT4530_64826C.1.pep
MARAMMLLLFCSYALALVSAGSSSSSNATADELALLSFKSMLSSPSLGLMASWNSSSHFCSWTGVSCSRQQPEKVIALQMNSCGLSGRISPFLGNLSFLKTLDLGNNQLVGQIPSELGHLSKLRMLNLSTNLLRGSIPVEMRGCTKLMTLHLGNNQLQGEIPAEIGSSLKNLINLYLTRNLLSGEIPQSLAELPSLELLSLSHNKLSGEVPSALSNLTNLLNIRFSNNMLSGVIPSSLGMLPNLYELSLGFNNLSGPIPTSIWNISSLRALSVQGNMLSGTIPANAFETLPHLEELYMDHNHLHGKIPVSLGNSSNLSMIILGANLFNGIVPQEIGRLRKLEQLVLTQTLVGAKEQKDWEFITALANCSQLQVLVLGMCEFGGVLPNSLSSLSTSLKYLSLSYNNILGSIPKDIGNLFNLQVLDLAWNSFIGTLPSSLGRLKNLHYFNVYNNDLGGPIPSTIGNLTELITLYLMSNTFSGRLTNSLANLTKLTELDLSSNNFIGPIPSGLFNITTLSIALELSYNKFEGSIPQEIGNLVNLVKFNAESNKLSGEIPSTLGQCQNLQDLTLQNNMLNGNIPEQLSQLKSLQTLDFSRNNLSGEIPIFIENFTMLSYLNLSFNIFTGEVPTTGIFTNSTAISIQHNGRLCGGITTLHLPPCSSQLPKNKHKPVVIPIVISLVATLAVLSLLYILFAWHKKIQTEIPSTTSMRGHPLVSYSQLVKATDEFSIANLLGSGSFGSVYKGELVAQIGESPYYVAVKVLKLQTSGALKSFAAECNALRNLRHRNLVKIITACSSIDNSGNDFKAIVFDFMPNGSLEGWLHPDKDDQIDHKYLNLLERVGILLDVANALDYLHCHGPTPVVHCDLKPSNVLLDAEMVAHLGDFGLAKILVEGNSLLQQSTSSMGFRGTIGYAPPEYGAGNTVSTLGDIYSYGILVLEMVTGKRPIDNKSIQGLSLREYVELGLHGKMMDVVDTQLFLGLENEFQTADDSSCKGRINCLVALLRLGLYCSQEMPSNRMLTGDIIKELSSIKQSLVGNT

SEQ ID NO: 166083 - protein, 104 aa, Oryza sativa
  Clone ID: PAT_MRT4530_64827C.1.pep
PLAVVKPRAVMSSDRVASSLLSHRALGDVASTRSAATIPASARSAANPDNLHESSRHQGLFFSTSKQRRGTSKSVVQAKHIESQSRRWKKGMKPGEEILHQSIA

SEQ ID NO: 166084 - protein, 89 aa, Oryza sativa
  Clone ID: PAT_MRT4530_64828C.1.pep
MDGRFAGVCFLLVLLLLANPTSADELDPGTCGTEVDPLDPCIQTLCKWNCELVAMKRGGHLTSYECGDRECKCDFCASSIGADEHGLHV

SEQ ID NO: 166085 - protein, 83 aa, Oryza sativa
  Clone ID: PAT_MRT4530_64829C.1.pep
MVNDIRRSLSVVVVGKLPSNPEEVIVQEVCRVHELKAGSLGIVKENCGMAQKIQCFIMLKGLAILYDYILASKIKDATLAFGP

SEQ ID NO: 166086 - protein, 83 aa, Oryza sativa
  Clone ID: PAT_MRT4530_6482C.1.pep
KARRRTSPSPSRRRHGCCCELQRKEKKIKNSNQKVFSVCVMSWKILSLFPIFSFIAGLVSQPAGGAGLQQLSFRSAAAERLVL

SEQ ID NO: 166087 - protein, 821 aa, Oryza sativa
  Clone ID: PAT_MRT4530_64830C.1.pep
MALTNGREKRGEMRERNEKRKNARIIWSEKIRKHGEGFALAHRCRLRLRLRRSPSIPRASRAPSFILLHPDYLGPMEEEEYNTESSNEEDMQEDDGEKQGNVAEGDIFKPVDIDPAFVPKVGMVFESEEDAFQFYVSYGCRSGFGITRRSNNTFDGFRYRSTFICSKGGQSRLRSGATRSARKRGTKTGCKAKMIVKDAHFQNRWEVIVLELEHNHPLDPSLLKFKKQLKNSPFLQNPPLMLEAPDSSSAAALSSRGGDSGIPLSTQIEFRTKIDRNRKLKLAEGDLDALLSFLNKMQDQNPYFFYSLDMNEQGQLRNVFWADAKSRSSYNYFGDVVAINVRNFSDQYEIQFVSFVGTNHHAQQVLLGCGLLAGRSLGAYVWLFDTWVRCMNSTPPPSVITNYCHDVAIAVKKVFPNARYRFCLLDILNELPEKLEETEKKDEIVSAFSSLAFDSITMPDFDKDWQEMVEQFHLEGNEWLSKLFEVRTQWAPVYVKDSFWAGMSITERSDSASDYFDGWLMPDTSVKMFVEQYESAVKVKLEKENYEDLRSSQMRPPVMTGVSVEEQAAKMYTLEIFQKFLDEIGHSFHCNYSILDRNESVVTYIVSDHIDETKKVDYKVAYDNVEDDILCLCRLFQFKEVVEFGSVNSESKGYALSIMREIRDKVISYEKSLRDQRVDSHVSTANFAYNPVNEDFNDDTLPISLSTKGWDVVQGQSKRSRKKKLATPNVLDTLKKKTKRAYNKRRNAMANTLNTAVTTTESITDATNVQHNQVNEGWPLTSTGAHETFPYGVETISFDLSQYNSAPSFHWPESSSRSQLQ

SEQ ID NO: 166088 - protein, 237 aa, Oryza sativa
  Clone ID: PAT_MRT4530_64831C.1.pep
MYRSGRDGRKKLKLVDSDDFIEEEPEMDEPKKRLSEADSHSDVKNETTGLMTRQRALQGRGGNGETLIEFPDGLPTASSRRQKDKASEVEAQAKKAEAAQRRKLQVEKAEREQQAEAVRKILGIDIEKKKEERKQKERDEKEKQEKTEEYRRNCIQCVMGPEGTVVTFPDKMGLPSIFDSKPISYPPPREKCAGPSCTNPYKYRDSKTKLPLCSLQCYKAVQGSSEAAQGSSETLTC

SEQ ID NO: 166089 - protein, 89 aa, Oryza sativa
  Clone ID: PAT_MRT4530_64832C.1.pep
VGAIDSHQMCGGIIMLDAGLPTHVTSNCITYSYLARYAFYLCADQLLEANNCGADPVESLWWGMIHGRHYPVMVHHNTIFDVQLNVLTT

SEQ ID NO: 166090 - protein, 112 aa, Oryza sativa
  Clone ID: PAT_MRT4530_64833C.1.pep
HGGGPAPHFFGHTKGKGSKKIKPHKVDLRAHLLAFYWWGAETFVKNRNTTLLEEDKFFPTQIVHPGGGELRGGVFPPRRLFDEGYQPKRGGFFLPGEILGGFWGPFFFFGGL

SEQ ID NO: 166091 - protein, 186 aa, Oryza sativa
  Clone ID: PAT_MRT4530_64834C.1.pep
EPNITTPDAGHPSPPSRLLSKHRPRRGAAAPRASLHPPAPPHPRVRLNLCHCCGVRFPPAPPGAKRRPVRPLRSLWRVVLLCTECLSLVRSAAVCSYCLSLDNLPPEDSSVTCRCCNRCVHPYCIAGEHRAALIQPIDVENFICVDCCPTVKPGGKNGGASSVHMLQQSPGSRGRGISWLNQKRML

SEQ ID NO: 166092 - protein, 151 aa, Oryza sativa
  unsure (1)..(151): unsure at all Xaa locations
  Clone ID: PAT_MRT4530_64835C.1.pep
FRLGGVACMIGPVHPXTFWVFRFFADMGMLFPKEKGYFLWFKKAGFKDVKLQRIGPKRFPGXPRHGLILGFFLPGVKKKHGDSPFQLGPKVXDVTQPVDPFPFLFRFLLGTIFAAYFVLGPFSLWIKGPILPQGLPFLGGLTLLPKRIAHF

SEQ ID NO: 166093 - protein, 30 aa, Oryza sativa
  Clone ID: PAT_MRT4530_64836C.1.pep
TRNLRTKAKTPGKFGNFDILKTNHCIAKRF

SEQ ID NO: 166094 - protein, 65 aa, Oryza sativa
  Clone ID: PAT_MRT4530_64837C.1.pep
NTYSRGSHYFYLQMPYPTPYFTRTYHFYIKAVSDQVKQTQKNGHGRENQKTMNKPGSTPNKVGGQ

SEQ ID NO: 166095 - protein, 181 aa, Oryza sativa
  unsure (1)..(181): unsure at all Xaa locations
  Clone ID: PAT_MRT4530_64838C.1.pep
MTNTGGVRVEGRRGRGRRCRCDAGGDDDVGRHTGTEEGVAEGNVGEVEGEARVEVDAAVPKEEMATSAXLEVVQWRQHHWTSTRTRLRRMVTARPTGAWARRQRRLEVAGDTGEREEGCGERRCGHGVAREEAKMREQRKRIPFYSGGELAGHGRGXERRREWLPAAMEGGRGWRGRSGRL

SEQ ID NO: 166096 - protein, 134 aa, Oryza sativa
  unsure (1)..(134): unsure at all Xaa locations
  Clone ID: PAT_MRT4530_64839C.1.pep
IWPIAHNRGHSYLNSFTLARGAQLYPQDTIHRQVTVPAQXVTMSSDYDKTLHIIPYDQSMPHHRFRSRPQQAAGSLPSCHGESASRSTKHPSRPNSITPTLAWVHQPEEXSYTTSQAVTHSRLWQALYVLQGFP

SEQ ID NO: 166097 - protein, 88 aa, Oryza sativa
  Clone ID: PAT_MRT4530_6483C.1.pep
MVVVVVVVMVIVAEGIELEMHLLRKLLQEKPPQDLTAVTEMESPIHMIPLIEIMVDAGIRSSGDDDNLERCVGATAAGEAFALQDDIA

SEQ ID NO: 166098 - protein, 59 aa, Oryza sativa
  Clone ID: PAT_MRT4530_64840C.1.pep
NCKFKLSITDNIIQGEHRCPFNKSTNNVRGFQATKVKATTYHRTHLCLLIFTSSKVHQL

SEQ ID NO: 166099 - protein, 205 aa, Oryza sativa
  unsure (1)..(205): unsure at all Xaa locations
  Clone ID: PAT_MRT4530_64841C.1.pep
MWIPLSGQVDTLFGSYVSTCQDAGGYRALGRFHRGVRVLVASRRARGSRGCGGSHSFGVRWRNATCGGYGRQRARLRSAAIGDGRGWASGSGSGREGESVGGDRSGWASSGRSKQGEEEEEPVVATVAHRASPCAHDKEEPAVVAVVHRAPTTRRRSPPPTAHPRTPDRPPPPSLATTVLGAPPPPLTGSXPARRHPQLATAGGD

SEQ ID NO: 166100 - protein, 106 aa, Oryza sativa
  Clone ID: PAT_MRT4530_64842C.1.pep
MPAWQLRVCIVGVRVEQSSMGLENLRMGSVSCVYCPNHSELAVATALPSAGLQAGVMGTTLAASCRLWCRPASHVLKRWDPTESVHLDVYGRDPRRVRHARRMQSR

SEQ ID NO: 166101 - protein, 135 aa, Oryza sativa
  unsure (1)..(135): unsure at all Xaa locations
  Clone ID: PAT_MRT4530_64843C.1.pep
MAPSKSTAAAXASSSSCSSRRRAAAXGGGDDVRGVAAGAEPVPAVLQGQGGDGGXEGCCAGLSSIVKGEAVCLCHIVNHTLERAIGVDIPVDRAFALLRDVCRLSPPXTSSPPAPTRKVVCRLSTLARLHLPEYI

SEQ ID NO: 166102 - protein, 52 aa, Oryza sativa
  Clone ID: PAT_MRT4530_64844C.1.pep
MAAAAIQTGGSLDEGEERRRSSPVSVPVGLSSDLGFSWAPCEQQTPAHRVSN

SEQ ID NO: 166103 - protein, 95 aa, Oryza sativa
  Clone ID: PAT_MRT4530_64845C.1.pep
GIFFVGSGVWHDVYMVVRRLYWLSMLSQPPGGDIGCCCFIRAGFECNVIQSGLECVLFFQMFVVCTGYWSVRVCDWSLSLWYFREVWVYIMVFCL

SEQ ID NO: 166104 - protein, 78 aa, Oryza sativa
  unsure (1)..(78): unsure at all Xaa locations
  Clone ID: PAT_MRT4530_64846C.1.pep
MDLSPFKLDIDELLADYTEANCTAFADFKRLWMAKKFSYIYEGRPKTNSGAFMQSLFCXLIGPMTSQSCMPQRLAGLY

SEQ ID NO: 166105 - protein, 130 aa, Oryza sativa
  unsure (1)..(130): unsure at all Xaa locations
  Clone ID: PAT_MRT4530_64847C.1.pep
GLYKAREEPTREARIFFLSCGGRLVCVAPRKKIKNNCGKXGAKRPLKKLTEDKEGVHTTPPRDYRASLEGGTTFTLRCRIVGKGKGCGALFVLPPTAKRGIWPQDKLDWPSPRGFSRPPLVKPGAKGRGE

SEQ ID NO: 166106 - protein, 127 aa, Oryza sativa
  unsure (1)..(127): unsure at all Xaa locations
  Clone ID: PAT_MRT4530_64848C.1.pep
SVTWRLNSIGRNSPKSLADLPRTSSRAPARRSLHRRDAAHSVIIASVLAQESRRRRCPPRRSVPHRHRSPLKARPPPXPRRKPFCRQVAADAFHAKLLLAATDPCCHVAADAFRTELLLAACWYFLM

SEQ ID NO: 166107 - protein, 102 aa, Oryza sativa
  unsure (1)..(102): unsure at all Xaa locations
  Clone ID: PAT_MRT4530_64849C.1.pep
DTTRTTGVIQMKDALVTNNRQLEQMHVLKADSARHRDMCGLHADQYDSLLGSVTPDTEQDQIRSLKKXNVHKDCPSFNYHYRGCQTYNERLELQSQELTTRR

SEQ ID NO: 166108 - protein, 51 aa, Oryza sativa
  unsure (1)..(51): unsure at all Xaa locations
  Clone ID: PAT_MRT4530_6484C.1.pep
WXXIXXYRGFRDSCLLISIFEFVDDPFVFWGRELKLASNLLPFIRALCNDH

SEQ ID NO: 166109 - protein, 59 aa, Oryza sativa
  Clone ID: PAT_MRT4530_64850C.1.pep
VTTKKSGSRGTSAAAAGTASWWWFWSTRCGPARQSVLTDPLSWRGRNGRHHFVGHREPG

SEQ ID NO: 166110 - protein, 82 aa, Oryza sativa
  Clone ID: PAT_MRT4530_64851C.1.pep
MTVVTVGMVGNTLQPSLGLHLHRPAKTWGWPNPAQFRLAASSTALLRRLVNFGLIHRVKSAFFAHSYISMVLNIVRLIHRLS

SEQ ID NO: 166111 - protein, 73 aa, Oryza sativa
  Clone ID: PAT_MRT4530_64852C.1.pep
KTKESGFNVPQNIPSHSWLKRGVDPPPNRYGIKPGRHWDGVDRSNGFEKDMFKLKNEKQATEQEAYLWSVADM

SEQ ID NO: 166112 - protein, 922 aa, Oryza sativa
  Clone ID: PAT_MRT4530_64853C.1.pep
MAASTSQHALVSVKSLCTGANFGFEKRTSKVRFVLVGRCCSGTRKLGLVCASNSHSSVMEPAQLPLSPESGNTPKKSSESALILIRHGESLWNEKNLFTGCVDVPLTPKGVDEAIEAGKRICNIPVDVIYTSSLIRAQMTAMLAMMQHRRKKVPIVVHSESEQAHRWSKIYSEETKKQSIPVITAWQLNERMYGELQGLNKQETADRFGKEQVHEWRRSYDIPPPNGESLEMCAERAVAYFKDQIVPQLVAGKHVMIAAHGNSLRSIIMHLDKLTSQEVISLELSTGIPMLYIFKEGKFIRRGSPAGPSEAGVYAYTRALFPPASEEFSSVEHTVYPPICHKEVAKHTIHWMSNHNSPCDIPKPASVDEFVKNGKKKKSFMSSIFRKKGRSGTGSSDKKLLSRRDIVFDRHCATKIESLTLSCLDSPHRQFDTREYRVFVGTWNVAGKPPNSSLNLEDFLQIEGLPDIYVLGFQEIVPLNAGNVLVIEDNEPAAKWLGLIYQALNKPQDQSSGDELSPPETSDSRQGGGSGSRDSIPKSSSGGMLFFQKPSLKMLSKNYRVDSALVKTCTCLTDPSTMQRRAREMREFLYRIEASPPPSLASAAAAADEDGGPDAGGELARSSVNYCLIASKQMVGIFLSVWVRRELVQYIGHLRVDSVGRGIMGRLGNKVLDAVLLCLCSLFGSLDSWRRHGWLSCLQGCIAMSMTLHQTSVCFVCSHLASGEKEGDEVRRNSDVAEIIKSTQFPRICKVPGQRIPDKILDHDRVIWLGDLNYRVALSYDETKTLMGENDWDTLLEKDQLMIERQAGRVFKGWKEGKIYFAPTYKYKQNSDSYAGETAKSKKKRRTPAWCDRILWHGQGIEQLQYIRGESRFSDHRPVCSVFVIEADVDNGSMIRKGYSTLDSRIHFESPIPQRHSFYDDF

SEQ ID NO: 166113 - protein, 566 aa, Oryza sativa
  Clone ID: PAT_MRT4530_64854C.1.pep
MSNHNSPCDIPKPASVDEFVKNGKKKKSFMSSIFRKKGRSGTGSSDKKLLSRRDIVFGLDEKCDDRSELLDSSPAVRKSFSDRHCATKIESLTLSCLDSPHRQFDTREYRVFVGTWNVAGKPPNSSLNLEDFLQIEGLPDIYVLGFQEIVPLNAGNVLVIEDNEPAAKWLGLIYQALNKPQDQSSGDELSPPETSDSRQGGGSGSRDSIPKSSSGGMLFFQKPSLKMLSKNYRVDSALVKTCTCLTDPSTMQRRAREMREFLYRIEASPPPSLASAAAAADEDGGPDAGGELARSSVNYCLIASKQMVGIFLSVWVRRELVQYIGHLRVDSVGRGIMGRLGNKGCIAMSMTLHQTSVCFVCSHLASGEKEGDEVRRNSDVAEIIKSTQFPRICKVPGQRIPDKILDHDRVIWLGDLNYRVALSYDETKTLMGENDWDTLLEKDQLMIERQAGRVFKGWKEGKIYFAPTYKYKQNSDSYAGETAKSKKKRRTPAWCDRILWHGQGIEQLQYIRGESRFSDHRPVCSVFVIEADVDNGSMIRKGYSTLDSRIHFESPIPQRHSFYDDF

SEQ ID NO: 166114 - protein, 75 aa, Oryza sativa
  Clone ID: PAT_MRT4530_64855C.1.pep
MEAEDKSSGAARALELTDRSDIHRNKFVWKEMTKEQRWFTDDSCDDDDVVSELNILVAQIGAAGGHDVPTYANTT

SEQ ID NO: 166115 - protein, 124 aa, Oryza sativa
  Clone ID: PAT_MRT4530_64856C.1.pep
QCLMSSTSRKASTALLSPSIPSCSSPPRSVVVSCPCSAIFFIAPLSTRVASAAQLCPATRPPPSTAMYAQRARRGDSRATIAARAQPPPADDAMTWSSDSDRDDEPATAAAASADDASLATSFF

SEQ ID NO: 166116 - protein, 278 aa, Oryza sativa
  Clone ID: PAT_MRT4530_64857C.1.pep
MVGEGRLGRGGQRREGRGGKPVKREGEDDDDEEGGGALGERDVWQCRAGPLSLSMEGRGIPRTFSEDDFLVYSPRNREAPLCEFGRGQRVRFEGLLYTRRLGRGAYHTMPPDTGSAHAACRLTHEQRTGTLVSPISHSTGHRPVEYTASRIGATARSREGAAAARPRARSLLEGGPRGAWGSLLPLVLAREWPPPHLGPDSPQGRATWHRGAVSFIQSLGRSGRHPTSGLTPPSGEGHVASGDNLLRLVFGKEWPPPHLGPDSPPGRVTWHRGVASSD

SEQ ID NO: 166117 - protein, 74 aa, Oryza sativa
  Clone ID: PAT_MRT4530_64858C.1.pep
TAFVSSSISLVEKPSLIGPPDFTIVPVVLKTGTKNIFSPGLKALRNFLPTGTKDLFLVPVGNTNREKSRHKRGG

SEQ ID NO: 166118 - protein, 563 aa, Oryza sativa
  Clone ID: PAT_MRT4530_64859C.1.pep
MAAVAEENGDGGSSGRGTRRQRQRKRNTAAAAAAVEENEHSGGEKQPALRSEECRRERAEALKGQVRRKLLKATSRISSVAETVVLVDTLERLGIDNHFRHEIAAMLHRVHSEEHGGGGGAAGSDVADDDLHVTSLRFRLLRQHGLGISADVFDKFRDNGGSFRASLSSDTRGLLSLYNAAHLAMPGEEVLDDAIAFSRRHLRSMKTAGKLRSPMAEQVSRALDIPLPRTPRRLEAMRYIHEYGDEPGFDGVVLELARLDFELVKSLHLRELKALTLWWKDFYDNVKLSYTRDRIAEVFFWVSGVYYEEKYSRARIMLAKVFGLITLMDDTYDVQDTLDECCRFNETIQRWDNGAVSILPEYMHAYYIKLLSNFDEMENSLEPNEKHRVSYAITMYKQLSEYYLQEARWSSHRYLPSFAEHLYVSSISSGIPALAPAVLMGVHDGDGVATKEALEWACAIPDLLLASGEEGRASLVETYMTEHGAGGDAAVAAVAAASERAWRRINRACVEAVEPALLPAAQLLVNLTSTMEVVYLGGKDGYTSGSGLKGVITDLLLGPVHDD

SEQ ID NO: 166119 - protein, 123 aa, Oryza sativa
  Clone ID: PAT_MRT4530_6485C.1.pep
SKGVVAIQQTQSHSTLSPSSKSTTSRGGGGGGGGIAMVDARHPSELLDRFLADAEERLRSAADDAAAALEQDSADALHRIPLACRDALRLRDDAVSLRSHLASVLQLLSQVPHALAGNITLPH

SEQ ID NO: 166120 - protein, 106 aa, Oryza sativa
  Clone ID: PAT_MRT4530_64860C.1.pep
WFGAAGSFNQCPNHRFRLPCSHPYTDGTLIYNTAQILIYCTQNDTTKNSQVIRFFQDAAPCKHVFCQQWAGAEKSWELYRKKKLLKIPIAQQHTCGSDNRRPDMSP

SEQ ID NO: 166121 - protein, 38 aa, Oryza sativa
  Clone ID: PAT_MRT4530_64861C.1.pep
ALHFLSVTEVDSMLRTHCVHVRWFFRQDEAIVSIGVIL

SEQ ID NO: 166122 - protein, 98 aa, Oryza sativa
  unsure (1)..(98): unsure at all Xaa locations
  Clone ID: PAT_MRT4530_64862C.1.pep
AALYSPPGASPSPFRLRXCWXGRSVRASSLXRPLAXGGCAARPFRWVSPGFSPSPRCXXPARXFFFGSPLLRRLPAFVLVLLPALFFFFFFFFFFFFF

SEQ ID NO: 166123 - protein, 501 aa, Oryza sativa
  Clone ID: PAT_MRT4530_64863C.1.pep
MATTKSFLPPPFIALSSNPRPTTLAPTPNPRPRRRNSLAICSASASGDPSPTPEAEGGGNPLLALWRRTLHPLGDYGFGKRSVWEGGVGLFMVSGAALLALALAWLRGFQLRARFRKYQAVFEFTQACGICVGTPVRIRGVTVGNVVRVDSSLKSIDAYVEVEDDKIIVPRNSVVEVNQSGLLMETLIDITPKDPLPTPSVGPLDPDCSKEGLILCDKERMKGQQGVSLDALVGIFTRLGRDMEEIGVHKSYKLAEKVASIMEEAQPLLSRIEALAEEIQPLLSEVRDSDLVKDVEIIAKGLADASGDLRRLKSSMLTPENTDLIKQSIFTLIFTLKNIESISSDISGFTGDDATRRNIKLLINVGRFLFDIVMFHSCALAQRLGLARSLPKRPSSAFTEGTSQSTKLRVQYYCGCICGHGVWNRKNPWSQGLVCTIDLDVNLHFLGMCVYAIEQKNAMVGGAVTGALVSAASNSHRQNVVKNAITGGAIATAAEFLNYLT

SEQ ID NO: 166124 - protein, 59 aa, Oryza sativa
  Clone ID: PAT_MRT4530_64864C.1.pep
LRGSTKVKHIFSDWNTSQTKQVYEGNEPPRRRHLNDALTFGMLPEKNNFRDLEKITTTK

SEQ ID NO: 166125 - protein, 192 aa, Oryza sativa
  Clone ID: PAT_MRT4530_64865C.1.pep
QSGLLMETLIDITPKDPLPTPSVGPLDPDCSKEGLILCDKERMKGQQGVSLDALVGIFTRLGRDMEEIGVHKSYKLAEKVASIMEEAQPLLSRIEALAEEIQPLLSEVRDSDLVKDVEIIAKGLADASGDLRRLKSSMLTPENTDLIKQSIFTLIFTLKNIESISSDISGFTGDDATRRNIKLLIKSLSRLL

SEQ ID NO: 166126 - protein, 133 aa, Oryza sativa
  Clone ID: PAT_MRT4530_64866C.1.pep
AKSLGYTLQPMKFDEWVSVRNNDIWKASTFECTSLPYHNVLASLRLSCSNMPPNLRLCFAYCASFPKGHIIVKDQIIHQWNALGFIEQSDIFSTRQLGEAYVRQLLGLCFLQQTKAPSTTRVHNEDSTFLTMH

SEQ ID NO: 166127 - protein, 75 aa, Oryza sativa
  Clone ID: PAT_MRT4530_64867C.1.pep
VAGGHNQNRTRRQLWMEAHGVARRFLAAEVVPALSSSRLVRWRRFEGVEWPMARQGDRACASGPEADVRRHGERL

SEQ ID NO: 166128 - protein, 229 aa, Oryza sativa
  unsure (1)..(229): unsure at all Xaa locations
  Clone ID: PAT_MRT4530_64868C.1.pep
PSPNHPHHAKVSPPPPTPEVGSPLVHRGEXRQLDNRTPRSTQLHHAHPHHRCLGNXELYFRSSSYPLPLVVSTVSLLGFPVNRSLIGMGATSKTMHPQPTIQSHFSWIITTMNHGQMSRAXTRQDTRXSKIVIIPSSELVPSEPLSPLLRYAFLTRARIAKPVPPRRRPLTFHAEGFPKITLPVPPISPSRARLCSLPPSLAPAFCASLCSLPEKIRLMQQHQLKQKKT

SEQ ID NO: 166129 - protein, 985 aa, Oryza sativa
  unsure (1)..(985): unsure at all Xaa locations
  Clone ID: PAT_MRT4530_64869C.1.pep
MDFANNLTNSAYNLTEKLTDREDRRRINRPSLFVREGLVTSTSGVTTSQKSPEFQSDRELPRAGVIHIDIVQRRRGLIINKNYYRLFHTEDNFVYSWQIIDHVKQTHPVESESENNKYQHHMLHRIKSNSTTPTQILGLAIVERARKKQASRVTYLKEGDANTKFFHIKMNARRRKIFIQRLRTGNTWKFKHEEKAVIIKEHFEAFLARPAPRLVDYDWDALQLPSFDCTTISGPITEEEVFAALKQLPGDKAPGPDGFTGAFYKACWGTIKEDIMQVIRSFDQLRSNNLQILNTANVVLIPKKEGAEGIGDFRPISLIHGIEKLISKVLALRLQPHMGALISQAQSAFIKRRSIHDNFMYVHNLARKFHQTRTPTLLLKLDISKAFDSVRWDYLIDLLQRKGFTSKWTNWITNLLVSSTTRVLLNGCPGVPIKHGRGLRQGDPLSPLLFILAIDPLHHLLEKATDLGLLTALRGRAPRFRTSLYADDAAIFVNPSVQDMMNLTEILRAFGGVSGLQTNMSKSQIAPIRCDNMDLASITRIFPAGLTNFPMKYLGLPLVVGRLKKVHIQPLIDKCRSRLAPWQGRLMSTAARVCLTKLVLTAQPIYHLTSLKLPDGTLEDIDKIRRKFLWAGGETISGGKCKVNWKRVCRPKDLGGLGVMDLQRFAAALRLRWLWNEWAAPDKPWVGMSVPCNQQDKELFSAATTITIGNGKTARFWDSKWLENQTPRKIAPNIFLASKRKSRSVHDAIQDNNWIRDIDVHHITDADHLRQYVHLWSMIRRMDPLSEEQDTIRWNLTTNGQYSTRSAYRLQFMGATRSIFYQSIWKAWAPPKCKFFSWLATQNRLWTADRLGKRGWFNQKVCPLCCTNDESXLHLLAKCRFTKRIWAEIQIWTHMDLQMGKXNDCPSIEHRWNLVVESTNTLRVPLQTLLMLVTXRDLGDRNARIFRSTASTPASILAKIKEEGRAWVKAGATRLXEFGILGDIT

SEQ ID NO: 166130 - protein, 192 aa, Oryza sativa
  Clone ID: PAT_MRT4530_6486C.1.pep
MSMVDDYSVSINILSVRTDRGPCGRPVVLRSRQRATSLTARNWCRRPWLREKGGYFWRGEGKRLKGERMKGKRWSTGHGWLVVVQMTGRQRRLWTCGCAVGFRGDMFDGYHTIRDGLVELYFASDVSIGVLGMHADQQPHDLGPRGGLVVLGSRRKATSLATRNWRCLWQLRWEKAGDFGRNERGVWGEGKW

SEQ ID NO: 166131 - protein, 69 aa, Oryza sativa
  Clone ID: PAT_MRT4530_64870C.1.pep
PRLHHFFFAQKKRIGCNVILLSFLYKCSSIGVALGVLLAFSVRLVVIAVACALFLPLKKTLYNLNKKKE

SEQ ID NO: 166132 - protein, 154 aa, Oryza sativa
  Clone ID: PAT_MRT4530_64871C.1.pep
HLRRQCRWRYAEDRSMAEQWRLHHASMSISSSPPVAGRLNAKPGKLSDGPHGRRGSGAVGASSRRRGPALSAPQISDPRLEVAAEPAMQCPSCLSCSSLGSSSSSPASSSTPSWRALPPSRILSMLFFSCATKFVLLAWQLDSRAERDPCNLKL

SEQ ID NO: 166133 - protein, 67 aa, Oryza sativa
  unsure (1)..(67): unsure at all Xaa locations
  Clone ID: PAT_MRT4530_64872C.1.pep
GSSEWQTLMEWCGFEXPVPLSNYARSQADLLLWNYDSKYKYSLVELPPAFLSLAWEKRPLLTVSAWR

SEQ ID NO: 166134 - protein, 347 aa, Oryza sativa
  Clone ID: PAT_MRT4530_64873C.1.pep
MEEEQQISRPDRHTTCEDHVGGTSGLADVSSLGDFPGATTLKESTASSPTSSLQAVPDDTIDAPQSGHCLSSSLGSIIWVQKPPHGRPGVYHIRKDRLGSFHTYPDLGGPFQSLNEAEDVISSHINKLYPPVNVYNYIAAQLALMCQRFEERAGESYVDMIIRKALYWPDGTRKKCSKAEAFQNVNNNMNQLAKVILDMYNDDHNLLEDLAFELKGVINYEPIIESRRWFDHINFTATTKGLNGLDSDHLFFAEAMSLKGEKDYVVTCCSLISSDDNGNCYTCKIGNKSMKHPSDVNSYVGGHCYIKGIYDTIVSSDSEEDEDAEEQRLRKMYQGLDDPGVCEELFD

SEQ ID NO: 166135 - protein, 107 aa, Oryza sativa
  unsure (1)..(107): unsure at all Xaa locations
  Clone ID: PAT_MRT4530_64874C.1.pep
XVLXXTPCXHLRXXXLXXSGLMVXXMXSKEXVEXXPXCSAXPSQKLSXHSTSXCVXYLXHSXXCXXSLPFMPXPSPXWXLXXDCFXFFRRMXXXLIINXPLSXXYXX

SEQ ID NO: 166136 - protein, 564 aa, Oryza sativa
  Clone ID: PAT_MRT4530_64875C.1.pep
MRAPQGSDARGGGPRWTGSTGRGRSGTPRGADVAPTRWPRGSHVGGQMDCPDLPPGRSDGGGGSRPGAHGHGSNRPSGRGAWRRGATLRRRKAASGGDRPVAEGGDVAATRTATAAAKRLGGGVAAKRRGREGGGEEGPHRQRLTTASDGGRWRRRDKLRNHLANTKKGVREREEDGRGRGSRPKVAAMVELTGVRGGGEADGVALGLANPTAATARPGVAASGYRSGGGEADGVALGLANPTAATARPGVAASGYRSGGGGEEGDGARAIEGTGELGEMGKKGQGIAGMRRREREREGVGAGDAGARAGGADVARGKRARAVARWRLRTAGGQKWETGPTSGPHLSATRREEAAGSPPRSDPTGPAGSDGWAAGVGVSGGDGACCAPGGGGSRPALQLELAERWMQGEDGDGVDGGTGSGGAPQRGRPRIRPPHGGIRPPRARSGWGDAGPWTAAMGVEWGLTAAESALPTAAGDDGIGRRRWEESRAWQTTASGWRGIVWRRGRRPVWRREAQPMAAEAGSAREARAVEMEAGLAREARPAVDEATSGRGGAAGGCGAVFGA

SEQ ID NO: 166137 - protein, 53 aa, Oryza sativa
  Clone ID: PAT_MRT4530_64876C.1.pep
MRRTGGKAIEKDKEPRQPRFWMGIAILILEEFRDYRLTSQALERITVRRNSIK

SEQ ID NO: 166138 - protein, 75 aa, Oryza sativa
  Clone ID: PAT_MRT4530_64877C.1.pep
WWRRSSSEQERTTKPTWASQSTASSSAFFSSPASLFRKQIPPAPGPRSAAAPPAPASPSRPPNPTRRSPERRPLM

SEQ ID NO: 166139 - protein, 46 aa, Oryza sativa
  unsure (1)..(46): unsure at all Xaa locations
  Clone ID: PAT_MRT4530_64878C.1.pep
DHRLHGGKLHDIHGDPHGFQVRLAQGQPHLMNRRPASYLAXXXVAS

SEQ ID NO: 166140 - protein, 84 aa, Oryza sativa
  Clone ID: PAT_MRT4530_64879C.1.pep
MEVGEPLNTVMMEPTPMEVAWVSYLPNEATPLLRLEPQGPTTATCQDHPVAALPLSWATLGASFCVICAPLSGLTGLSTSSLLW

SEQ ID NO: 166141 - protein, 733 aa, Oryza sativa
  Clone ID: PAT_MRT4530_6487C.1.pep
MASLVPGVLLKLLQHMNSDVKVAGEHRSSLLQVVSIVPALAGSDLFTNQGFYLKVSDSSHATYVSLPEEQHDLILSDTIQLGQFIHVDRLEAATPVPILRGVRPVPGRHACVGSPEDLVVTNSTFLGSKKAQQSINGSKDASTLSLEKEQSKLEKLKPSVKNNGAEIKKPQLTKSNSSLSKQALNSIIDKKEVVSSKTKPTSARSTPSSPTSVYSLPASFERFSNDIKQRTKSKGADKSSPSRLSLLEKAASVLKATTAGRKSSAGNWLSNTMSSIESGPKALRRSWEGNAEAKSKGNSDSKAAKTEKKSENRSTSTPRRKPLVEEKPLHKDDSKIQTPPRKSSASAPSDDSEKIVNKPSSPLRRTSGVSSNTNITNLVKIASNSKKLTDASASWTSLPPSLAKLGKELLKYRDAAQMAAVEAMQEASAAENLLRCLSSYAEVSSTAEEQNPQPAVEQFLALHAAMSRATVVTDSLTKATATSTATSPDRSTPSEAAAVDEESLAVAVERRRRAASWVGAGLATDLSAFSLYNLKPPPAIAASPLAVVLVDESARPAAATKASPPAKSRLFPPKVKGRVGPVAAAVAAAPVPPPEWERGGGAEDRGELARRLGEEARGWFLAFVERFLDADVAAAAAPWDRDRAARMLPQLKRVNDWLSEIAKPTEPPPPQSDADGEEAGGGAPAVANGGGNTVPEETIERLRKKIYEYLLTNVDSAASVLGGAGAAANGKRV

SEQ ID NO: 166142 - protein, 150 aa, Oryza sativa
  Clone ID: PAT_MRT4530_64880C.1.pep
MGLLLSMHPQQQQQQKPGLLSSTLLKLEQTARSAAPGLAHHVDKLLGSVGVSSSHPPTAPYQQPQVLPPYPAGQYQQCWPYAQPGSAYPQQHWQGPPPAYQPQYPQQTPAPVTQLYPPAPVTQVYPAPGGYQTGGPQYPQHQQPLQQQQQ

SEQ ID NO: 166143 - protein, 143 aa, Oryza sativa
  Clone ID: PAT_MRT4530_64881C.1.pep
MRAAQGPDTRPTGTRVALTGRVSSPAKGPRIWPIQLGNFFWAEARGERREPPASSSAAGGGGGAACGSVELGGRFARRRWGSLLRRRLGSSPAASPTAASSGHRSPATVSVFLQAVAICKSSLNIQWHEWLSLGIFYDFWGTS

SEQ ID NO: 166144 - protein, 36 aa, Oryza sativa
  Clone ID: PAT_MRT4530_64882C.1.pep
RKIYAMLKLPKHPANVNILLCSPCMNQVFKHFSSCS

SEQ ID NO: 166145 - protein, 223 aa, Oryza sativa
  Clone ID: PAT_MRT4530_64883C.1.pep
CREVLIFNFWWIMGFCMVVLLQIWKLQWHGYHVRSSLLVDAPCSSVPDVQATGRHELLLPALHRLACIDEEYLRTPGVKKGVAFGSLAARSAVDAHLDGMVVGICSAEDETRKEHEKIMPVVMVPLEWHPRHVLRQRSSPAANTKAQVVDGGITPPLHAMTKIVRAPAAAQGSGSGARSANNGVNPAGALPQRALPPHASAAMPLSSEQKWERERRKVREEGK

SEQ ID NO: 166146 - protein, 147 aa, Oryza sativa
  unsure (1)..(147): unsure at all Xaa locations
  Clone ID: PAT_MRT4530_64884C.1.pep
DPSRWSDEKSGSGREXSSLGWHGDPRHEQAVLRICEEGSFGDGRPWQSEGWRGEEGRQAGGGTSRGGFGLVNGESAMAGRLGPTMSSVREEASSLCSDGGGAPTPSLRTRVPATRTVVVVTRTPRASMADCHVSATSMPHQMKTESN

SEQ ID NO: 166147 - protein, 74 aa, Oryza sativa
  Clone ID: PAT_MRT4530_64885C.1.pep
TFPPTADIGEEHQQSLNEIPAAWFLAGRHLATARPRWPGDLAILEAGEYPAFSILLPERLQDKEAALLEPASWE

SEQ ID NO: 166148 - protein, 153 aa, Oryza sativa
  Clone ID: PAT_MRT4530_64886C.1.pep
MTSASAAATGRYAVDSPSNRMPSPPPPPHLALPCRDLAPSEKTGRRKKKIRAKLSCIDDFVFPPGQAYRFGSLDFIADDFGKISLLDSDSNQSGRDAVSTPFGLPNSAEIYSKIILSEEVGVILQPLGTVLTEELDGYLSSPSVDSRPTEILD

SEQ ID NO: 166149 - protein, 537 aa, Oryza sativa
  Clone ID: PAT_MRT4530_64887C.1.pep
MAAAAAAGARVWLLKSYRSLQIEEEDYGGKWIRLELRRPIWLRLTTCGRTSSQAWNLESQGDNQRTSRYTQASIGCPPTRIYGDPSSRANAACSVLNRVLGAQEDLPDPELLCKDGECLKTIFQSVTDPNGILKSSWSFVNNGTPGYICKFTGVECWHPDENRVLSLRLGNLGLQAKSKNNAAIIGAVVGVVVVIIIGVIIVFFCLRKLPAKKPKVEEENKWAKSIKGTKTIKVSMFENPVSKMKLSDLMKATNEFCKENIIGTGRTGTMYRAVLPDGSFLAVKRLQDSQHSETQFTSEMKTLGQVRHRNLVPLLGFCIAKRKRLLVYKHMPKAKGLAYLHHTCNPRVLHRNISSKCILLDEDYEPKISDFGLARLMNPIDTHLSTFVNGEFGDLGYVAPEYARTLVATPKGDVYSFGVVLLELITGERPTHVSTAPENFRGSLVEWINYLSNNALLQDAVDKSLIGKGSDGELMQFLKVACSCTISTPKERPTMFEVYQLLRASCVSCTVDPSAVGFLSAGKGPWRKVPSLRRRMT

SEQ ID NO: 166150 - protein, 606 aa, Oryza sativa
  Clone ID: PAT_MRT4530_64888C.1.pep
MTDHYYAPLRLILLLILSATCFGSELDVQCLKTIFQSVTDPNGILKSSWSFVNNGTPGYICKFTGVECWHPDENRVLSLRLGNLGLQGPFPAGLQNCTSMTGLDLSSNNFTGLIPQDISQQIPYLTSLDLSYNRFSGQIPVNISNMTYLNTLNLQHNQFTGQIPLQFNLLGRLTSFNVAENRLSGPIPNNLNKFPSSNFAGNQGLCGLPLDGCQASAKSKNNAAIIGAVVGVVVVIIIGVIIVFFCLRKLPAKKPKVEEENKWAKSIKGTKTIKVSMFENPVSKMKLSDLMKATNEFCKENIIGTGRTGTMYRAVLPDGSFLAVKRLQDSQHSETQFTSEMKTLGQVRHRNLVPLLGFCIAKRERLLVYKHMPKGSLYDQLNQEEGKDCKMDWTLRLRIGIGAAKGLAYLHHTCNPRVLHRNISSKCILLDEDYEPKISDFGLARLMNPIDTHLSTFVNGEFGDLGYVAPEYARTLVATPKGDVYSFGVVLLELITGERPTHVSTAPENFRGSLVEWINYLSNNALLQDAVDKSLIGKGSDGELMQFLKVACSCTISTPKERPTMFEVYQLLRAIGEKYHFSAEDDLMMLPPLSTDGETLDELIVA

SEQ ID NO: 166151 - protein, 151 aa, Oryza sativa
  unsure (1)..(151): unsure at all Xaa locations
  Clone ID: PAT_MRT4530_64889C.1.pep
MFLLQVSRQYHPTPVHLHQQDLYPIRDSLSHQSTTGQPLLQSPVFQLXRNSQVIQHQCXQQLRYVSPTSLNCQPIXSVQRLSQLQLQQFAGVYFDQAQAQAQVXALNSVNIGIYPXYNTAPCSIPTVGVSVLNCTSIVVQEEKNKVMHHRV

SEQ ID NO: 166152 - protein, 85 aa, Oryza sativa
  Clone ID: PAT_MRT4530_6488C.1.pep
GRALRNICDSRTQKHEGQAPADEESCLMRPILPTLTCIKKAADGSSMCQPLTGCARAQHSMHDMQCFKAGGAREVTIACSLRPAC

SEQ ID NO: 166153 - protein, 88 aa, Oryza sativa
  Clone ID: PAT_MRT4530_64890C.1.pep
MAAAAAAGARVWLLKSYRSLQIEEEDYGGKWIRLELRRPIWLRLTTCGRTSSQAWNLESQGDNQRTSRYTQASIGSGNFFPGQQPNRP

SEQ ID NO: 166154 - protein, 370 aa, Oryza sativa
  Clone ID: PAT_MRT4530_64891C.1.pep
MAPPPASSLPTAVLAWGSGEDGQLGMGGYEEEDWARGVAALDALAVSAVVAGSRNSLAICADGRLFTWGWNQRGTLGHPPETKTESSPAPVDALAGVSIVQAAIGGWHCLAVDDKGRAYAWGGNEYGQCGEEAERKEDGTRALRRDIPIPQGCAPKLKVRQSFFSKQISTPVRVQGLENVKVIAVGAFHNLALTEDGILWAWGNNEYGQLGTGDTQPRSQPIRVEGLSDLSLVDIAAGGWHSTALTKEGEVYAWGRGEHGRLGFGDDKSSHMVPQKVELLAGEDIIQVSCGGTHSVALTRDGRMFSYGRGDHGRLGYGRKVTTGHPMEVPIDLPPPGTSGGDSGGQWQARYVACGGRHTLAIATWTEADE

SEQ ID NO: 166155 - protein, 440 aa, Oryza sativa
  Clone ID: PAT_MRT4530_64892C.1.pep
MFQRDSRCHHGGPALPPFYCIRPLVEKADERRDRAERHECLAWLDRQPERSVVFLCFGSTGAGSHSVEQLREIAVGLEKSGQRFLWVVRAPRVAIDDDDDSFNPRAEPDVDALLPAGFLERTTGRGVVVKLWAPQVDVLYHRATGAFVTHCGWNSVLEGITAGVPMLCWPLHSEQKMNMVLMVEEMDIAVEMAGWKQGLVTAEELEAKVRLVMESEAGSQLRARVTAHKEGAATAWADGGSSRSAFARRGKRKWEAPHCGAIARREDGEPEPKLCRPAAPTLPFPALLRHLPCSPRSPSAQPPLCRGLDRHPLSCLSSLRSGPPSATTFIFTTSRAHLSATIVIGAAIPTANFAVGVHGYGSEDLVGGSGCTDLERIGECYGGVGGDQGWQCGGGDERGGGMEREEKNRREGEEGLKKGSEPNIWDSLFRLDSVIESLLE

SEQ ID NO: 166156 - protein, 120 aa, Oryza sativa
  Clone ID: PAT_MRT4530_64893C.1.pep
MGDALALQFTGSAAQNKEFWKQKGQWSAMNKLTRNIQHFVSNAYMDSEKQNSPNMSSRGEVRIDDKLGAPVLTRYQCSDEFPLWCRGACCYDQAPIMEGGKTFGWFEGSVFVNVGEILYF

SEQ ID NO: 166157 - protein, 504 aa, Oryza sativa
  unsure (1)..(504): unsure at all Xaa locations
  Clone ID: PAT_MRT4530_64894C.1.pep
MGFISGIDDFAFPPEQAYRFGNLDFITDNIGKISLLESDSNQSGGDPDSTPFGLPESAEIYSKVLSSTFASNHSVGISVSSSSRLNQDGVVYPPIMMRLPDDLAAVFDSRAPSPRRSRTDSVSTSVGSSSRELGVILQXLGSCSTEEIEEYLTTPSVDSHPPTEIIDYDNFDEYDDLDEDFDDNYKDNYTPLFFGVFMVDNETKEKHLAREADEQRARQEVKRLRLEQERQAQEQARLLREQQDRERLAREAEERRQRALASGRQAQELIRQQDIDTSSVFCTPQQNTVAAITLLDTLLTAGALDHVATILDQTKMMIAASVLVNLGSTQQHSXSRAPPLRSXDYHQPSLSTANSRSCHDRRAHREHSVHSPADKHREHCSPRHRQPVDLCDTLNRRLADRDDXRRHHTPDRNDGNDRVAAFTSDLRRVDWLAGFKPTGIEKYDGKTDPESWLTVYTLAIRAAGGDSKAMTNYLPVALADCXRSLQHGLERGTTPDLSARHAHR

SEQ ID NO: 166158 - protein, 318 aa, Oryza sativa
  Clone ID: PAT_MRT4530_64895C.1.pep
MVSGAAHSASTSGGGGGSEGSPTGRAAPGMQGGGSAATPAASASASTPASETTVARRLDGLDIQGDDAPSSQPATSKKKKRGPGTRATGPDKGGRGLRQFSMKVCEKVESKGRTTYNEVADELVAEFADPNNNFASPDPDNPNTPQFDEKNIRRRVYDALNVLMAMDIISKDKKEIQWKGLPRTSMSDVEELKTEIIGLKGRIDKKNAYLQELEDQFVGLQNLAQRNEQLYGSGNAPSGGVALPFILVQHWGSLAKNQMIRKPGLEMEVSAQPHLSIINHPKLRGQTELDYQHRPLFPVYLKGVSSMNIRGYYDLLMV

SEQ ID NO: 166159 - protein, 134 aa, Oryza sativa
  unsure (1)..(134): unsure at all Xaa locations
  Clone ID: PAT_MRT4530_64896C.1.pep
LEDQFVGLQNLAQRNEQLYGSXNAPSGGVALPFILVHTRPHATVEVETDAWVQLVHFDFNSTPFELHDDSFVLKALGFSGKEPDDTQAWVGNGGECSTTPIYHQSPQVARPNGVRLPTSPPIPGILKGRVKHEH

SEQ ID NO: 166160 - protein, 53 aa, Oryza sativa
  Clone ID: PAT_MRT4530_64897C.1.pep
MLKVEKRSFGQDVRASLHLVPLLVSSYAELHTDDSVAMGPSVPATDGIFLQLP

SEQ ID NO: 166161 - protein, 47 aa, Oryza sativa
  Clone ID: PAT_MRT4530_64898C.1.pep
YFFKIYVLDTRTIRLTFSQQVINLLLPPFHNVSHSSISHIYIDVNET

SEQ ID NO: 166162 - protein, 67 aa, Oryza sativa
  Clone ID: PAT_MRT4530_64899C.1.pep
MPPGPSAVRVRPSLAGGSGSTTLPSGMAATHRRVGTAATHRRRGVTAAHRRSTQAESFSETHVKRRI

SEQ ID NO: 166163 - protein, 371 aa, Oryza sativa
  Clone ID: PAT_MRT4530_6489C.1.pep
MGRVISSWRVLAVVAALMAMAAVELCAAIPFDERDLESDEALWDLYERWQEHHHVPRHHGEKHRRFGAFKDNVRYIHEHNKRGGRGYRLRLNRFGDMGREEFRATFAGSHANDLRRDGLAAPPLPGFMYEGVRDLPRAVDWRRKGAVTGVKDQGKCGSCWAFSTVVSVEGINAIRTGRLVSLSEQELIDCDTADNSGCQGGLMENAFEYIKHSGGITTESAYPYRAANGTCDAVRARRAPLVVIDGHQNVPANSEAALAKAVANQPVSVAIDAGDQSFQFYSDGVFAGDCGTDLDHGVAVVGYGETNDGTEYWIVKNSWGTAWGEGGYIRMQRDSGYDGGLCGIAMEASYPVKFSPNRVTPRRALGAKETQ

SEQ ID NO: 166164 - protein, 300 aa, Oryza sativa
  unsure (1)..(300): unsure at all Xaa locations
  Clone ID: PAT_MRT4530_648C.1.pep
MEVEAARRSNAAAVESHGGVQVAALRRDVRGLQPRRAAPPPESGPRRWRRLWRLRWVVADAAASPSSASAGGARPAAEQARLLRQMESIAKAYKVKFVVDVAQLGEEDPLLXQNGSLYFQALKIPWYSTTSSHGQIIGNFLKRVMMPYDQSLEIIGMDTGSLQEPIHDGKIRASSREQIKWLEQSIAATSSNWKIVVGYDPFFVCAEAHTLETTKLYEPLQRFFAKYGVNAYISTGGHCGYFRQDNSMLYIGNPSPDDLTSSDGFLLHIVNLLEMESLLINLEGKVVERFVVNHHRLEAL

SEQ ID NO: 166165 - protein, 369 aa, Oryza sativa
  Clone ID: PAT_MRT4530_64900C.1.pep
MEQAPRPATIVYHLASGQIGGERQVLRLQRKQSSNLFMPMAAGTWVKLEQKGDGPGARSSHAITLVGGTAYAFGGEFTPRVPVDNAMYAFDLKSQCWSALDASGDVPPPRVGVTMASVGATVYMFGGRDQEHKELNELYSFDTATNRWTLLSSGAGDGPPHRSYHSMVADAAGGGKVYVFGGCGDAGRLNDLWAYDVAAGRWEALPSPGEACKPRGGPGLAVAGGKVWVVYGFSGEELDDVHCYDPGTGAWSTVETTGGGGGGDKPSPRSVFCAAGIGKHVVVFGGEVDPSDLGHLGAGKFSAEAFALDTETGAWARLDDAGEHHPGPRGWCAFSAGEVDGRRGLLVYGGNSPTNDRLGDIYFFTPPLA

SEQ ID NO: 166166 - protein, 36 aa, Oryza sativa
  Clone ID: PAT_MRT4530_64901C.1.pep
RTDQIGSEGRRGLRQPATAAPAAVAQRRLGRRSGGG

SEQ ID NO: 166167 - protein, 39 aa, Oryza sativa
  Clone ID: PAT_MRT4530_64902C.1.pep
PPPPPPSPPPPLPPPPPPPPPPPQPPPPPPPPPPCLLAS

SEQ ID NO: 166168 - protein, 102 aa, Oryza sativa
  Clone ID: PAT_MRT4530_64903C.1.pep
MPRHCAAVESHLQTDVVSAHHSDRIDRLAMPPTSHQAQIAHRHAPSIPHPSCRRRPAIAPPSIPASRLTAPLAPARILRRRQDSSPLAPFCTAATGALSTTT

SEQ ID NO: 166169 - protein, 69 aa, Oryza sativa
  Clone ID: PAT_MRT4530_64904C.1.pep
MAAAAARWPRFFVLRPAVALLLLLLLLPLHATAASPTTESSAGNDTVVLTAKDDDLEYVDANIGADPRT

SEQ ID NO: 166170 - protein, 240 aa, Oryza sativa
  Clone ID: PAT_MRT4530_64905C.1.pep
MANPRRAIALQIHTQTTPLAAAPAAAPSPSLPSSLVHFLKRPASFPFLLSLFVLLTWISLRFHHPSPSASVLRAPVVHDPQANLVRYPAALYPTPIAADGRGWLLDPVAAARDAGLPGGALVCLSLHVGQIQPGGLRGNHRHHTCNETFVIWGAKTKFRLENADVNDRGYGEAMIAADEVAIVASARSTAHALINMDVRPTFFLGCQDTPINPNSSNTDYKVRCDMNFLMITYRKIYLIA

SEQ ID NO: 166171 - protein, 73 aa, Oryza sativa
  Clone ID: PAT_MRT4530_64906C.1.pep
LCRQRAGRRLSRQSALYSRNRSHSRGADLGPTKGTPESTPITLSFFSLFFFMYMIDLSFIVLFVIYIYLFYLF

SEQ ID NO: 166172 - protein, 38 aa, Oryza sativa
  Clone ID: PAT_MRT4530_64907C.1.pep
WPQAGCRLIDGLWRCCPVTSPRRLWRRPSAGSNQLARP

SEQ ID NO: 166173 - protein, 36 aa, Oryza sativa
  Clone ID: PAT_MRT4530_64908C.1.pep
LITKAEHNLVRAANTAVLSMLLHVNRFGSYSQCVAL

SEQ ID NO: 166174 - protein, 124 aa, Oryza sativa
  unsure (1)..(124): unsure at all Xaa locations
  Clone ID: PAT_MRT4530_64909C.1.pep
ATVEGKEEDVRLGANRHSERHSFGTAMHGAIDNMDYEEPATAPMMEPGELKDLSVYLGEIGELDDTFLFLYMSMLTVLXVYKSCYKCATVGMHSICCALGGMSLELDYCTDGISGGHISPAVTF

SEQ ID NO: 166175 - protein, 95 aa, Oryza sativa
  Clone ID: PAT_MRT4530_6490C.1.pep
GRVWPPSFSSGGLKSRVSAPFSFRGDGPPPGAPTLVDPPGFFFGGGPPPGPPGGGPPLFEKPGPPPGYFPPNPGFVGYPPRGGCQFPRYLKNPPP

SEQ ID NO: 166176 - protein, 313 aa, Oryza sativa
  Clone ID: PAT_MRT4530_64910C.1.pep
MEAAAISNPPSKSIIRIALVTGGNKGVGLETCRQLASRGLRVVLTARNEARGLEAVDGIRRSGAADSDVVFHQLDVTDAASVARLADFVRDQFGRLDILINNAGISGVDRDPVLVAKVKDQIEGMDVDQRVEWMRENSKETYDEAKSCITTNYYGAKLVTEALLPLLLLSSSGRIVNVSSGFGLLRNFNSEDLRKEFDDIDSLTEKRLEELLDLFLDDFKVNLIEAHGWPTGGSSAYKVAKAALNAYTRILAKKYPTLRINCLTPGYVKTDISMHMGVLTPEEGASNSVKVALLPDDGPTGAYFDRNGEASFV

SEQ ID NO: 166177 - protein, 151 aa, Oryza sativa
  unsure (1)..(151): unsure at all Xaa locations
  Clone ID: PAT_MRT4530_64911C.1.pep
LFIAIDRLIEEFEGGITGRSIDLDRRRPWRRRLFALWRAGVGSAPGALTQLQPKPAATVISPRLLSHGGLLRREALPPPLSPYRFFSSGGFESPRTGPSPSSTEPGTDTESCTNKQGPVAAEENNKKCCPRKQASMALXTGIAERKKELFS

SEQ ID NO: 166178 - protein, 974 aa, Oryza sativa
  Clone ID: PAT_MRT4530_64912C.1.pep
MPHTTSKPGIMVGVRCSCIDSNSESSVQTFDAMTRIAVTTHHMPCANCNSQTEANLPMGNHRLLLLLLLLLAVVGSDHGGVLAADEFTYNGFGGANLTLDGMAAVAPNGLLVLSNGTNQMAGHAFHPTPIRLRGGAAGGAVQSFSAAFVFAIVSNFTVLSDNGMAFVVAPSTRLSTFNAGQYLGILNVTDNGNADNNIFAVELDTMLNPEFQDMNSNHIGVDINSMKSVQNHSAGYYDEATGAFNNLSLISRQPMQVWVDYDGATTVLNVTMAPLDVPKPSKPLISAPVNLSSVVTDTAYVGFSAATGVIYTRHYVLGWSFSQNGAAPSLHTSSLPALPRFGPKPRSKVLEIVLPIATAAFVLALVIAAFLFVRRRVRYAEVREDWEVEFGPHRFSYKELYQATKGFKNKQLLGTGGFGRVYKGVLAKSNLEIAVKRVSHDSKQGMKEFIAEVVSIGHLRHRNLVQLLGYCRRKGELLLVYDYMSNGSLDKYLYDKTKPVLDWGQRFQIIKGVASGLLYLHEDWEQVVIHRDIKASNVLLDGEMNGRLGDFGLARLYDHGVDPQTTHVVGTMGYLAPELVRTGKATPVTDVFAFGVFVLEVTCGRPRHGASQTRNAVLCPAPLPRASRCLRPAAATDERFVFNGFTGANLSFDGMATVTSNGLLMLTNGTNQLKGHVFFPSPLQFQRGPNSTAMQSFFTGLRHRHHRRVRGPEQARHGVHHRQEDVSAVSGLSGGRIALVTGGNKGVGLETCRQLASRGLRVVLTARNEARGLEAVDGTGRSGAADSDVVFHQLDVTDAASVARLADFVRDQFGRLDILINNAGISGVDRDPVLVAKVKDQIEGMDVDQRVEWMRENSKETYDEAKSCITTNYYGAKLVTEALLPLLLLSSSGRIVNVSSGFGLLRNFNSEDLRKEFDDIDSLTEKRLEELLDLFLDDFKVNLIEAHGWPTGGSSAYKVAKAALNAYTRILARK

SEQ ID NO: 166179 - protein, 153 aa, Oryza sativa
  Clone ID: PAT_MRT4530_64913C.1.pep
MSCCATITTPQTQPSSTVFPIILPQIPESVTLEPCQDAQISSEPANTMLSTTATIAVVEKPMTNRIEVCMGGKCKKSGSLAVLQEFEKKVGTDGAVVGCKCLGKCGLGPNVRLRSEGAAQKKNPLFIGVVLEDVGTIASGLFGGGDDLGMVNN

SEQ ID NO: 166180 - protein, 68 aa, Oryza sativa
  Clone ID: PAT_MRT4530_64914C.1.pep
VAVMVEVDRILRPGGRLIVRDSMETMHEVESMAKSLHWEVRKSYSQDNEGLLFVEKTMWRPNEVEAKL

SEQ ID NO: 166181 - protein, 54 aa, Oryza sativa
  Clone ID: PAT_MRT4530_64915C.1.pep
KIRKNSSSYALVFEFRSPWTFFFFFRTDHLGLGVNLFSWIGKLSDQAQCSFARI

SEQ ID NO: 166182 - protein, 603 aa, Oryza sativa
  Clone ID: PAT_MRT4530_64916C.1.pep
MGFRLFFVFFHLLFFCLFPVLGSAGAEDLQSYIVQLHPHEATASSGDAGEAVFASKMHWHLSFLEKSVAWEREKRPSSRLLYSYHTVFDGFAVQLTEEEAAALRELPGVASVRADRRVELHTTYSYRFLGLDFCPTGAWARSGYGGGTIIGVLDTGVWPENPSFDDRGMPPVPARWQGVCQGGEHFNATNCNRKLIGARFYSKGHRANYPTNPSDAVSLMEYVSPRDAHGHGTHTASTAAGAAVAGASVLGVGAGDARGVAPAAHVAAYKVCWFNGCKGEAVKQAGGAAMILANSEINQEEDSVDVHVLPSTLIGYREAVELKNYVSSTRRPVARIVFGGTRIGRARAPAVALFSARGPSLTNPSVLKPDVVAPGVNIIAAWPGNLGPSGLEGDARRSDFTVLSGTSMACPHVSGIAALIRASRSWTGTAAKADAYAMGAGHVNPVRAVDPGLVYDIDPVDYVTHLCNLGYTHMEIFKITHAGVNCTAVLERNAGFSLNYPSISVAFKTNTTSAVLQRTVTNVGTPNSTYTAQVAAPHGVRVRVSPATLTFSEFGEKKSFRVAVAAPSPAPHDNAEGYLVWKQSGEQGKRRVRSPIAVTWVVE

SEQ ID NO: 166183 - protein, 770 aa, Oryza sativa
  Clone ID: PAT_MRT4530_64917C.1.pep
MASTTSKPLQCLALFLLLAQLAHSAFIPKPKNRTEHKPDQLSNTYIVHANHLLKPSRFAPLVRWYISMVATHSPRAATNATAAAAAVAGRILYTYDTVMHGFAVRLAADEARSLSRGAPGVTAVHQARMYYPQTTRSPGFIGLDPEYGLWRDTEFGDGVIIGVIDSGIWPENPSFNDSGLAAVRRSWKGGCVGLGARLCNNKLVGAKDFSAAEYGGASSPRDDVGHGTHVASTAAGSEVHGAGLFMFARGTARGVAPKARIAMYKCGGNWGCSDAAIIAGIDAAVKDGVDIISISLGGFPIPFYEDSLAIATFGAQREGVFVALAGGNSGPRPYTVTNVAPWMTTVGAGAVDRLFPANLTLGNGEVLVGQSLYTKMATGTTMAPLVLLDSCDEWSLSPDVVMGKIVVCLAGVYEGMLLQNAGGAGLVSMQGEEWHGDGVVADAFTLPALTLSYSKAEKLMDYFESAASPVASFSFACETVTGENRAPTAVGFSSRGPNRVVPELLKPDVLAPGLNILAAWPRDIPVSMLNMDTRRSEFNILSGTSMACPHAAGVAALIKKRHGDWTPAMIRSAMMTTAATLDNTGRDITDEGVQEAANATFTSATPLAAGAGHVRPQLAVDPGLVYDAGVEDYVDFLCSLNYTVEQLRVFVPDTAGCAPALPGGGPANLNYPSFVVAFNGSTRVRTLTRTVTKVYEKPETYSVAVSAPAGVKVTVRPATLEFKEKNEEKSYTVEFTSVAGGHVNQSWDFGHISWENRKHQVRSPVVFMWN

SEQ ID NO: 166184 - protein, 40 aa, Oryza sativa
  unsure (1)..(40): unsure at all Xaa locations
  Clone ID: PAT_MRT4530_64918C.1.pep
SMYPPKYDDQDLRASNACXLXQYLYETLDLHGFCAKKKKK

SEQ ID NO: 166185 - protein, 100 aa, Oryza sativa
  Clone ID: PAT_MRT4530_64919C.1.pep
MGQNGIDTWGDKFHIGARDPVGAAPTGQCRHRLAHVAPPSPVTVPPTAIARPPSHSTSTQACLYPPPVSLAISSRQRDVRSHRLLQASLHASAASPRRVA

SEQ ID NO: 166186 - protein, 71 aa, Oryza sativa
  Clone ID: PAT_MRT4530_6491C.1.pep
KNLYTPPQGFNIRDPIKQPPQEQKLGRYIGSPMTSPPRFKEFFFLFYFSVVFYNFIYIKFFYFFFFFGRVG

SEQ ID NO: 166187 - protein, 589 aa, Oryza sativa
  Clone ID: PAT_MRT4530_64920C.1.pep
MRTMLPLLVILVVGLRLAGASPPPQPVACTKGTTDCTVTNVYGSFPDRTICRAADASFPRTEAELVAPVTAAAAAGRKPKAATRHSHSFPKLACPGGRDGTIISTRFLNRTVAVDAAARRITVESGVVLRDLIRAAAAAGLALPHSPYWYGLTVGGLLATGAHGSSLWGKGSAVHEYVVGLRIVTPAPASQGFAVVRELVAGDPDLDAAKVSLGVLGVISQVTFELQPQFKRSVRFVTRDDSDFAEKVAVWGGAHEFGDMAWLPRQGKVIYREDDRVDVATPGNGLNDYLGFRAQPTLGLITARAAEERLERNGTDIARCLAARLPPSLFELQAYGFTNDGVFFTGWPVVGFQHRIQASGTCISSPEDGLLSSCTWDPRIRGPFLYNSGFSIALPRAAAFVADMMRLRDLNPRAFCDIDAKLGILMRYVKASSAYLGKPEDCVDFDVTYYRSYDDGEPRPHSDVFDELEQMALRKYGAVPHWGKNRNFAFDGAAAKYPNSGEFIKVKERYDPDGIFSSEWSDQVLGISGSPNIVDKRCAIEGLCVCSDDSHCAPELGYFCRPGKLFKEARVCSKDKSAAAGDDDLLDEL

SEQ ID NO: 166188 - protein, 614 aa, Oryza sativa
  Clone ID: PAT_MRT4530_64921C.1.pep
MPLAPLGKGGGERGRRGSGRRGLCLRPLEASAGVAGPSDDDGDDGGATQSSLLDEKDVGPNFPPRGAFALSPLQPKKSNKYELLIHVLINDVLVKTPFVPIVDYSGSLEWTVGPVTKVLKERALSHSQRCLSLSQGGEAKTEVRRKVQPLVEASQGAAEDMLVLTEHCKSSTIEERVIVIYEEEAINHVGDDEMIWILDSGATIHATSHREYFTNYTSDDFGIVKMSNNKKTTIVRKGDVQLETANGTRLVLKSVGHVKALRLNIISVPLLCKVNYDRTFEDEKYKLIKGNMVVARVCVKALEKEDSCVVWHKRLGHMSEKGMIELVKKDLLKEMKNVHLNKWSDCLVGKQHRVAFKSLPLHKKLEVLDLVHSDVCKMTTKSIGGEYIGPFDDYCEEQGIRHQCTPKSPQLNEVAKRMYRTIEERVRCLLSHAKLPKYYWGEALMTAVYLINLSPSVSLEGDVPNRVWYNKDISFDHLKVFGCKAFVHIPQDERSKFDPKTRQCIFVGYGLDEFGYRLFDPIANKVLRRRDVVFVEDQTIEDIVKTKKRCQQQHQDDLDPLPTVAGPQEVEEDDVDDAHSEVMGCIWDWAPAVSRCSSVLEPSCFADRRTSPQP

SEQ ID NO: 166189 - protein, 32 aa, Oryza sativa
  Clone ID: PAT_MRT4530_64922C.1.pep
HINSSRAFAKKKRKKGSQQGLAPVLPMAQKNP

SEQ ID NO: 166190 - protein, 217 aa, Oryza sativa
  Clone ID: PAT_MRT4530_64923C.1.pep
KGQLRATLEDIEDLKRQERSRQQRILKAKEALAAAERELDDLQPYEAPKAEMIQLTEEIARLTCDINELKRKKTDMESQLVRERENLRNCSDRLKQMENKNNKLLQALRYSGAEKINEAYNWVQDNRHMFRAEVYGPVLLEVCLLACSPTIVCFADHTSNSTSSLYCCQHFHETMESQEEHTYQWLLVLLCTAHCVLFFLHIVNVLLQIYPPVAGHG

SEQ ID NO: 166191 - protein, 81 aa, Oryza sativa
  unsure (1)..(81): unsure at all Xaa locations
  Clone ID: PAT_MRT4530_64924C.1.pep
YEGCCGGARCGVGWHTYPMQVGAGRXILMLVNPSXEDLIHVLQFVSSSPLYFIIVCCRNIGEYRKGVNYSLGRGECIYFSF

SEQ ID NO: 166192 - protein, 200 aa, Oryza sativa
  Clone ID: PAT_MRT4530_64925C.1.pep
CSTDSCSIRDDPIIVEQGSLINMAGPKRGIDMMDYALIEYDMRIKIGEQEKCDVQLIDGASLIGPAGLWNDSYTFRIPGDYGAVDITLSRLRWAAEATVEVVISEVQTSFDLLLGCITSGLDKEIRLFDGTITEPRGLKRSVVAVRMRSLIELNFKVGALSSSLDHCCSFKPKYHGHDTRELKTAFALISVKVCLFDHAF

SEQ ID NO: 166193 - protein, 288 aa, Oryza sativa
  Clone ID: PAT_MRT4530_64926C.1.pep
MGKEVDVSTLEAGGVRDRDYEDPPPAPLVDIDELGRWSLYRAVIAEFVATLLFLYVTVATVIGYKHQTDASASGDDAACGGVGVLGIAWAFGGMIFILVYCTAGISGGHINPAVTFGLFLARKVSLVRALLYMAAQCLGAICGVALVKGFQSSLYDRYGGGANELAAGYSTGTGLADEIIGTFVLVYTVFSATDPKRNARDSHVPVLAPLPIGFAVFMVHLATIPITGTGINPARSLGVAVVYNNNKAWSDQWIFWVGPFIGAAIAALYHQVILRASARGYGSFRSNA

SEQ ID NO: 166194 - protein, 157 aa, Oryza sativa
  unsure (1)..(157): unsure at all Xaa locations
  Clone ID: PAT_MRT4530_64927C.1.pep
LAHAKGPAKCKFFLWFAFQXHCWTTDRLQKRGIDSHSGYPFCAQELETANHILLDCVFARQVWLRVLSPPGWTALSPLRGSWLQDXWPSSRACLPDHLRASFDSLVLLVSKQLWKERNSRVFDSVLSSVSVVLESILLEGRLWSLAAIASFGELLGA

SEQ ID NO: 166195 - protein, 183 aa, Oryza sativa
  unsure (1)..(183): unsure at all Xaa locations
  Clone ID: PAT_MRT4530_64928C.1.pep
SIEYTTLIKVPGLMHFQHXTFQSATTCATIITSHQQTWXVAPVPLAPQAIPRSHQQTPLGFQSGTRGSDAXSRAIPAPVTPAVGIFLVTTHLGSSLXGLTLTHRASQCPSDVVSLVVHTXVYPGPRGSSQCVHKGPRVQSRPHLSSGSQGAIAYITWVFLSARQGLGTYFRRANXCAWEPXHI

SEQ ID NO: 166196 - protein, 700 aa, Oryza sativa
  Clone ID: PAT_MRT4530_64929C.1.pep
MDLDMDDYIDPYEEAEAEAAAEAAGLTSAAAAEDSSDEGDSEDDSEAESDYEERSYGLLRSGNHRVRNPDGTFRCPFCPGKKKQDYKLKDLLQHADGIGASSKRRRHGRERAFHRAFARFVRTDPSFAQDLAAINGIATTADASSNSSATGAKEKADANGDTDGSASVAAVAAGNRREEERFAWPWSGVLAAGAGFNAEDFADRVAMFGLDDVVPLVVDDAEGADSFAIVRFANGWGGFGDALTLENHFNKNKLGKNEWDARGSAGDAVKGDDGDTDVKVYGWVAREGDYNAGNVVGRYLRKHTNLTTIDEVSKSESEKSGKMVAILATQIEAKNRFLQDLETKKNATELSIARLEEDNRKLHDAYNEEMRNLHRRARDYALRVFQDNENLKLELDSRRRELNSRAKQLEKITAENASDRKKLDDQKQKAKDDNSELELASIEQQRADEDVMKLVEDQKREKEDVLARMLQLEKELHEKQQLELEVTRLNGTLQVMKHLEGDDDGDIHDKMEKLSERLEHEKKRLEELSGELVKKERESNDELQEARKELIMGLEDMLTGRTAIGIKRMGELDEKPFQNACKRKYGNDDYETKAAELVSSWQEEIKKPSWHPYKIITVDGEDKEVVDDDDTKLRHLWIEYGDDVCNAVKTALSEVNEYNASGRYVVPELWNFRKGRKATMKEVLKYIFGQIETTSKRRRP

SEQ ID NO: 166197 - protein, 221 aa, Oryza sativa
  Clone ID: PAT_MRT4530_6492C.1.pep
MAAVGAHAAVYHHPVSGLSAPAGDAAYSMSSYFSHGGSSTSSSASSFSAALAAATTPPLPDPSGSQFDISEFFFDDAPPAAVFNGAPTAALPDGAAANATRSAAEAVPAPAPAAVERPRTERIAFRTKSEIEILDDGYKWRKYGKKSVKNSPNPRNYYRCSTEGCNVKKRVERDKDDPSYVVTTYEGTHNHVSPSTVYYASQDAASGRFFVAGTQPPGSLN

SEQ ID NO: 166198 - protein, 200 aa, Oryza sativa
  Clone ID: PAT_MRT4530_64930C.1.pep
AHPWHGLALGRVADDDRVCDLCAAACPRGGFVYRCVPCGFDVHPLCTMFPAKVRSPLHPEHELAMVPAAAAAAATLGRQCRTCSGCGEVCGGWFYRCDACGVCLHAECLNGARAKQSAGVGSQGTGVGGAGSSQSGGGGGQSTGVKRSRSSLVGKLLLKAAVRVAVDAATNGLASAVLDSGSADDTSSFDLVPNSARGLV

SEQ ID NO: 166199 - protein, 163 aa, Oryza sativa
  unsure (1)..(163): unsure at all Xaa locations
  Clone ID: PAT_MRT4530_64931C.1.pep
MAEIRQVTFGCEERHAMEYVGHGLTELGDVGIGDRSCGRSCGCGGGYVGRSPFLSSFLSSFPLLSHRSFFLIGXXXFPLNLTLHPSFLIVAFSLSAIGASPSTSPALPPQPHPPLVPPPCLNHDVRRAAPNSTLASALGHLPESTASSISVAANSTSAFLRRP

SEQ ID NO: 166200 - protein, 99 aa, Oryza sativa
  unsure (1)..(99): unsure at all Xaa locations
  Clone ID: PAT_MRT4530_64932C.1.pep
ADPIPTSAVLVAASNHIPRAVDAXNSSLLNCLNKDPNPLKSLEKGRQIKRCVFDLLXELHQTGPGVIAPYAGCLVYYTHEIDFGRPVQVDFCTACPVSD

SEQ ID NO: 166201 - protein, 60 aa, Oryza sativa
  Clone ID: PAT_MRT4530_64933C.1.pep
WRCSPVHGAEWVPTAESDGRGVDGVTRTTANATASTARLGTRGSIVAGMAAILAVEWGEV

SEQ ID NO: 166202 - protein, 191 aa, Oryza sativa
  Clone ID: PAT_MRT4530_64934C.1.pep
MARRRPPPQRHHHLVLLALAAFSCLASGTATPTPTTSSQSQQPQPAGTLLQPALAADLAARTCWYTVQIKTSCASPRRTSDAVSLAFGDAYRNEVYAARLAGSSSSPQPSSSAAFERCATDTFRVGGPCGYGVCYLYLRRSGRDGWTPQWVRVYEPTSDTPSTFYYGDPLPNAVWYGFNRCPRLAASAAAQ

SEQ ID NO: 166203 - protein, 29 aa, Oryza sativa
  Clone ID: PAT_MRT4530_64935C.1.pep
LRLFNIDMIREHGTRDRFYVIDMNYFPGM

SEQ ID NO: 166204 - protein, 342 aa, Oryza sativa
  Clone ID: PAT_MRT4530_64936C.1.pep
MRRWSQIAAQLPGRTDNEIKNRWNSCIKKKLRQKGIDPNTHKPLTEADRRGAAPTVSTERTSGSSDVNPSSAGALGNLSHLLSETAQSSMLLPVYDKNHPETASLPRPKVPPKELFLDQLTAGHESPSSCRSSGPTLYFPFQQPLGYSNECGTGDGASMNSLWFNQNDFNCSTISTVMPPVSPSALSTSMGLNLPPENPRHGGTGIGNTPFYWDGSNPSSSGSTGSSGSNSMGFEPQSTTSILENSVFPWTDIGQEKDTRVHLVEELKWPDLLHGTFAEATTAMQNQSQSLYDDVIKAESQFNMEGICASWFQNQQPQQQLQAASDMYDKDLQRLPLSFEHI

SEQ ID NO: 166205 - protein, 277 aa, Oryza sativa
  unsure (1)..(277): unsure at all Xaa locations
  Clone ID: PAT_MRT4530_64937C.1.pep
MDVVKAAQLSGRTLEKVVVHPLVLLSIVDHYNRVARDTRKRVVGVLLGTSSRGSVDVTNSYAVPFEEDDKDPRIWFLDHNYHESMFSMFKRINAMFLNPVLVIIXVQPKELGIPTKAYXMLWQEVKENATQKQSTGVEHLLRDVKDTTISTLATEVTSKLAALKGLDARLREIRGYLDLVIEGKLPLNHEILYHLQVRLLLIAFCMDVFNLLPNLHVNELIKAFAVKTNDMMLVIYLSSLIRSVIALHNLINNKMLNKEHEKAEDSKPTAIPSAAGS

SEQ ID NO: 166206 - protein, 321 aa, Oryza sativa
  unsure (1)..(321): unsure at all Xaa locations
  Clone ID: PAT_MRT4530_64938C.1.pep
MSASRLLVLRGDRVAFSSSSSSFSPDAELLRMPNSRWWRRAGGHVPHPAAAGAHATGWEGASAXGGVLHLVLFVAVLCRLLNQRRLARTVASNDDGRNPMAIAVKAVCGGDDERAGDGELCRLDAERPGNVGGPRRGXVKECDIQVDPLRPPLYLFDSSSXACSVSPFPSPFSLPRCGQHASSVGGRREKAAPAVAPPPPPRGEQDGDSVRRVQDLPRPAGRDHPVSSXPRVRLATTSWQAPARRPAGRGHPASSSPAPGRPRPPGELLPRVRAAVTSRRAPPMRPSGRGIPASSSPAPGRPRPPDKLLPHXAARADGRRE

SEQ ID NO: 166207 - protein, 310 aa, Oryza sativa
  Clone ID: PAT_MRT4530_64939C.1.pep
MDVVKAAQLSGRTLEKVVVHPLVLLSIVDHYNRVARDTRKRVVGVLLGTSSRGSVDVTNSYAVPFEEDDKDPRIWFLDHNYHESMFSMFKRINAKEHVVGWYSTGPKLRENDLDIHALFNNYVPNPVLVIIDVQPKELGIPTKAYYAVEEVKENATQKSQKVFVHVPSEIAAHEVEEIGVEHLLRDVKDTTISTLATEVTSKLAALKGLDARLREIRGYLDLVIEGKLPLNHEILYHLQDVFNLLPNLNVNELIKAFAVKTNDMMLVIYLSSLIRSVIALHNLINNKMLNKEHEKAEDSKPTAIPSAAGS

SEQ ID NO: 166208 - protein, 315 aa, Oryza sativa
  unsure (1)..(315): unsure at all Xaa locations
  Clone ID: PAT_MRT4530_6493C.1.pep
PALVGFAPSRVNCPGLLRPPLPKNTRTVRGFLXLAGYYRRFIRDFGTIAAPLTALLRKEGFHWSNTAATAFRQLQHALMAAPVLQLPDFDKEFIVECHASGSGLGAVLHQGIDPVAFFSKLTASRHAKLAAYERELIGLVQAVRHWRPYLWGRRFLIRTDHCSLRFLLDQRLSTVPQHQNRSCQWLRWLPCAMYCYNTSYQSSLRTSSFRVVYGHEPPTLRAYEPGSCRLPAVQQALQERDDFLRAFRDRLEQAQQTYKMAYDGKHRALEFSVGGWVWLRLLHHPIASLAVKGRGKLGCIVIGAVAYRLHLPPGA

SEQ ID NO: 166209 - protein, 166 aa, Oryza sativa
  Clone ID: PAT_MRT4530_64940C.1.pep
RKSIFASGQNQFSQAEGRTAGSHRRSPSPGLPPAGSGKGRPGGAAAAAYGAPPPPPGPRAPPLPSPGLSPAGSGRGGRGAAVVAPGRRRVRAPPPPPRPRAPPPPSPGLPPSGSGRGGRGTTSPPPSPGLPLARSGRGGRGAAVVSARAAAAVHLDLYFCRRSFDS

SEQ ID NO: 166210 - protein, 449 aa, Oryza sativa
  unsure (1)..(449): unsure at all Xaa locations
  Clone ID: PAT_MRT4530_64941C.1.pep
MLLSCFCLFPRFACMDHVATDGNCRQCGERRQAATLTHGGGAAPRRGNGAPRQATVRQGERGGKRGKGRPHRWRRRGQRRRQGADEFRSKPRKKMRGIRENEDGWNGGLTTCEGERIPVAKGDVRMADSVAPELVNLTAAAARLLVVTSGGRSGGGGCGCKSDDATSVRLYGGDDRDGGSCQTMAWRLRSSEVDAQAAPSVTWPGPCRRGSEGQRRRQADASHPGXVGDGGGSPRLRAHSNREEEKARAHRGDAWASPYGADGGDTASRRDQHRRIRLVCIGTINSPQRGVSIPKAQHNNALYGFSLVVNVFSPRSWLSQLTERSRGTSPPHASIVALAFRSLARQRSHRLCRCHQCRIPMFHPTPSPWPSARHRPNDAAAAIVVVYRCRHQGHIMRLSLDFAVAASMRLLVDVASISSVLAPASNTSALHGFGQRCKLSGAIAVFSRL

SEQ ID NO: 166211 - protein, 97 aa, Oryza sativa
  unsure (1)..(97): unsure at all Xaa locations
  Clone ID: PAT_MRT4530_64942C.1.pep
CFYLVFACFLDLLAGIRLVCIGTINSPQRGVSIPKAQHNNALYGFSLVVNVSXQIVVISTHRKVGPIRALSVXKSNSEFIKWYQSRNSIHTLPPGCL

SEQ ID NO: 166212 - protein, 138 aa, Oryza sativa
  unsure (1)..(138): unsure at all Xaa locations
  Clone ID: PAT_MRT4530_64943C.1.pep
NLPSGPVQKVKNRRILVSETIPFRGSTSNCTGPFQAPPQNHSXSPSGRXPVSAGVVSGLADPRETNHKDCXGRISPKFLVRIFGGGFKDSVKEVTNSCGLPFQNPSPSLGKVTSFSTLFGTGRVFQITCFYCPMLIDI

SEQ ID NO: 166213 - protein, 151 aa, Oryza sativa
  unsure (1)..(151): unsure at all Xaa locations
  Clone ID: PAT_MRT4530_64944C.1.pep
GRVSPLLFPDPLLPASVRLYGGDDRDGGSCQTMAWRLRSSEVDAQAAPSVTWPGPCRRGSEGQRRRQADASHPGXVGDGGGSPRLRAHSNREEEKARAHRGDAWASPYGADGGDTASRRDQHRSESGIRLVCIGTINSPQRGVSIPKAXHN

SEQ ID NO: 166214 - protein, 80 aa, Oryza sativa
  Clone ID: PAT_MRT4530_64945C.1.pep
IWGSEKPQLAAKALPATAMQEMQAPPPPPILLLAPQVPKNIILFFFLLLIQIAPLLLNYLLVFVQSCLPSLGSKLLLALF

SEQ ID NO: 166215 - protein, 94 aa, Oryza sativa
  Clone ID: PAT_MRT4530_64946C.1.pep
RRLPGVFAATAMSLRCQDLPSPVHGLPLPLALPPASIPAIFGDKANIVGCARAWRTFLILGATSASPPFAADIDVKPPAGEALMLLLFPPLPSL

SEQ ID NO: 166216 - protein, 112 aa, Oryza sativa
  Clone ID: PAT_MRT4530_64947C.1.pep
MAMHIPTGACVSEEKEHPREFSRFGYHVLMGGRCTINLAKPSLRGMQGGDKTTATVNTVTRKKTPASAPSTMGSNDGDHWPCTETATAGPESLGRRQATPDPAPRGRGEWRC

SEQ ID NO: 166217 - protein, 98 aa, Oryza sativa
  Clone ID: PAT_MRT4530_64948C.1.pep
MEIQYELNSDRDLNRSPTGLRGPNDGSYIFVRGMTGGGIASLWEYGEENARGGEGRAGAIDYFLYIDACYFARVPSTSQRLLPLRSASSSNCRHASLS

SEQ ID NO: 166218 - protein, 77 aa, Oryza sativa
  unsure (1)..(77): unsure at all Xaa locations
  Clone ID: PAT_MRT4530_64949C.1.pep
WNSSRAMQCNAAKLEMSLNFVVNGFLDVLGYWSRRXVRLCGCAASSRRRGRGAAAAPSSSSPAACGGGGVDGGGGRR

SEQ ID NO: 166219 - protein, 70 aa, Oryza sativa
  Clone ID: PAT_MRT4530_6494C.1.pep
MAGNDSDDGGMKTQPLNMMRSSVNAYAGGLAPLVMSSQMADRAESASATKFAIPNLYYTPKSKPRSLLAH

SEQ ID NO: 166220 - protein, 111 aa, Oryza sativa
  Clone ID: PAT_MRT4530_64950C.1.pep
QLPAPRPPPKGTPWRAHTHAPIRASLLGSRHLVAARTSPPPRDRREIAARRAEEDPPKQLAPGPPRGGGSGERRECNFPATRRVRVGVVRLRPPRRRVTRRRRRRFESGRG

SEQ ID NO: 166221 - protein, 84 aa, Oryza sativa
  unsure (1)..(84): unsure at all Xaa locations
  Clone ID: PAT_MRT4530_64951C.1.pep
MQVDDMQRMRWSLAGNHCVPPPCSPTRLNPDYSHYVSNSRALCAIVCFMIECNGGAEDNNMISFVQFPXRFHNIDPHDHYNNNN

SEQ ID NO: 166222 - protein, 180 aa, Oryza sativa
  Clone ID: PAT_MRT4530_64952C.1.pep
RRRRSLPRPCRIVGEKHIILPRLVPSKLSHRQQLCGHRSVSEISGVVDETLGKRPLDGQNDILRYRVFTSTWNVGGMTPSSDLDLEDWMDSTANSYDIYVLGFQEIVPLNARNVLGPRNSCISTKWNSLIGEALNKRRRRGAVLHQEITNSSATERSAQEEHFRCIMNKQMVGIFVSVWV

SEQ ID NO: 166223 - protein, 352 aa, Oryza sativa
  Clone ID: PAT_MRT4530_64953C.1.pep
MRRRRRAAMGRVWRRWRGTTAATATATRGARTPCAAHCLDLMLKDIGKLKEFKNPIARAKRVTTFIYRHGRLLSAMREKTSGKNLLRPAVTRFATTYLTLKSNYSQRDELRSLFIHTKKMNQLVHKRLNDVVFVAYNWKMETRFQLRREKAGKGQILKSLRSLIGTMSGIIPYMNQLKVFVDVTLHRMMLMKLLVHHDLFELAVGTQGIQQCLKKMRKICNLTKKKIRRKIHLMMQIAITELHHPIKKVMNLVTASKWSDPLHHEDDQQAGPLPNNVEINVAEANKWMRRTSCHALASGGKRPSAADHGHQQGIGCYMGLRVAKNKVYMCVVLLLKCSFDVPKTSSRLKPYL

SEQ ID NO: 166224 - protein, 36 aa, Oryza sativa
  Clone ID: PAT_MRT4530_64954C.1.pep
MESEGAAEVWVGDGLQPKASQGSKELGMTGTSVQIV

SEQ ID NO: 166225 - protein, 79 aa, Oryza sativa
  Clone ID: PAT_MRT4530_64955C.1.pep
LSQNYLTSVPEGIKDLTSLIELDLSDNNITTLPPELGLLEPNLQVLKLDGNPLRSIRRTLLERGTKAILKYLKEKLPAE

SEQ ID NO: 166226 - protein, 91 aa, Oryza sativa
  Clone ID: PAT_MRT4530_64956C.1.pep
MASALDVRTCPKRGGVARHLPIYLCGYMGKLSFEVGDPGGSDVTKTDDAARVEAEELIVPDADQEDQEVAPRQTTRLVKPNAKYVGPYWAL

SEQ ID NO: 166227 - protein, 224 aa, Oryza sativa
  Clone ID: PAT_MRT4530_64957C.1.pep
MPCSMPVWQQRHHHRCLTPCLPSPSFLPLRSQPLPASSDGRQWHGARAQPDLPPQQAPLPAGGVGGEQRGRAVSGGGGRRMMKAMMVPHLSGLRRSFTRTYRGYRHLSRRLLDRQIRPRGAGDEATTWPALAPTRTIAETGRVLGGGGLLPPPPSRHAPWFPSAEVALRHGCLASSPVLARGECGSVAEDGCAEAQGGGVVLGVGRRGVVAATHGGGAPAASRG

SEQ ID NO: 166228 - protein, 198 aa, Oryza sativa
  Clone ID: PAT_MRT4530_64958C.1.pep
MEFLGSLTKPPEGLKKFKITVCKQVADDVKILAGLVKLQHLVLCLEFIPEEAIVIETKGFKEIERFSLDCPVPWLTFEKEAMPELTYLRLNLYAFPASEMSVPSGISNLEKLSEAKICYNARYINSPNVKRTVEVVSKEVAKHHNSIDLFINGTQIEVNQAGEEKAESATRFNQVYLPEDVVQAEDEAALRRETEFQS

SEQ ID NO: 166229 - protein, 232 aa, Oryza sativa
  Clone ID: PAT_MRT4530_64959C.1.pep
MANLNPNPLRFLRQGLAVHASRGLTSLSRSALLGAMKTFVWPLLSQSPWSKTGIIIGPSLPTSFKMNFTTRDALVLSLPEFYDGVHPGTFVNHDQGPNWRAANFHREGWFMFLDFPLDFIDLHHVHLAVASFGRFYKFPPEEDLPPAGPQPGPDDATDDDPDAGNVWQFGNPGNQGAGGWDEAVQQQQAANEQQEDAWGQDHPMGQIEENPGQLIIPQQMATPCPSSMMTPI

SEQ ID NO: 166230 - protein, 458 aa, Oryza sativa
  Clone ID: PAT_MRT4530_6495C.1.pep
MAAQSWRSFMCCGGGAAVHDDDDSAPRRRRIARRGDSPRSSSRMSFTSLSSSGTLSPEDLSLTLSGSNLYAFTYAELRAATGSFSRANYLGCGGFGPVYKGAVDDGLRPGLAAQDVAVKYLDLDCGTQGHKEWLAEVFFLGQLRHKNLVKLIGYCYEAEHRMLVYEYMSGESLEKHLFKTVNGSLPWMTRMKIALGAAKGLAFLHDADPPVIYRDFKASNILLDLDYNTKLSDFGLAKDGPQGDATHVTTRVMGTHGYAAPEYIMTGHLTAKSDVYSFGVVLLELLSGRKSVDRSRRPREQSLVDWARPYLKWADKLYKVMDPALECQYSCQGAEVAALVAYKCLSENPKSRPTMREVVKALEPVLGMDDFFPVGPFVFTVIVEDEKVVNMKVDMKVEVEEKKNTHQNHQDRHRQKYPDSAIHAGIVLHDRDGVIGGGYTGALRRHRRTASYNKERGA

SEQ ID NO: 166231 - protein, 54 aa, Oryza sativa
  Clone ID: PAT_MRT4530_64960C.1.pep
LAQIGEFAFVLLSRASSIHLIEVISPYFVPIMCCSKASCLSMLFYTLMVTLSSS

SEQ ID NO: 166232 - protein, 789 aa, Oryza sativa
  Clone ID: PAT_MRT4530_64961C.1.pep
MASLVPGVLVKLLQHMNTDVKVAGEHRSSLLQVVSIVPALAGSDLFTNQGFYLKVSDSSHATYVSLPEDQHDLILSDKIQLGQFIHVDRLEAATPVPILRGVRPVPGRHACVGNPEDLVVTSSSNFLGNKKAQPTNGLRKTAQMAAVEAIQEASAAESLLRCLSSYAEVSSTAEEQNPQPAVERFLALHTALSRAAVITDNKKEAIKSKAKPAGTRSTPSSPTSVYSLPASFDRFSNDLKQRNKVKGAEKASSSRLSLLEKAASVLKVTTAGRKSSAGPKALRRSWEGKVDTKGKTNSDSKMTKLEKKPENRGTMATIPRRKPPVDEKVQHKDDSKLQNPAKKTTANAPSDDADKAMKKHPPTVKRTSGISNPNVTNLVEVPPNSKKLTDASNSWTTLPPSLAKLGKELLKYRESAQMAAVEAIQEASAAESLLRCLRLTNMLNTTGHGDSAPGQVASVCDSDLINVVTFLLACVGRSSSYAEVSSTAEEQNPQPAVERFLALHTALSRAAVITDTLARSSAASVSSPDRSAASDAGTVVSVTDEETAAVAAERRRRATSWVSAALATDLSAFGLYNLKPVPATISSPLAVLVVDESAKPAASAAANAVKSSPAKSRMSPAKGKARTGPAATAAATAAPPPLPEWEKGVGAEERVELARRLGDESRGWFLGFVERFLDADVAAAAAPWDRERAARMLPQLKRVNDWLGEIGKRGEATPPPPPEADGEAAAATIAAAPANGGSAVPEETIERLRKKIYEYLLTNVDSAAAVLGGGASAPAPAAPANAKKG

SEQ ID NO: 166233 - protein, 649 aa, Oryza sativa
  Clone ID: PAT_MRT4530_64962C.1.pep
MGGSHSREDLDLSDSEDDDSASHASDASSDFATPPPSSSAKPSAAKSSAAAATPASIDAIDRHLRSLHLKYAEPISPNPSPSPTSAAAPAALNAVKLYLHIGGSSPSARWIISDRLAAASFVRAGDDDDDDAPSSGPWCLVVGSKIRARVGPELQLKTFPAQRRVDFVADGVWALKFLHADGYPNFYAKYQSCLFENSYGVAATDEGRAKVFGKDFAAWARPEDGDESIWEDATDGFVPSPSRSPMPSRSPILKPLMEDLREYEEPVEEGGGIQSLALGALDNSFLVGDSGIQVVRNFEHGIHGKGVSVKFSGGSTNFSTPKKALLMRAETNMLLMSPATDGKPHAKGVHQLDIETGKVVSEWKFGKDGADINMRDITNDSKGAQMDPSESTFLGLDDNRLCRWDMRDRRGIVQNIASATESPVLQWTQGHQFSRGTNFQCFASTGDGSIVVGSLDGKVRLYSKSSMRMAKTAFPGLGSPITHVDVTYDGKWILGTTDTYLILICTIFIDKDGKEKTGFGGRMGNRIAAPRLLKLTPLDSHLAGQNNIFREGRFSWVTENGKQERHLVATVGKYSVVWNFLQVKNSHHECYQCQEGLKSCYCYKVIPKDESIVASRFMHEKYAVSDTPEAPLVVATPMKVTSFSISSKH

SEQ ID NO: 166234 - protein, 57 aa, Oryza sativa
  Clone ID: PAT_MRT4530_64963C.1.pep
FSLGKTCSSGSFSTDLCVDIHQLASYKLLIICTNKKSRNIHFLLRPMLFFFCVIANA

SEQ ID NO: 166235 - protein, 56 aa, Oryza sativa
  unsure (1)..(56): unsure at all Xaa locations
  Clone ID: PAT_MRT4530_64964C.1.pep
KDVGKGFLCIRMVKAIYLRLNALHXDKDRGGILDGHQIVLCKWXEGDNQRCKILTW

SEQ ID NO: 166236 - protein, 324 aa, Oryza sativa
  unsure (1)..(324): unsure at all Xaa locations
  Clone ID: PAT_MRT4530_64965C.1.pep
DADITPSDTHNNPPPVIQGPITRARIMERIRRHLEKDLELWRIKVDVQTKSTSSAIRSPRPVCTKTGAXHYYLSLDCVPLXIYLAFLAQHITSRQHRFLILAIADYIFQVSFALLAQKEMTEAVTKAVQDAILKIGFVNQMERLDKRXSKLTDRVAVLETQEPSKEEVSSSNDSGHPKDTVYDSSGNIDAQATRQARLRHHLRTNRTGMGGTSNHHHQQGNNNRVPDDPYAKVKFKIPSFWGYYDAEKYLNXEMTVEQKFSAHLVPKQHRVRQASSEFKDFAIMWXTGLADEGVLPTTWEELKVAMHDRFHLPDFHSKPGIKLI

SEQ ID NO: 166237 - protein, 206 aa, Oryza sativa
  Clone ID: PAT_MRT4530_64966C.1.pep
CCRWVFAGAAASSFDGPFVNPSESKLNPEVAALNTLNISRNATFSQLKAAHLEDYQGLFHRVTLQLSQASMLEKDILEEVDHDVKTTAERINSFRSDEDPSLVELLFQYGRYLLISSSRPGTQVSNLQGIWNQDFAPAWEASPHLNINLEMNYWPTLPCNLSECQEPLFDLIGSLAVNGTKTAKVNYQASGWVTHHVTDIWAKSSA

SEQ ID NO: 166238 - protein, 39 aa, Oryza sativa
  unsure (1)..(39): unsure at all Xaa locations
  Clone ID: PAT_MRT4530_64967C.1.pep
ICVYRVAVCTSIGDRVRTVGAVCFSVQVLNLPNEMWCCX

SEQ ID NO: 166239 - protein, 37 aa, Oryza sativa
  Clone ID: PAT_MRT4530_64968C.1.pep
HAMVAFSSCFRSLHLCLLISAWSSLIPFAYILCQLNN

SEQ ID NO: 166240 - protein, 175 aa, Oryza sativa
  Clone ID: PAT_MRT4530_64969C.1.pep
MKEYGYISHQVWQLLWLLLAPPGGVQLFGGGMKALTRDRGLWRLTMAGPYQHFGRRRLSGGSLSWFRGARSYLAAVGAVYNSRAQITLLDHQTIDRQVGEKLTPSEHHLTFCMFRIQILRHIIKAGLLWTYSLFFYEFYYAFDIAMLLSSFYGTGESLSDVSSGSEVGKSTDTSV

SEQ ID NO: 166241 - protein, 397 aa, Oryza sativa
  unsure (1)..(397): unsure at all Xaa locations
  Clone ID: PAT_MRT4530_6496C.1.pep
AAYERELIGLVQAVRHWRPYLWGRRFLIRTDHCSLRFLLDQRLSTVPQHQWASKLLGFDFGVXYKLGMANLVADALSRWDEHLAEAFALSXPHQFSLFDELSREVASTPALSAICEDITKGAKPPAXAFTDDLIMFKGCVFMPPSSESLPAILESVHGLGLEGTQKTLSRLRADFHISRDRATVQDFVRACLTCQRNKTEHLQPANLLQSLPVPLAVWADIAMDFVEGLPRVHGKTVIVPVPTSSRSHPYTATSVVAAFFAEIVRLHGXPVSIVSDRDPVFTSTFWREILWLAGVQLNLSSAFHXKSNGQSEVTNKIIMMYLRCFTRNRSCQWLRWLPCAMYCYNTSYQSSLRTSSFRVVYGHEPPTLRAYXPGSCRLPAVQQALQERDDLLRAFRD

SEQ ID NO: 166242 - protein, 145 aa, Oryza sativa
  Clone ID: PAT_MRT4530_64970C.1.pep
MVAGGSATYHYAAGDPVLHDTDRARYHAFFHCNATSFVASVVVIVLLLLRRRRRRGAPAAPLWAMQSAVVLDLLGLLGAYAAGSCREWETSAYVVALVGAVVVYIALHVLLSFDAVAAKAERLKVWRYFGESSDNNNQTGGGAAV

SEQ ID NO: 166243 - protein, 144 aa, Oryza sativa
  unsure (1)..(144): unsure at all Xaa locations
  Clone ID: PAT_MRT4530_64971C.1.pep
FNHMNISYPRRDTPLPFIGISLLYSQLGDGCAYVLSSAMGSYCGLHLGFSTNVRGEEPWPTMELCSSCCWSTVIFFSYXFSVAAFFCANQPHQQKVVLRLMVAGSTINCALHFRACRXISFPSSDLYLLSTRMSTIHANRIAPL

SEQ ID NO: 166244 - protein, 105 aa, Oryza sativa
  unsure (1)..(105): unsure at all Xaa locations
  Clone ID: PAT_MRT4530_64972C.1.pep
FNHIEIDSISTRDAMTTSYRYYIHNSCDGCAYVLSSAMGSYCGLHLGFSTNVRGEEPWPTMELCSSCCWSTXIFFSYYFLVPPSSVPTSHTSRSCASTDGGGKHN

SEQ ID NO: 166245 - protein, 109 aa, Oryza sativa
  Clone ID: PAT_MRT4530_64973C.1.pep
LPPKKGATGPPPKKGAFGPFGRGNPIFPWEVVRPPKGENPSPKKPPFGGFFPVPKRGFVSPPPTIVFFYLPPPAFYAHARTFPKKKTLKGFCVLIFSPKEEEGLLTVIA

SEQ ID NO: 166246 - protein, 94 aa, Oryza sativa
  Clone ID: PAT_MRT4530_64974C.1.pep
TRGCRFTERARAARRVTPAPTHVRRMRRVARAALAETRAETGVARGGGSGRRRRARALSRARRERRPARAASDQLAAGVRARILLVHVKASRWD

SEQ ID NO: 166247 - protein, 97 aa, Oryza sativa
  unsure (1)..(97): unsure at all Xaa locations
  Clone ID: PAT_MRT4530_64975C.1.pep
SSPTLSPVTFPSLITLIIPLSFYLLFYPIIYXFSIFFLLFTLILSFHLLIYFFLYSPFSLLYFLLLFTFSYHFHFSLIFYFLLNLLFFIFYIFYIYF

SEQ ID NO: 166248 - protein, 83 aa, Oryza sativa
  Clone ID: PAT_MRT4530_64976C.1.pep
MASDKLRRAARYCPRRLERRPEPWEPGIESTSTGKTLEKEIERIPFSQLIWKKEQRGGQIRKGIGTAAAWDGSGSVQMLKTTM

SEQ ID NO: 166249 - protein, 152 aa, Oryza sativa
  unsure (1)..(152): unsure at all Xaa locations
  Clone ID: PAT_MRT4530_64977C.1.pep
LVLGDLISRSISFLIDTXYYWKQQGVDENLHWLQCARLLIQTVVEEADRRHITSXAMILQLQMMRKAMYKGYYMSESFSYQIITGKSQGELVDLLIAFSXFSSAKWFYLSTGTTEILCKXEEIKEMQKMVGILKKHRIEQSFLLQMSIGSMK

SEQ ID NO: 166250 - protein, 675 aa, Oryza sativa
  unsure (1)..(675): unsure at all Xaa locations
  Clone ID: PAT_MRT4530_64978C.1.pep
MEEESQSQSHFPLRWESTGDQWWYATPIDWAAASGHYDVVRELLRLDANLLIKLTSLRRIRRLESVWDDDMRFADAARNRAAVARRLLHDCEPPRGAAAGGGSRPNRLIRAGYGGWLLYTAAAAGDAAFVRELLGRQPLLVFGEGEYGVTDVLYAAARSDSSEVFRLLLSAVLSPPECSAGGEGDGGTAAIAGGFMFRCEMMNRAMHAAARGGNWXVLRELLQGCSDASAFRDAQGSTILHAAAARGQLELSRMXVVKDLIASFDIVNSTDEQGNTALHLAAFRGHLPVVKALITASPSLISATNEVGDTFLHMALTGFRTPGFRRLDRQMELMKQLIGGVIMDLSSIINMQNDDGRTVLHLAVIGNLHSSLVELLMTAPLIDLNVRDNDGMTPLDLLRKQPPTASSEILIKQLILAGGIANSMDHETRSAIASQLKMHCIVGSPGTSFKIPDAEIFLHAGIDASDISERTNSFSSVGQSEPEFPESSRKKLNSMQNAAKHLKILLRWPLRKEKKSSSGARNELDDDASSVDSVKSWSHGETPTPLRQKYSRMSSLFNNKRTMAARIGSPSPSMKKSFADGLAHGVMQPESPSGSGSWSSSSLVDRIEAVHLDKNGQASPDTSVVIRRTPKKHGSLNSRLMNQYFCIGAQGIAVEDSTTGQRSSRMFRSSLLSAA

SEQ ID NO: 166251 - protein, 128 aa, Oryza sativa
  unsure (1)..(128): unsure at all Xaa locations
  Clone ID: PAT_MRT4530_64979C.1.pep
DXVRKPDPQGRVXSIXXXATXWLEKKXXXIVXXSQRXLSPTXSXTXTFPLEXSXXFPXPQRXKFQHXVLTTNQMDXNXLAILPKVXIVXGEQXSYIXVVSECKXRADSARAXAEFQQPGGSRXSRRPL

SEQ ID NO: 166252 - protein, 159 aa, Oryza sativa
  Clone ID: PAT_MRT4530_6497C.1.pep
MTAATMSAGLFTTAPLGTTLPPISLPLPPELTAILATGGLYGTSDASASALPAQDVSAFFITPGAASATLPLVGLPPQAAGAPPPPPPGYGGFIPLMTGAAPAPTAQNFYNVDLNNDATANLHAQAVSMLNIKSLMPVTLDLNFGNYTQWCGLILVTLD

SEQ ID NO: 166253 - protein, 69 aa, Oryza sativa
  Clone ID: PAT_MRT4530_64980C.1.pep
MGLAYERASRLVVAHHVVRSTAQEEWRICGGWLIHNKLVHFILDSNTDSSLRTEQRYLSLYRRITSLSL

SEQ ID NO: 166254 - protein, 65 aa, Oryza sativa
  Clone ID: PAT_MRT4530_64981C.1.pep
MSLIVVVFCNSLSSVAASHIIVLQMRSILVCTDVNMPVRGRECSATKTHAHPPASCSSSPSSLVL

SEQ ID NO: 166255 - protein, 574 aa, Oryza sativa
  Clone ID: PAT_MRT4530_64982C.1.pep
MNASQFMDKQILGLAASGAGAAAAAAAASSSPPAAGGGGGGGLFDLMSPDPHGDGPGHARRGQQQHGGADEVVPSYDFQPIRAAPAAAAPASAASPWGSLDSKAASSNLKSAGMLESHVLKKVSHEEERGNFSAVSIADIDRTMKKYADNLLHALESVSSRLSQLEGRTHHLENSVGELKLIIGNYNGSTDGKLRQFENTLREVQAGVQILRDKQEIVETQVQLSKLQLSKAEDAQSEKAGVGQADSRQQPTLPQPQHQAPPPSHPPALPALPAPNAPPPPAPQSQPPSQFPGHLPHSQVQSVPPAPPTPLAPTIPQESYYPPSAVQPTDTTHQQYQAPPAPQSQAPPAPPQHYQTPPQYAQYSQPPPASANPSTAVPPSVHQQPEEVAAPYGPPPQSYPPNVRLPSPYVPPPSGPAPPFYGPNPGMYEPPAVRPNSGPPPSYNTGYKPQGGGGFPEPYGYSGSPSHRGNAGMKSPSPFHPTGSAGSGNYSRLPTAQMLPQAASASSTPSASSGNRVPIDDVVDKVATMGFSREQVRAAVRQLTESGQNVDLNMVLDKVMNGADAQPQRGWHGR

SEQ ID NO: 166256 - protein, 97 aa, Oryza sativa
  Clone ID: PAT_MRT4530_64983C.1.pep
VLGIDYYLSTRSPWLSTTRRPGLRPTLFTAPLRRLVPPIHELPTGRRPPGVRGGLETGGICALAAGVRHGWRRTANPFFLNEIVSSSLKLSLTLLAF

SEQ ID NO: 166257 - protein, 394 aa, Oryza sativa
  unsure (1)..(394): unsure at all Xaa locations
  Clone ID: PAT_MRT4530_64984C.1.pep
KLGIGVALKFKLFLSILSSASSVSFVGTYGVNYGRIADNLPPPTEVVKLLRMARIKNVKIYDADHTVLDAFRGSGLNLVIAVTNGEVKDIAASPAKAMDWLNENVQPYYPSTRIVGITVGNEVLGGADAGLAEALIGAVVNIHDALKMLGLATKIELTTPHSEAVFANSYPPSACVFRDDLMVYLKPLLDFFSKTGAPFYVNAYPFLAYMSDPAHIDVNYALFKPNAGIYDAKTRLRYDNMFEAQVDAAYFALEAAGYPEMEVRVAETGWASAGDATEAGADPANARAYNFNLRKRLFLRKGTPYRPGXVAKAYIFALFNENLKPGPTTERHYGLFKPDGSVSIDLGFKGLVPSSSSPSSSIISFKRARERGWMALVLYSATLLSCTFIFLVLS

SEQ ID NO: 166258 - protein, 61 aa, Oryza sativa
  Clone ID: PAT_MRT4530_64985C.1.pep
STERSSSASGSGNLHNGALDLKEIITMNRSAIDTHNTTQTTTGLTREQALLVKSPTHNILR

SEQ ID NO: 166259 - protein, 182 aa, Oryza sativa
  unsure (1)..(182): unsure at all Xaa locations
  Clone ID: PAT_MRT4530_64986C.1.pep
RIPRRYLHVEVHFVRRINWSSVFSFCKNWLKHPLNIALLAWLLCVAAAGGMLILLLLGLLNRAFPSKPLRHHWIEIDNQILNALFTLMSIYQHPSLIHHLVLLCXWRPEDAAELXRRSRSEFADNFFFVLGVVAPVVAGAYTVYSPLGRDTDDDASGEEAKQQQQHMIEAELPGTRTVVVDP

SEQ ID NO: 166260 - protein, 504 aa, Oryza sativa
  Clone ID: PAT_MRT4530_64987C.1.pep
MVQNFPEDDMAGTPYSDQTSPILTEYHITVPALHDGSMQGSVHHERRLLDCLRATPSVEWLKNINLCSPLTNFRLPSTGVRRYLHVEVHFVRRINWSSVFSFCKNWLKHPLNIALLAWLLCVAAAGGMLILLLLGLLNRAFPSKPLRHHWIEIDNQILNALFTLMSIYQHPSLIHHLVLLCRWRPEDAAELRKVYCKNGDRRPGERAHMSVVVALLHVTCISQYVVCNLYWAYRSRSRSEFADNFFFVLGVVAPVVAGAYTVYSPLGRDTDDDASGEEAKQQQQHMIEAELPGTRTVVVDPVWAGGLLDCGEDPAACCLSSLCTFCVFGWNMERLGFGNMYVHTAMFLLLCVAPFWVFNITALHIHDYDLSDAVGAAGIALCFLGLLYGGFWRVQMRKRFALPGSRWCCGSASLTDYARWLFCWPCALAQEVRTGNLYDVEDGGGVFYEKAMDGGDVEGGDGSDGKPVRVNLSLLSKHGCGGVEGWDALRQVHQGDQEGNKNDR

SEQ ID NO: 166261 - protein, 631 aa, Oryza sativa
  Clone ID: PAT_MRT4530_64988C.1.pep
MSSFLNEEFSSGPFSDIFCDNGSNKHQDGLGKSKAFIDSSREETAQLAKKFESNLFGANQKSSSNGCLSERMAARTGFGVLKIDTSRVGYSTPIRSPVTIPPGVSPRELLESPVFLPNAIAQPSPTTGKLPFLMHSNVKPSIPKKTEDETRHDRVFFFQPILGSKPPTCPVAEKGFSVNHQNQPSVTDNHQELSLQPISTASNDFTSPTIVKPKTSDSMLDNDDHPSPANDQEENASHKNEEYSSDLIITPAEDGYNWRKYGQMRVRTVERSQDGQITEIVYKGSHNHPLPPSNRRPNVPFSHFNDLRDDHSEKFGSKSGQATATSWENAANGHLQDVGSEVLTKLSASLTTTEHAEKSVMDKQEAVDISSTLSNEEDDRVTHRAPLSLGFDANDDYVEHKRRKMDVYAATSTSTNAIDIGAVASRAIREPRVVVQTTSEVDILDDGYRWRKYGQKVVKGNPNPRSYYKCTHPGCSVRKHVERSSHDLKSVITTYEGKHNHEVPAARNSGHPSSGSAAAPQATNGLLHRRPEPAQGGGGGSLAQFGYGSAGHRPAEQFGAAAAGFSFGMLPRSIATPAPSPAIAVPAMQGYPGLVLPRGEMKVNLLPQSGNAGAAASQQLMGRLPKQHPQM

SEQ ID NO: 166262 - protein, 152 aa, Oryza sativa
  Clone ID: PAT_MRT4530_64989C.1.pep
MELRWILASGRWLPGFSSLLRCRQWIRRGPATTESTAKLRRRSKHGNGSAFTVTATSGGVRRKRTGGRGSSHPCEAEGGDGTDRRRPGRRRTAAGAAPATTAGWSTWWRRRGRGRLTAGPHAAAARCARRRPRRHSRREAAHPRPYGRRRRP

SEQ ID NO: 166263 - protein, 86 aa, Oryza sativa
  Clone ID: PAT_MRT4530_6498C.1.pep
RDKSTPLTKNLVPRFGTARKKKEIGRKENFSQIMFSENLSLRFDHLAYPTVEMALIPTCHAQKFTSDFRTYLCTKSSSRNQPRYTN

SEQ ID NO: 166264 - protein, 650 aa, Oryza sativa
  Clone ID: PAT_MRT4530_64990C.1.pep
MSSFLNEEFSSGPFSDIFCDNGSNKHQDGLGKSKAFIDSSREETAQLAKKFESNLFGANQKSSSNGCLSERMAARTGFGVLKIDTSRVGYSTPIRSPVTIPPGVSPRELLESPVFLPNAIAQPSPTTGKLPFLMHSNVKPSIPKKTEDETRHDRVFFFQPILGSKPPTCPVAEKGFSVNHQNQPSVTDNHQELSLQSSSTAAKDFTSATIVKPKTSDSMLDNDDHPSPANDQEENATNKNEEYSSDLIITPAEDGYNWRKYGQKQVKNSEHPRSYYKCTFTNCAVKKVERSQDGQITEIVYKGSHNHPLPPSNRRPNVPFSHFNDLRDDHSEKFGSKSGQATATSWENAANGHLQDVGSEVLTKLSASLTTTEHAEKSVMDKQEAVDISSTLSNEEDDRVTHRAPLSLGFDANDDYVEHKRRKMDVYAATSTSTNAIDIGAVASRAIREPRVVVQTTSEVDILDDGYRWRKYGQKVVKGNPNPRSYYKCTHPGCSVRKHVERSSHDLKSVITTYEGKHNHEVPAARNSGHPSSGSAAAPQATNGLLHRRPEPAQGGGGGSLAQFGYGSAGHRPAEQFGAAAAGFSFGMLPRSIATPAPSPAIAVPAMQGYPGLVLPRGEMKVNLLPQSGNAGAAASQQLMGRLPKQHPQM

SEQ ID NO: 166265 - protein, 231 aa, Oryza sativa
  Clone ID: PAT_MRT4530_64991C.1.pep
MALVGGGKVVAAEPGVARRLWRVVRAVLYMLRRGLQAPSGRKLAMDLHLLLRRGKIAGKALGHLVTFHHHHHNHGHGFSASAAAAGSSSLSCRGIDPALAVVFETLNDSEHLFNDDDAAVAVAPATAETTPLWTPARSHHSHSPAPAAPSRHRGRTTDSPFAASNGDEAGGGAQQQVDRKADEFIRRFYEQLRAQRSVAATPDYYGASPYSNAPYIIITRKSVDLDCWVDY

SEQ ID NO: 166266 - protein, 67 aa, Oryza sativa
  Clone ID: PAT_MRT4530_64992C.1.pep
QSVRASSTGSRRRILCKTVSILGDGLVCGVRTCVRTCTRVRRNVVLIYASVLCVDVYPCGRGEFVHL

SEQ ID NO: 166267 - protein, 134 aa, Oryza sativa
  unsure (1)..(134): unsure at all Xaa locations
  Clone ID: PAT_MRT4530_64993C.1.pep
GHLNVHTKPRERIHPNMPIMHIIYQAVGDVLVIYYTNPKSTTHGDLYYDGKESEAKLKEMTTELAAAELKEAIDLPDCEAPVWIINIQRSSPSSCNTQVKITALNAPIPSGACLGYRPGEWGKPPVDXHGRPLY

SEQ ID NO: 166268 - protein, 108 aa, Oryza sativa
  unsure (1)..(108): unsure at all Xaa locations
  Clone ID: PAT_MRT4530_64994C.1.pep
MAVAQQQQQQQRQATGESLMQKCKPYVAMVSLQFGYAGMNVITKVSLNHGMSHYVLVVYRHAFATLYIAPFALVLERKVRPRMSFXVFLQIFVLALLGPXIDQNFYYA

SEQ ID NO: 166269 - protein, 55 aa, Oryza sativa
  Clone ID: PAT_MRT4530_64995C.1.pep
MYQDLKEGYWWPNMKRDVAEYVALCDVCQRVKAEHQRPADRNWLRFHLGNRGPTH

SEQ ID NO: 166270 - protein, 48 aa, Oryza sativa
  unsure (1)..(48): unsure at all Xaa locations
  Clone ID: PAT_MRT4530_64996C.1.pep
FFFFLSLHCISNLNCHGXILREHSHFXXITQSRSHYNQQKQAPNNAWH

SEQ ID NO: 166271 - protein, 326 aa, Oryza sativa
  Clone ID: PAT_MRT4530_64997C.1.pep
MPKDRSTRAVSYERRRSRVSPYPSNGKGCARRSEESAAAAAAAAAKQAAEWEDVRCPVCMDHPHNAVLLVCSSHEKGCRPFMCDTSYRHSNCFDQYRKASKESSKDSGASAAAAPECSECQQPIKLSCPLCRGPVSHWTKDYDARKYLNVKVRACTKESCEFRGAYGQLRRHARENHPTVRPTQVDPERQRDWHRMEQQRDLGDLFSMLRSGLSAREDGIGVSEGEEDISERALHSPSITMVFIVRTGRSILHYREAFPGHHRRRTILLLGEAFGRESSPLGGASGSGDGDTTARENDEGDDDVTLSTEASAGSQHDGEVDGDPAH

SEQ ID NO: 166272 - protein, 202 aa, Oryza sativa
  Clone ID: PAT_MRT4530_64998C.1.pep
SHIVQVTTRDPQANHSNPVALLLSHSQRPPPLYPTFPFPAPGRRPPPYSRLQLGDGEDEVLGVRRLHNAVRVVEWRGARQRLVRGGGSAPSSPPTPCRRRPWRRAPSPPARASHVAGTTPPPSPRAASRLAPHAAPPRAQREWGTGVESRAGDEETERGGRRRRCGSGVAPGSSSLGGDEEAERGGRRRRRGSGAAPGPSSL

SEQ ID NO: 166273 - protein, 56 aa, Oryza sativa
  Clone ID: PAT_MRT4530_64999C.1.pep
MRKLLLVLAELILIPVHNKPNPPHYVQEQNQTKLNFAKQELFSFFTTQRVSNATFH

SEQ ID NO: 166274 - protein, 450 aa, Oryza sativa
  Clone ID: PAT_MRT4530_6499C.1.pep
MKVDDGPGVNGSRWAKMMSTDSWRWCLGLIYMDAVASIWIAASYIVQSVVDEGVSPFLITYICNSLFVIYIPIVEAARYFEDSINNFWTKLKGKDVADLEQSADLESINLLHGSEQEGNTASPTRLPEDILASEAVFPVQAELNVADGSKGLDAKGRWTRARVARVSMVVCPFWFLAQLTFNLSLRYTTVTSNTILSSTSSLFTFLVALVFLGETFTWLKLISVLLCMGGTIIVSLADSGSTANTIATNPLLGDVLSIVSAGLYAVYITLIRKKLPDEKEGQGEVSMAQFLGFLGLFNMLFFFPFALFLNFTKLEPFHRLTWEQVGLIVGKGLLDNVLSDYLWAKAILLTTTTVATAGLTIQVPIAAIVDTLTGHAPHLLDYIGAAAVLVGFAGINIPVGTPQGSQQEQETPIVSMVDDPVHLPSDRNATSMVDDPVYLPSDRNATGAVQ

SEQ ID NO: 166275 - protein, 153 aa, Oryza sativa
  unsure (1)..(153): unsure at all Xaa locations
  Clone ID: PAT_MRT4530_649C.1.pep
GLLLQQEAQEAAGQCSCVLPPLQAAGRGPRPXPPPPARASASPPPRREQRDRSVRRSPSPAAKRTPEQRRAASPAPSLQRKPPVPVRPSPRRVQEAPPSPLEPPPPPPPQPEEDAMTADGEPSIADAASAGGDGEGKESLDNPLVSLECFIFL

SEQ ID NO: 166276 - protein, 1156 aa, Oryza sativa
  unsure (1)..(1156): unsure at all Xaa locations
  Clone ID: PAT_MRT4530_64C.1.pep
MAAAVAMRSGSGSDGGGGGYDKAGMDSGKYVRYTPEQVEALERVYAECPKPSSSRRQQLLRDCPILANIEPKQIKVWFQNRRCRDKQRKEASRLQAVNRKLTAMNKLLMEENERLQKQVSQLVHENAYMKQQLQNPSLGNDTSCESNVTTPQNPLRDASNPSGLLTIAEETLTEFLSKATGTAVDWVPMPGMKVDCQLLRFTLPASNDPGPDSFGIVAVSHGCRGVAARACGLVNLEPTKIVEILKDRPSWFRDCRSLEVFTMFPAGNGGTIELVYMQMYAPTTLVPARDFWTLRYTTTMEDGRLVVPVLADDDAAVARHAPLVMRSNRKAGIDFVDPRATFCPEAAMLVLSVPTPAGVRVLREHGSEWADYKTDADLASALKTSACSPPGLRPRRFSGSRSLSGSGGGLSTASVQEVVRVEMLPSLYMVRPCDRGGSIVHIVDQQQPGRWWDPPFRLALHRLMISQMKLHXISSGFRVIPLDMKTDGASSGRTLDLASSLEVGSATAQASGDASADDCNLRSVLTIAFQFPYELHLQDSVAAMARQYVRSIVSAVQRVSMAISPSQTGLNAGQRIISGFPEAATLARWVCQSYHYHLGVELLSQSDGDAEQLLKMLWHYQDAILCCSFKEKPVFTFANKAGLDMLETSLVALQDLDLEALFVPDVLRPLFESFRVVAQKMTTAALRHIRQIAQETSGEVVYALGRQPAVLRTFSQRLSRGFNDAISGFNDDGWSVMGMDGIEVVIIACNAKKVRNTSTSANAFVTPGGVICAKASMLLQSVPPAVLVRFLREHRSEWADYNFDAYSASSLKTSSCSLPGLRPMRFSGSQIIMPLAHTVENEEILEVVRLEGQALTHDDGLMSRDIHLLQLCTGIDEKSMGSCFQLVSAPIDELFPDDAPLISSGFRVIPLDMKTDGTPAGRTLDLASSLEVGSTAQPTGDASMDDCNLRSVLTIAFQFPYEMHLQDSVATMARQYVRSIVSSVQRVSMAISPSRSGLNAGQKIISGFPEAPTLARWICQSYQFHLGVELLRQADDAGEALLKMLWDYEDAILCCSFKEKPVFTFANEMGLNMLETSLVALQDLSLDKIFDEAGRKALYNEIPKLMEQGYVYLPGGVCLSGMGRHVSFEQAVAWKVLGEDNNVHCLAFCFVNWSFV

SEQ ID NO: 166277 - protein, 194 aa, Oryza sativa
  unsure (1)..(194): unsure at all Xaa locations
  Clone ID: PAT_MRT4530_65000C.1.pep
MAKLTGVRCERGSRDGRRRRRGGRRRPRAREPDGGDGAARCGGKRRLAATGAAAARRRGGRTVRERRRARERVIAKRKRERRRRXMLYMDSWGRSWPRWPRFRQPTWGGGGGERGGIQNSNPGHLGSAGERXRGLRGAGKAGARAAWPTWRGEGGRXGCEAAAADGGRPEVRDGPDRWAPPVGDPGRERRGRGL

SEQ ID NO: 166278 - protein, 96 aa, Oryza sativa
  Clone ID: PAT_MRT4530_65001C.1.pep
EIYSDFRTQICSCANKCKGEKEKLGEITSLHVQSLLDKCRSRMVPWQGRLMSAAARTCLAKSVLTAQLIYHLTVLKLPDETLESIDKIRRKFLWTG

SEQ ID NO: 166279 - protein, 304 aa, Oryza sativa
  Clone ID: PAT_MRT4530_65002C.1.pep
MPWESRLPAEHMDLPGPRWKKGKDGKDFASLAAANPMSAIVSELKASFISSKPVAILSGPGGSAVLGVGPEQAVILNRAAFGHAIENATAQKHWFQLSPEEVFYLCHALNCIRVDSLDNKQMSEIELWDYFRSGSESFPEMYKAYAHLRLKNWVVRSGLQYGADFVAYRHHPALVHSEFAVVVVPEGAEFGNRCGRLEVWSDLLCALRASGSVAKTLLVLTISSSSKCELSSPDCLEQLVVHERTITRWILQQCREQRCEPSRDEVNREELIIEKESVVFNHWGVILGFTVLSGLLVYRLKFRQ

SEQ ID NO: 166280 - protein, 96 aa, Oryza sativa
  unsure (1)..(96): unsure at all Xaa locations
  Clone ID: PAT_MRT4530_65003C.1.pep
PTHFITLAITPAFTRPKPTGGADSTTIPHPPQNTTLDEQKGTLIRLGIPHFAASAGLLYQAIDAKTSNHWDLIRMDHLEXYPQFAAKTKSYFGTPL

SEQ ID NO: 166281 - protein, 115 aa, Oryza sativa
  unsure (1)..(115): unsure at all Xaa locations
  Clone ID: PAT_MRT4530_65004C.1.pep
RNGSLLEAYCQQVKTCTEIALKCMETDRENRPNIVEIINQINEKEAIIGELPIDHALEKLPSHNNESVTLESKLPSHLNLNETKENHEADHHNSSCSKEKEEDREEDQIIPXGPS

SEQ ID NO: 166282 - protein, 48 aa, Oryza sativa
  Clone ID: PAT_MRT4530_65005C.1.pep
QTEATTLSTQLTLLQRDTSGLTAENRELKLRLQSMEEQAKLRDALNDA

SEQ ID NO: 166283 - protein, 50 aa, Oryza sativa
  Clone ID: PAT_MRT4530_65006C.1.pep
MRARAATIIWVQGDATGVAPVRFGVMPLSLFPIAGAASTRKYPSFDSVFP

SEQ ID NO: 166284 - protein, 92 aa, Oryza sativa
  Clone ID: PAT_MRT4530_65007C.1.pep
RHPDVALARVETEKRNSLIKAWEENEKTEAENKASKKLSAILSWENTKKANIEAQLKKIEVYSCFCYFCFPSERYSFQLAHYLKVTNILSYQ

SEQ ID NO: 166285 - protein, 419 aa, Oryza sativa
  Clone ID: PAT_MRT4530_65008C.1.pep
MGIFCCFQSEDRGGDGDGDGDGAPPSTSSSGCSNSSSSSKKKNLASERSLGGSSRDNNSNLVNLVNEIVAESVTYRHKRVADEILKIGKGKVTARAFTYGELSEATGGFRAESLLGEGGFGPVYRGRLSIKGTVTEAAVKQLDRNGMQGNREFLVEVLMLSLLAEHPNLVTLLGYCTDGDHRILVYEYMARGSLEDHLLDLPPGAAALDWTTRMRIAQGAARGLEHLHDAARPPVIYRDFKASNILLDSSFQARLSDFGLAKVGPVGDKTHVSTRVMGTYGYCAPEYALTGKLTTCSDVYSFGVVFLEIITGRRAIDMARPHDEQNLVQWAAPRFKDKKLFADMADPLLRGAYPTKGLYQALAIAAMCLQEDATMRPAISDVVTALEYLTVAGASSEPAPRPQKLQPPEDDDDDQRPAA

SEQ ID NO: 166286 - protein, 62 aa, Oryza sativa
  Clone ID: PAT_MRT4530_65009C.1.pep
PPPHEHSLCFGTQKNVPNERSITDKIRLVHQPDHWIPLFGPRQKKVFSTGVSTQKGYAPNYF

SEQ ID NO: 166287 - protein, 177 aa, Oryza sativa
  unsure (1)..(177): unsure at all Xaa locations
  Clone ID: PAT_MRT4530_6500C.1.pep
THQAWPRGCGSNDAGSRRERAGGGRQRGQSAHXGRRRAASRCSATTSSARSSSARSSSASLPPPHXCAPRSWAGPSSVQPAMPVSSAASALATTCCPRTSLASSSSSRAXSRRSSSPPPLPPPPPPSPESGLIPPRWRLGLRXWELLDCQDRLLLLRHTRPASTKMVATELASMWLL

SEQ ID NO: 166288 - protein, 41 aa, Oryza sativa
  Clone ID: PAT_MRT4530_65010C.1.pep
DLMSHLMTSPLFFPLKLAYLEQIKLAKHLFSSSVVKGKRRK

SEQ ID NO: 166289 - protein, 73 aa, Oryza sativa
  Clone ID: PAT_MRT4530_65011C.1.pep
FFFFSHQSWVSSLMIKLLSTPCSKQKFLASSSRKVLKPHAFQQINGEGTSRLHVPSILRYLLYYLPLTKMQKS

SEQ ID NO: 166290 - protein, 69 aa, Oryza sativa
  Clone ID: PAT_MRT4530_65012C.1.pep
ATGPKLMNAKEAVDESETSHHALQWALSNLAPAIASPVLKLIEWSVLPLGYDFGCSFGLASTVASSYTH

SEQ ID NO: 166291 - protein, 53 aa, Oryza sativa
  Clone ID: PAT_MRT4530_65013C.1.pep
MPAFRVGAARSRSPRIRESTHTATSTGEFKFERERESRGRGGEGEERIRTKGL

SEQ ID NO: 166292 - protein, 137 aa, Oryza sativa
  Clone ID: PAT_MRT4530_65014C.1.pep
MLGVQQHGRQRHGISKPPPAKKGKAAARKYKPPQCPGAVRVVYIASPMKLTASPEEFRAVVQELTGRHSNIADRHYVDSTIDLPPPPPPPPAYCASYAASATAAAPPVAAVPPPVLTPPLPPQTFQSYDHGGQGHRW

SEQ ID NO: 166293 - protein, 28 aa, Oryza sativa
  Clone ID: PAT_MRT4530_65015C.1.pep
PTAAAWATVRPLPLPCATSRPCHGLPSS

SEQ ID NO: 166294 - protein, 42 aa, Oryza sativa
  Clone ID: PAT_MRT4530_65016C.1.pep
KKKKKKKKKKKKKKKLKKNKKIKKKKKKKKKKKKKKKRGGPF

SEQ ID NO: 166295 - protein, 59 aa, Oryza sativa
  unsure (1)..(59): unsure at all Xaa locations
  Clone ID: PAT_MRT4530_65017C.1.pep
IFVFKFSKHFGGGKSAVFGIXCXNLPQANKYQPKHRLLRNGLATKVEQSLKHMKDRKIK

SEQ ID NO: 166296 - protein, 36 aa, Oryza sativa
  Clone ID: PAT_MRT4530_65018C.1.pep
ILNNIYLLHEMGKLHVFVTHLKSLPSWFKPLNLNLI

SEQ ID NO: 166297 - protein, 123 aa, Oryza sativa
  Clone ID: PAT_MRT4530_65019C.1.pep
MATHRGDGARRGDQRPREVAADSGGAPAATAAPGGEARLRLPALALLGLRRQGAAAAGRGSAAGGQERRWRPRAVLQRGTAGDGGARRRGTTAIGGAVVATRHGDGTGMTRGGVDATGDGTAR

SEQ ID NO: 166298 - protein, 40 aa, Oryza sativa
  unsure (1)..(40): unsure at all Xaa locations
  Clone ID: PAT_MRT4530_6501C.1.pep
LPNLKSFNKAXGQGLRLNQGWAPIPKAYWPLEFWANFWSG

SEQ ID NO: 166299 - protein, 38 aa, Oryza sativa
  Clone ID: PAT_MRT4530_65020C.1.pep
VGCTGAGKCNVGCTLLAAASCLAASVYLPLKMDHWHYP

SEQ ID NO: 166300 - protein, 234 aa, Oryza sativa
  Clone ID: PAT_MRT4530_65021C.1.pep
SPPPPRVLVVVVIFLVVVIIFNDCLPIVARSRPSVLTSHRSRSRVRFGCARSDLSLSCFRSEAVGLVGGGDCWFFEERENHLLNLELSLWMGGSLVDSSAEGVSSSLCLCHSTSEKAGFEHSSCASSGDGNCEAGIDFGQDDLVVNEIGMAIAEVMHVCSDHDDDEGTDSGEDFDENEGLLSLESDSTDDVVDIDNELVISPTFSSCNASESSINKSHSGNSSINGTPPLVSAM

SEQ ID NO: 166301 - protein, 108 aa, Oryza sativa
  Clone ID: PAT_MRT4530_65022C.1.pep
DLKLKPRTYNLMFRFFDDEIYNSFSFESNLKLKPRDPGVTCILRASLLSWVALAKRLKQNEKLANPKRRFYFWALPGFALLLNGPTFFNNIRVRFLPSSILLRRSGPV

SEQ ID NO: 166302 - protein, 55 aa, Oryza sativa
  unsure (1)..(55): unsure at all Xaa locations
  Clone ID: PAT_MRT4530_65024C.1.pep
PTRSVTYTLYEYPSMNLSSPTEADYLVIYSIVXWTLTLMGVVKNVCIALNADDHG

SEQ ID NO: 166303 - protein, 91 aa, Oryza sativa
  Clone ID: PAT_MRT4530_65025C.1.pep
VALALDGSRRRVAPSLGLAAGDGGGLISPDRCLSSHTSPDEPDRRNVSLDRCSPAMDRSIDHKNSRNSQDQRPRRSAIYEDLVPNSARGLV

SEQ ID NO: 166304 - protein, 182 aa, Oryza sativa
  Clone ID: PAT_MRT4530_65026C.1.pep
YFPLPFLVFEGIKFKRRSLGSSNIFLNLRLCFYDILDNISIYMHADLVVYFLSGSSGDSEPMLPKIHGKRSDRPRGRNHTPWAPLQGLLNSVRNIRKYVNDRSVGSKMMKSTERDSMSSSASETAPKLKDNNGEDTKYKLLEIKTEIIERIDPKTRGKRSARHRVKEPALWTSQDELQKFET

SEQ ID NO: 166305 - protein, 72 aa, Oryza sativa
  Clone ID: PAT_MRT4530_65027C.1.pep
TTRREREREREIGGAGGRVGERFRGDFAAMRSAARRGGDFVVPVLICVVFEFVFRRSISFDRNVDQYSEDLS

SEQ ID NO: 166306 - protein, 67 aa, Oryza sativa
  Clone ID: PAT_MRT4530_65028C.1.pep
PHHLDSRSGCRPTTPVCLTLDQGTCTQPSIRFCSRFKPRCCLRILKLNMFAGAYSNLKIVNSMMLIY

SEQ ID NO: 166307 - protein, 49 aa, Oryza sativa
  Clone ID: PAT_MRT4530_65029C.1.pep
MGVFGQQPAVGAPPAQGYPWLDSSPPPVYPGCGYSPTERGYHAQGYPPH

SEQ ID NO: 166308 - protein, 146 aa, Oryza sativa
  Clone ID: PAT_MRT4530_6502C.1.pep
FTRRPPHPIDPSLFITRRPVSPNYRSSEAPPCSRHASPRRPEPEPPLFSKITSSRGLPSASPGIEPPAPVPTAPPPPNRILENPSSFFRSYLTQSIPPDNSSSHHSIHPFSDDAPLPSYQSIPSIQHHHREKNSIKNDLVYLNQKK

SEQ ID NO: 166309 - protein, 198 aa, Oryza sativa
  unsure (1)..(198): unsure at all Xaa locations
  Clone ID: PAT_MRT4530_65030C.1.pep
SPPPRARRRYAPAGDVIPQPNDASAERRRVPVPANLRRRRRAERQRPNNXPTRTASSPTARRRRPPPLRAPPRRRRRRRPCRSTRRSSCRGSTPCTSPSATATRPARAASPTTTSPARTPPSQETTPVPNHPREKKHHPWRRRRARRRAGARCRRRRRRPRRGRRRGRSTRRRQRGPRPPGGSRGGTRRPRAAARGGP

SEQ ID NO: 166310 - protein, 38 aa, Oryza sativa
  Clone ID: PAT_MRT4530_65031C.1.pep
STLVISSQRLINKLINTCTCAQINRVVVVILLKKSLVP

SEQ ID NO: 166311 - protein, 695 aa, Oryza sativa
  Clone ID: PAT_MRT4530_65032C.1.pep
MGLDGLVVVSDPYLQRRFSQADLRALQAQYAALRDAAPSGRLRLRDLPAALSSAGVGAGKGGDAEKENSAPAAAQLTEEEWASVLKAVARADERPHQGVGFELFLRVYAEMQLRLKGAAAGKKAGGGGGGIARSSSSSAAAFLTAATTTLLHTISESEKASYVGHINAYLAEDPFLNTALPIDPATDHLFHLTKDGVLLCKLINLAVPGTIDERAINTKKLLNLWEKNENHTLCLNSAKAIGCTVVNIGTQDLAEGRPHLILGLISQIIKIQLLADVNLKSTPQLVELVEDSKEMEELMSLSPEKILLRWMNFQLKKGGFQRTVTNFSSDIKDSEAYACLLNVLAPECSAKPSPMSVKDLLHRARLVLEHADRMGCKRYLTPKDIVDGLPNLNLAFVAHIFQKRNGLSKQMKQVSFVDGLSDDAQVSREERSFRLWINSLGISTYINNVFEDLRNGWVLLEVIDKIAPGSVNWKMANRPPIKLPFRKVENCNQVLKIGKELKFSLVNIAGNDIVQGNKKLILAFLWQLMRYNILQLLKNLRFHSNGKEITDNDILIWANKKVKDSGKHSRMESFKDRSLSSGIFFLNLLGAVEPRVVNWSLVTKGEKDEEKQMNASYIISVARKLGCSIFLLPEDILEVNQKMMLTLTASIMYWHLKKPTSFSLDTENGSSCETSSISTSDDSASESSFDDSGAR

SEQ ID NO: 166312 - protein, 89 aa, Oryza sativa
  Clone ID: PAT_MRT4530_65033C.1.pep
MRRHGPPRRRARAPAGAHTAIERLLGGALCPPPFTPLPASTFGRRQANLMSCAAPASTPLYMAQGDRGPPAIGLGAPDQGAEPTVVIIV

SEQ ID NO: 166313 - protein, 478 aa, Oryza sativa
  Clone ID: PAT_MRT4530_65034C.1.pep
MVDGVVTLLEARKLVGKVILAGSANLYDGSIHEQSNFAPVDEIGGRTEIWRIEGTISDDFPEGVYIRNGSNPLFGALHKVNSIFGQSEDIWVEGEGMLHALYFTKSREGNTWSVSYNNRYVQSDTFNTERDRQRPCFLSAIKGDPLAIIAASILNMLRFGKVFRNMSNTGVFEHAERVFSVAENDIPYEIDLDNLGTLCSWVVDGQWNMPFTAHPKVAPGSGELVIYGFNIVKPFLTIGVVSEDGKKLERKVDLKLERCTYCHEIGVTKMYNIIMDMPLTVDLTRILRGAPLIDFETESYARIGVMPRHGDADSVIWFDVEPFCTLHLINCFEEDHEVVIRGFRVPGSIITGITLEHTANEEPANQGPSEKSFPRLYEWRLNMKSRAVTVINNKYAGLHHKYAYAQVIDVQGSLEGGCGTVRPKFGGFAKLHLQDNNKAHVIDAQRFENGPIAKITLPQRVPYGFHGTFIPRTTYKKT

SEQ ID NO: 166314 - protein, 344 aa, Oryza sativa
  Clone ID: PAT_MRT4530_65035C.1.pep
MSSAASASAAGGAGEEGAAAAAQPQQEGPVVTCKGVNGLDKVVLREVRGSSAEVYLYGGHVTSWKDEHGEELLFVSNKAIFKPPKAIRGGIPICFPQFSNFGNLDPHGFARNRTWSVENDPPPFPVPTSNKAYVDLILTHTEEDLKIWPHSYEFRLRVALGPGGDLMLTSRIRNTNADGKPFSFTFAYHTYFSISDISEVRVEGLETLDYLDNLQERNRYTEQGDAIVFESELDRIYLGTPSKIAIIDHEKKRTFVVRKGGLPDAVVWNPWDKKAKAMSDFGDDEYKRMVCVEAAAIEKPITLKPGEEWTGKLELSAVPSSYYSGQLDPDRVLQDSSVPEDSIS

SEQ ID NO: 166315 - protein, 119 aa, Oryza sativa
  unsure (1)..(119): unsure at all Xaa locations
  Clone ID: PAT_MRT4530_65036C.1.pep
PQGQPQVQVVTNNEKPVLKGELRGEQLLIVPQHXVVVKKAQREACVCVAFKPNQNCMVSHIVGKSSIFRALQPQFVANAYGISTQEDHRLKHNTGYEFGAFTPIQYKSNQHVYNVRESS

SEQ ID NO: 166316 - protein, 106 aa, Oryza sativa
  unsure (1)..(106): unsure at all Xaa locations
  Clone ID: PAT_MRT4530_65037C.1.pep
MGIGHVVGVLGGALLGHAALATIQYWAVFKIPEEEFSSPPMDVKKPMLLGLALSMWAGFSVPTKFPSGVPPFXEKKIVSLPGNLGFIIFNPPGRGLPLNPNFKLKT

SEQ ID NO: 166317 - protein, 81 aa, Oryza sativa
  Clone ID: PAT_MRT4530_65038C.1.pep
MTFLRRKLRKGVSKDIEQVTVIGITEPLPTTIWEGVTVRCGELESGGGGGGGGGGDRAVVARSVATTLDSRGRTARCATHR

SEQ ID NO: 166318 - protein, 146 aa, Oryza sativa
  unsure (1)..(146): unsure at all Xaa locations
  Clone ID: PAT_MRT4530_65039C.1.pep
SKSLLAIKQGCTPEHTPRIMCQPPXTHATEREAGHRIGYRYARPITTTTERRLXKLRPQEVKIMPSRGSRHRKTPSSSVQKTRQGLHPELFAKRGGVPQQCPLEGXTPKSMIIVGPXLGLSFRSEPLQXPASMVRRPTLNHHPNIG

SEQ ID NO: 166319 - protein, 37 aa, Oryza sativa
  Clone ID: PAT_MRT4530_6503C.1.pep
TGPNPWHLRSSYARALQNTSLKTWGGTPENLKAGAGR

SEQ ID NO: 166320 - protein, 56 aa, Oryza sativa
  Clone ID: PAT_MRT4530_65040C.1.pep
MARQRRKDVNDGQTGLSKTKLATPCPGSNKLGAAWSRCKWPMEVKVEMVSESELEV

SEQ ID NO: 166321 - protein, 142 aa, Oryza sativa
  unsure (1)..(142): unsure at all Xaa locations
  Clone ID: PAT_MRT4530_65041C.1.pep
DKPSFLRALCNKNPPIHXQHKTPRTARTLPIDEANQEQNPTTLITKVAGCWEADVGRGRLGFSFKAGLPIPSKKAKAKSPKVQNQQPTTTAPAAAAAPQLEQEKRKGEAKWKERSWWWIWTGRGESWREWAWSFRTKPTTIX

SEQ ID NO: 166322 - protein, 626 aa, Oryza sativa
  unsure (1)..(626): unsure at all Xaa locations
  Clone ID: PAT_MRT4530_65042C.1.pep
GGAEWRRRRRELREERDGEDGVAAGVRLVHGASHSLSSMAPLIDLEKAAEISAESATSSKTLERRGCVMANLKCTDAQTGLMGKTLLEFQPNKGDVLTPHKXFGTHDVVXLKPNKADAGSAALGQGVVYRLMKDALVQLSKGIQTGPSANLIPVLFGENPPMSSKDVAKFSPFNKNLDESQKDAISKALRSRDVFLLHGPPGTGKTTTIIEIILQEVKRGSKILACAASNIAVDNIVERLSRYRTKLVRLGHPARLLPQVLDSALDAQVLRADNSSLAGDIRKEMKVLNSKLLKAKDKNTKRDIRKELRTLAKEERKRQQLAVADVIKNADVVLSTLTGASSKKLDGITFDLVIIDEAAQALEMACWIALLKGPRCVLAGDHLQLPPTIQSAEAEKKGMGKTLFERLTEAYGDQITSMLTIQYRMHELIMNWSSKELYNNKIKAHSSVADHMLYDIEEVKRSSSTEPTIILIDTTGCDMEEVKDEEESTMNEGEAAVSIAHAKLLVESGVRASDIGIITPYAAQVTCLKMMRNKDTKLKDLEISTVDGFQGREKEAIIISMVRSNSKKEVGFLSDHRRMNVAVTRARRQCCLVCDVETVSNDKFLKRLVEYFEENGEYLSASEYQS

SEQ ID NO: 166323 - protein, 41 aa, Oryza sativa
  Clone ID: PAT_MRT4530_65043C.1.pep
SSPGWRFFFFLFNLDEEVEQVSWLFSLWRVEKDVERIYIKA

SEQ ID NO: 166324 - protein, 306 aa, Oryza sativa
  unsure (1)..(306): unsure at all Xaa locations
  Clone ID: PAT_MRT4530_65044C.1.pep
MRSLACCAVLLLASVLGSTGLNGLLLIKKDGAMSVAWHIWLAIITSIDNWPYNCFGSAPFGPSASPPVAKGAVSPAVPTRPQNAPTPVTPPKEYNAPPPVELTPSGSTHVAPVGSPQGAGNGIPPYPPPQRXLPAIPPSTSGVPREQCKPPVAPPIIAQAPRQQAXLAPSSDHSNGSAPAETPLPQNTNMPAVPKNGSSVSHGRPPSTVDAPXPATSSRYHGGGGAPKKGEHLPFAPSYPPSHAQGPENSRAPRQSGAKRQKHHAPPPMFRGPHISPTMPPIPAQPGPKAPSAHPIWALPPPPPNL

SEQ ID NO: 166325 - protein, 1103 aa, Oryza sativa
  Clone ID: PAT_MRT4530_65045C.1.pep
MPRERTPYRRPRWPRCPLPRRGPRPPPPRRTPPRPPMRSLACCAVLLLASVLGSTGTDLGPSPVVANSPDAQDQTSSPPEPTIALGPVTLPTGCSEFLMWCGIMALKIITSIDNCPYNCFVSAPSAPSASPPVAKGAVSPAVPTRPQNAPTPVTPPKEYNAPPPVELTPPAPTHVAPVAPPQAAVENPAPVLPGTPALLPSVQAPAPSVARNPNLPIVQPPSVNNPPSRPIGSGNGVPPYPPPQRSLPAIPPSTSGVPRESVKPPVAPPIIAQAPRQQALAPSSDHSNGNSVPPANTSPPHKNSHIPRALPPKESSSQTGTAHKPPIRGSAPAETPLPQNTNMPAVPKNGSSVSHDRPPSTVAAPKPATSSRYHGRGGAPKKGEHLPFAPSYPPSHAQGPENSRAPRQSGAKRQKHHAPPPMFRGPHISPTMPPIPPQPGPKAPSAHPIWALPPPPPNLDCNSLACPEPLTDPPAGAPCVCVLPIKVGVRLSVDLYSFFPLVSDFAEEVSSGVNMAQRQVRVMGANVAGDQPDKTVVLVDLVPMQVKFDNATAFLTFENLWSKKISLKPSVFGDYEILYVVYPGLPPSPPSAPESVGDGAFGNNRNARAMKPLGVDVGRPKKRVNGSLIAIAVLSTVIALIICTLAAWLLIIRFRGSDGLAQRFPHSALPKFSRSSGTGQTLLAGRYSSPSGPSGSLGSSIATYAGQAKTFKFAEIEKATNSFDDSTVLGEGGFGCVYQGTLEDGTRVAVKVLKRYDGQGEREFLAEVEMLGRLHHRNLVKLLGICVEENARCLVYELIPNGSVESHLHVRVDLETAPLDWNARMKIALGAARALAYLHEDSSPCVIHRDFKSSNILLEHDFTPKVSDFGLARTARGEGNQHISTRVMGTFGYVAPEYAMTGHLLVKSDVYSYGVVLLELLTGRKPVDMSRPGGQENLVSWARPLLTNVVSLRQAVDPLLGPNVPLDNVAKAAAIASMCVQPEVAHRPSMGEVVQALKLVCSDGDEGLGSGSFSQELAAQAAAIYDVTGMEAERVLLSEMFGSTPVFTPAADSGSFRKQSSSGPLMTGKNRKFWQRLRSLSRGSMSEHGASPDFETRSQCSNR

SEQ ID NO: 166326 - protein, 58 aa, Oryza sativa
  Clone ID: PAT_MRT4530_65046C.1.pep
MGHPKTINKTPNTIPIMIKRRDDRYVVKQYSHSGSERAVDVSSSKTVDGLVGLLESKK

SEQ ID NO: 166327 - protein, 150 aa, Oryza sativa
  unsure (1)..(150): unsure at all Xaa locations
  Clone ID: PAT_MRT4530_65047C.1.pep
PRVFFFFFCLTNFVFCTSLIHQARMSELLISIVNPSTXDIHASSIGRWISVCGCTAWATAAVDVAVVHDLAAGAGAETQVDTPRRAPLRRQLAAAGPEAPGIQNTFRLHLAGAGAAAIGCLRSRGEEIIMHQQRRGDDGDDEEESHIRAS

SEQ ID NO: 166328 - protein, 64 aa, Oryza sativa
  Clone ID: PAT_MRT4530_65048C.1.pep
RVSACLQCNVSTSVYQCLLNKIIFLRSHHEQSVAMFSVGHRLFCALDGIAVRTPLSTLRHTLSR

SEQ ID NO: 166329 - protein, 409 aa, Oryza sativa
  Clone ID: PAT_MRT4530_65049C.1.pep
MRRERGLAEELLDDAFTASTDIDPNTCEVVPTSTSERPCVVQQATYWYARMQAEEDAPKPEEDAGREYACYLPVLRIIQEYCTNTTNTSLQVSAVSVTRGHGLVQVFKGVNATLYWTITAPFPAVRNKNRVLQSGAFITGISTVCSSTCHGTLQMSLQSVCCRRCNGLHIPVMQKQDGQFHALLFVPASTRSAVAHSYTVTYILLQQVVKHSRSISLSKWTVAANDSQVGVSNTLKMVRYQQLQRAKAKRDPEIACRRGGRGPRPNACREQLQLAISMDPPVDCPVSIRHKSMPKVQTKIPNLGSLRSDDGRRFSVRFKQGLRIPDGGERLLLQINMEKNKGEKNKKNVGKERVPPWFTLQPRHERDHTDRSFRVLATRKRNEQQQQEKAQDMGFGKTMAKFEKKNSER

SEQ ID NO: 166330 - protein, 224 aa, Oryza sativa
  Clone ID: PAT_MRT4530_6504C.1.pep
MANLEEHSMLLVAIYNRFVELYLTCGDIASTRALLNTFPTKRHVVSCIAIVTGHARPEFLDEAILMFFGRSGHCFLHDHGDGNARQFMDEHMLLFFTTVDDRRRATSLAIGSYPLLHAPLANNVYRNRLRPNRCCAEGRFAAIGEREEEIGDGAMMNWRGGIGSGRGGERRRFQAWMSSLAHGVAFGRDCPCARCQFRSQSRVRRSNCIASFPVWWLQYSVQMC

SEQ ID NO: 166331 - protein, 221 aa, Oryza sativa
  Clone ID: PAT_MRT4530_65050C.1.pep
KRKPNIPAYVSPQVPDIKTSTERKTNPFDPLQITESRQFTYEELKKFTNNFQQFIGRGGFGNVYYGCLENKTEVAVKMLSEFSENGLDQFLAEVQSLTKVHHKNLVSLVGYCWEKDHLALAYEYMARGNLCDHLRGKFGVGDTFNWVTRVRVVLDAAQGLEYLHKGCNLPIIHGDVKTNNVLLGENLKANIADFGLSKTYISETQTHISTSNAAGTMGYIE

SEQ ID NO: 166332 - protein, 142 aa, Oryza sativa
  Clone ID: PAT_MRT4530_65051C.1.pep
MTESLYALRREIQIGPKIWSIRHPRIASEEPLGVSCSFPIPQPNRTRARGEERQINRAYLPTARRGSTKAASAAGPGRIGGFAAAPPGYGGDEGGEEEEEEKPVNDGESRGLGWASMFMGRILSRGINWAEFCCGLNSSTDI

SEQ ID NO: 166333 - protein, 401 aa, Oryza sativa
  Clone ID: PAT_MRT4530_65052C.1.pep
MPPPPPPPLSAAGAGGGGGRRRWQKRLSPTLARDRCYTRAFRSAGLRPTAVPLPDGAVVHLWLPPAAPPAAALQPVLLLHGFGARATWQWAPFLRPLIAAGLAPFVPDLVFFGGSASPAADRSPAYQAACVAAAMAAVLPGAPQAQAQRYAVVGVSYGGFVAYHLAHAFPAAVERLVLVAAGVCLEEADLAAGLFAVEDIAEAASLLLPQRPEDLRRLVGLTFCRPPRFMPSCFIRDYIRVMCTENVKEKTELLHALINGKKLSDLPKINQQTLIIWGEQDRVFPLELGLRLKRHLGDTSELVIVKNAGHAINREKPAELCRLIKNCIADPSVKYRDGHKGSWKSAIKRFAGSSLRKTSCIWMILLISIHSYALFTTPFVSQLSTLLWRKCSALTGRLLDL

SEQ ID NO: 166334 - protein, 111 aa, Oryza sativa
  Clone ID: PAT_MRT4530_65053C.1.pep
VDNIAFNLLQKNIVMIRYMPNRTVVPCPISGRLAPEDILLKKRSQTSLLCLFLSSSFCDQLSAYILNPDPFESTRYTAYACVACPTLRSNNHIFLRKLCMPDSSRTIIRAV

SEQ ID NO: 166335 - protein, 89 aa, Oryza sativa
  Clone ID: PAT_MRT4530_65054C.1.pep
MRLGRLRSRTAPVEIKPTVHHDSTSPSLPEPGAHAHLGPTCQGDGGGQRLVIRSTAMVLLLGAAEGGAEPSLGLTAPTQAGVGPIQAAK

SEQ ID NO: 166336 - protein, 164 aa, Oryza sativa
  Clone ID: PAT_MRT4530_65055C.1.pep
PWRRAPAYALAQKAAATAASVVLRLMFGGRHAPVPATLPGGAHAQSLVIEFVITFYLMFVIMAVATDDQAVGHMAGVAVGGTIMLNVLFAGPVSGASMNPARSIGPALVGSKYTALWVYILGPFAGAAAGAWAYSLIRLTGECRFEVLGMRKKASSMHRLNSSN

SEQ ID NO: 166337 - protein, 74 aa, Oryza sativa
  Clone ID: PAT_MRT4530_65056C.1.pep
KRTHLILYILIYNRPKNVSSKGANQLQQQANIYKWPLSLDQKSLAVLSYLNNGISSTNLPGSLLLGCWELPYPR

SEQ ID NO: 166338 - protein, 188 aa, Oryza sativa
  Clone ID: PAT_MRT4530_65057C.1.pep
MVYAVGHVSGAHLNPAVTLGFAVAGRFPWRRAPAYALAQTAAATAASVVLRLMFGGRHAPVPATLPGGAHAQSLVIEFVITFYLMFVIMAVATDDQAVGHMAGVAVGGTIMLNVLFAGYGLAPSHTHTHTHTPANDVVTLTLGVYLTWMTWARRPVSGASMNPARSIGPALVGSKYTALWVYILGPFA

SEQ ID NO: 166339 - protein, 93 aa, Oryza sativa
  unsure (1)..(93): unsure at all Xaa locations
  Clone ID: PAT_MRT4530_65058C.1.pep
IGWNLFPAGELPVXXLPARVQXXVLHLXLXCLSLNLISDSLXARXRCYHGXYEAAAKKTTLLAIDDQSDNHXKCICFFSXILXXVHXHAXFSL

SEQ ID NO: 166340 - protein, 65 aa, Oryza sativa
  Clone ID: PAT_MRT4530_65059C.1.pep
MSQVIAKPRDRVRVLHTRVRGWCSVSPSSPHTHLISRTTPRDSDHTTGPACGHHGTTRQISSGKR

SEQ ID NO: 166341 - protein, 158 aa, Oryza sativa
  Clone ID: PAT_MRT4530_6505C.1.pep
RRRNHPPLHPPPARRRRGRWAAATSSIPRSPPLAPSSSAYAAYLDDRLEIRLLLPPPRSTLAPRRAVPRHRQPLPHPRHRGDAAHRQPRQRRRGLSGTGAPRRWRWSRRAAGPPYAPPSPSPMLPPSPPPAVAPPLLPRPAGLLPTRRPPLPPKMENL

SEQ ID NO: 166342 - protein, 150 aa, Oryza sativa
  Clone ID: PAT_MRT4530_65060C.1.pep
VRFRSLALDPSLSRAQPCPEPRAAAAAPSPSPSRRAVACRRADVAIAACCRRHRCRAALAGLAPRVARRPVAPRRAPCCAASRPEPPARPIAARPSSRPVAATAVGKPPPPSLARSPSPPQVRYDGTAVEVGPRTVPYIGVAIGRTAMSV

SEQ ID NO: 166343 - protein, 250 aa, Oryza sativa
  Clone ID: PAT_MRT4530_65061C.1.pep
MEDVTALQILNLKENKLIGTLPDNIKEGCALEAIDISGNLFEGKIPRSLIACRNLEILDIGGNHFSDSFPCWMSQLPKLQVLVLKSNKFTGQLMDPSYMVGGNTCEFTELRIADMASNDFNGTLPEAWFKMLKSMMTRSDNETLVMENQYYHGQTYQFTATVTYKGNYMTISKILRTLVLIDFSNNAFHGAIPETIGELILLHGLNMSHNALTGSIPTQFGRLNQLESLDLSSNEFSGEIPEEFVWTTVI

SEQ ID NO: 166344 - protein, 262 aa, Oryza sativa
  Clone ID: PAT_MRT4530_65062C.1.pep
MARSSCPSLAVETPSDTGNTTDDFASSTSPPSTPPSSMRTTRITMMPMTRSSPSLLPHRRPTPRTSRPMHSHDPSLPRARPCPEPRAAPTAPSPSPSRRAVACRRADVAIAACRRRHRCRAALAGLAPRAASRPVAPRCAPCRAASRPEPPARPIAARQSSHPVAVTPRYRRIAARRVPPRAARRHCRRRRRRLVAARPIAASRPAPPSPAASSPWSRRAVRRRLAPPSPSRRSRAATPPPSCHHVVRCAPSSRRRRRHRRR

SEQ ID NO: 166345 - protein, 96 aa, Oryza sativa
  Clone ID: PAT_MRT4530_65063C.1.pep
MERIDCLAKYIAATLKAIRNGANVKGYSVWSFMDLYELFGGYNTWHYGLIAVDFSSAERRRQPRRSASWYSDFLKNNAVIRVEDGSSVSAAAHAQL

SEQ ID NO: 166346 - protein, 205 aa, Oryza sativa
  unsure (1)..(205): unsure at all Xaa locations
  Clone ID: PAT_MRT4530_65064C.1.pep
FRSPALDPSLPRARPCPEPRAAAAAPSPSPSHRAIACRHADAAIAACRRHHRCRAALAGLAPRAARRPVAPRRAPCRAASRPEPPARPIAARPSSRPVAVAPRYRRVTARRVPPRAARHRCRRRRRRPVAARPIAASRPAPPLSCRRAATFEAAAPSPRSRRVVRRRLAPPSPSGRSRAAALPPSCRRAVRRAPSXHRRRRHRRW

SEQ ID NO: 166347 - protein, 46 aa, Oryza sativa
  Clone ID: PAT_MRT4530_65065C.1.pep
PKGKGPMGKIVGGDLKRAHGMIHHAGKGDSLGVHIKRKKKVHLFFF

SEQ ID NO: 166348 - protein, 250 aa, Oryza sativa
  Clone ID: PAT_MRT4530_65066C.1.pep
MVKDIEVEVVTITTDDWRGWGIDMIGQINPPSSKGHKFILVATDYFTKWVEAVPLKKANGQAEASNKSLIKFIKRKISDFPRQWHMKLAEALWSYWMACHESIQVPPYRHEAVLPWESVIGWRRIDLQDELTADDYYNLMVDEVEDLVQSRLRALEKMTRDKERIACHYNKNFVPKSFSEGELVWKLILLIGTRDNKFGKWSPNWEGPFRIYKPVSKGAYMLQGLDGEVFGRALNGKYLKKYYPSVWINS

SEQ ID NO: 166349 - protein, 59 aa, Oryza sativa
  Clone ID: PAT_MRT4530_65067C.1.pep
MAITFSRFDNAAAAGGMRHDLTQTVALPCAWPSTTIEAYKKTPNVELQDQVSGVNMLLG

SEQ ID NO: 166350 - protein, 97 aa, Oryza sativa
  unsure (1)..(97): unsure at all Xaa locations
  Clone ID: PAT_MRT4530_65068C.1.pep
FFFFFFFFFFLKKLKTFTXHAFSXGKNIHXFDPWRSRKAGRKKSRKQKSQAKPKKMDMEMDVASGVXAPEGDEHERPQXLLLPFXPPPPXILLLLRR

SEQ ID NO: 166351 - protein, 214 aa, Oryza sativa
  Clone ID: PAT_MRT4530_65069C.1.pep
MAGAAKASWMVAMSVGAVEALKDQGGLCRWNYALRSIHKAAKANAAGVSQGKKLPASAAAVAERRRAEKAEEGLRTVISLKVLLKQLKVIRHAWILEESDVQSGTIAQDRRLLLVLPANAGSREHWRVQKVRSCISLIYGATFSCRLCQLSRASEYSLASHNTGDPLTCSYLVPSYGTAFGIKGCDRYCLLLQQLWLQELKMAAAAAAEKQPQP

SEQ ID NO: 166352 - protein, 169 aa, Oryza sativa
  unsure (1)..(169): unsure at all Xaa locations
  Clone ID: PAT_MRT4530_6506C.1.pep
SPRPTRTAPQNQHRGVGRAAAGSCRACRQEGRRRVDALTGRIAQESLRGERRRLSSPTPSGWGSSPPPPRRASSPVARPSSGPATSRRSSPPRSXVDGTPPPRSPRCPPAPPPPRSLRAPSSSSSSPPPTSTSTSSAGRTTPSLRPPSARHAREEERVTIATGSARIAH

SEQ ID NO: 166353 - protein, 193 aa, Oryza sativa
  Clone ID: PAT_MRT4530_65070C.1.pep
TRPLFVFANDRSVVFDHRTGKVVRELPKLAGGGRNHPASAMSAMLPLDLRNLTRGADPEPEVIVCGGALKTAFRLGENNTYQPTLRDCARINLGKIDAVWAVEAMPVGRVMGDLLVLPTGDLLMLNGAAKGSSGWGFARQPILSPILYSPRHPEGSRLRPLAASTVARMYHSTSAVLPDAPGLDSGRDTNGGG

SEQ ID NO: 166354 - protein, 206 aa, Oryza sativa
  unsure (1)..(206): unsure at all Xaa locations
  Clone ID: PAT_MRT4530_65071C.1.pep
SLLPSPFSLFFGSSLSLLALLPFPLSPSRAEDGAGGRRSKRAPAAAAGVVGADPDRSAAGPSEGEQSGGALEDAIDAADDEDALRARRDGIAERLSESLAALEAREAAVPARLAEAEAALSVAVAEAESAEPPPTDVRGALRWMCGRRXMDAPALWGFIAARRPELVAVRKEVGPAVAAEDGVGEDQFWVPSPRRRWRGWWWRRSW

SEQ ID NO: 166355 - protein, 618 aa, Oryza sativa
  Clone ID: PAT_MRT4530_65072C.1.pep
MSEEESNDDAGEQMPQQGGIKTMPFILANDFCDRFATIGFNANLITYLTAEMHLPLVEASNTLTNFHGASNLTPIVGGLIADSFAGRFWTIAAGSVAYQLGMVGLTVSALVPSLRPPPCRGEAVAVAGEACQRATPWQLLVLYLSLLCTSVGTGGTRPCVMAFGADQFELGKPPRRRPGEAGAPRWSFFNLYFFGVELAKLVAVTAVVYIQENVGWGWGLGVPTIAMLAAVTAFVAGYPLYVKMAPGGSPLTRLAQVAVAAFRKRNVAVPDDPGLLHDDKELDAGVSTTGRLLHTNQLTFFDRAAVVTDGDMEGGGGARPWRLSTVHRVEELKSIIRMLPIWAAGILLVTSASHNHSFAIQQARTMDRRVTASLEIPPASMLIFSNVAMLATLALYDRALVPRLRRLTGHPAGITHLQRTGVGLAISAVSNAVAAAVEGRRRRAAASHGLLDEPGATVPMSVLWMAPQYAIHGAADAFMDVGRMEFLYDQAPEGMRSTAAALYWLTMSAGSYMSTLLVTAVHERTRGEGEWLQDNLNRGRLDRYYWLVVTLQVINVVYFVICAKLYTYKKLETVDGVSTGERNDIVDDQENAGERDEKGSDVKDVELQPLLLSDVTLP

SEQ ID NO: 166356 - protein, 109 aa, Oryza sativa
  unsure (1)..(109): unsure at all Xaa locations
  Clone ID: PAT_MRT4530_65073C.1.pep
DEGSVSFVSDCSTPGEDTMHADRCCCERIHAGAHQGLSAARPGNLGEFVTDTLDKSKVTXVTSDGAFSQRYLRYLTKRYLRRXQCGYWLRACVANKDRSVYELRCFYFA

SEQ ID NO: 166357 - protein, 189 aa, Oryza sativa
  unsure (1)..(189): unsure at all Xaa locations
  Clone ID: PAT_MRT4530_65074C.1.pep
MSEDGTGGRRSKRAPAAAAGVVGADPNRSAAGPSEGEQSGGALEDAIDAADHPDALRARRDATYTALSPPDAVLRLLASLPCEDLAARSTSLDDDLAAVDASTSESLAALEAREAAVPTRLAEAEAALSVAVAEAESAEPPPTDVRGALRWMCGRRXMDAPALWGFIAARRPELVAVRKEVGPAVAAED

SEQ ID NO: 166358 - protein, 158 aa, Oryza sativa
  Clone ID: PAT_MRT4530_65075C.1.pep
MAATAAAARRRRVRGSRRRRPLGVDLAKAAAGRRARSSSAFLAAAQERAAGSMAPPRLAVGRSRGGGARHRPGQGGGREEGMLVLGVLGGGLETPGIEGARGHHCHAHAGSVLWQSKDCGYPRPSTSSRQKYDLVMSLLESMPTNDNWGKKPQRRLGH

SEQ ID NO: 166359 - protein, 391 aa, Oryza sativa
  Clone ID: PAT_MRT4530_65076C.1.pep
MPLSLSSNTRNNGTWLSATYISQTGQKIKEIMAGPKHGCDAKKLNEMLREERGQLRERHQTRVVPRRRREGPASVQGQVKVKGWEIVIRGEITSDDMAAAMGLVVGSPFCALAAKREKLLQQDVHEDESRLNYENSVRRGNAIVIVLHKEHGYAPHINVQSLQLSPSVRTEGPITICAFCPQPREWKEIILRRGKGTGDIAEQVGGSKRVIYEDRIQTALESEKDQSPHQAVVKSEKDQSQAAMKSEKADTEKLIQFMEANYEKYVANVDSFEDFYHAIVELIEKFCEERGQVQYKIPSKKALKEAYEKHHTEQGQLKREEFIKIGKEVIRRDSFTLGKATMDFIMYLFGAPLCALAAKRILPGLRWISDDVAIPLATSASVAYLIRTKQL

SEQ ID NO: 166360 - protein, 77 aa, Oryza sativa
  Clone ID: PAT_MRT4530_65077C.1.pep
LQRETAGAPRGKLHEVVLEEEEASSTASVESRFVQPTKLGPSLGVLAASSGFFIGAGGADTNNGENRSSSSSQQILH

SEQ ID NO: 166361 - protein, 874 aa, Oryza sativa
  Clone ID: PAT_MRT4530_65078C.1.pep
MEKQNLDFGKILGDIHESLVALNNKQTETQAIVNKLDAGFGGWKPQVESAIQELREEVGDLRQQLDLVGKTKQASPTTSSPRVPLTDEERKAPLLPTPPLAAHPTAAEGDGKWTSGHGIPQNFRRRASGVVTTLIPTPGKGTFETHAVPMNSLENFEFEGGDLSSESYGRQYNHRVPKLDFPKFDGTDPQDWRMRCEHYFDVNNTYPGLWVRIATIYFSGRAASWLRSSRAHVRFSIWEDFCSAVSAKFDRDQHELLIRQMDSIRLVVVNMKYLTHRFIEGLCREIRNAVILQRPRDLESALAVASLQEEVLEVSTTSGSKEFKRSDSGASARTNLAFKGAMPLPLPPGRTLSTLGKDLRTDNKKGPEVVRSSGGIDKVSSLKAQRRAQGLCYICTEKWSPTHKCASSVQLHAVQEIFSLLMNEDSDSLEHSVAVEETLDQSLMAISLQAIQGSEHSGSMRMLGYVQGFEVLILVDSGSSASFISSKVAVSLQGMVPIKKLVQVKVANVTVLPCSAEILNCQLYLWNSDTEQAFQTLKHALVTAPVLAMPNFDETFVVETDASDKGIGAVLIQKGHPIAFLSRALGPRHQGLSTYDKESLAIMLAVEHWRPYLQHAEFLIRTDHRSLSFLDDQRLTTPWQHKALTKLLGLRYKIIYKKGCDNGVADALSRHPLPDSLELSALSVVIPDWIQEVVAGYASDPDACSKVQTLCISVGAVPNFTLKDGVLYFKDRMWIGHNKAVQQKIIANLHTAAIGGHSGINVTYQQIKQLFAWPQLRATVTEFVSACSVCQQAKSEHVKYPGLLQTLPVPEHSWQMVSLDFIEGLPRSASFNCILVVVDKFSKYAHFAPTIFPCGLTYGPHGNKMERRPEKSIL

SEQ ID NO: 166362 - protein, 66 aa, Oryza sativa
  Clone ID: PAT_MRT4530_65079C.1.pep
LTHKTEMRVENLCNCLHQKGKKTGTSQKGVLLFMVKRQLNYDPFCITGREIKNTAVSAFLRSEQTL

SEQ ID NO: 166363 - protein, 120 aa, Oryza sativa
  Clone ID: PAT_MRT4530_6507C.1.pep
MNSVTIIYQKYFCAIAWLGLPVPCDETDRKLFNVATEITIGNGALRLSSGALTGTSGSQTCNHSSSQLRSTFENLSTFGQPSAQNMPKKALKSIIILVAWELWKERNSRIFRNLANTPAS

SEQ ID NO: 166364 - protein, 113 aa, Oryza sativa
  Clone ID: PAT_MRT4530_65080C.1.pep
MWVVEAVEMDAERGGGGGEGTRGAGVAEAGREEGGEAAVRGSIEDAELDLDLHHGATASTPVGTLNTLLAVELLKRMDRRARACPQTVAPTIYTYSILVDCLPSRRAYPHPPT

SEQ ID NO: 166365 - protein, 282 aa, Oryza sativa
  Clone ID: PAT_MRT4530_65081C.1.pep
MGFGGGVVQILKVDGIAGWLIGAGPAPSFSRSLTCALLCFASGASQSHSSRGKPTCVKCQLDRDEVLEHAVKWRARKIQKTSFRGSFGTRDLVRAIWIQITSEPLSLKDLGLPPKSPHLSSSAHRSVVVPPPPPPQTEGLNSPHLGTAGVAAMLGPSQCETTAARDKLASHQLGEREAPSLPTHARPLKRWRAGERPPWPAEEGDGDVVAAVIGTPPTLSPHQQQVDPYRAAPWLSIQLHVRERDEEPADGESRSGVASKRKVQSCDVKTLEHRKQPVSPFL

SEQ ID NO: 166366 - protein, 202 aa, Oryza sativa
  Clone ID: PAT_MRT4530_65082C.1.pep
MASSSRGGGGGGGGVGPDGGVGDGPTTLDELYKINVVPAELHFKFRKELQGLRVGLNFEFYNLEVNDFEAKVVLKPLDYERKWKFHYKPISGDIQLLSKKIPVTKFLNLQVGIGHNFHLNATGWKWKLSTCLGGDGVSQIRNKSTLSMFPGFDLRVGWRAEYVLPEIHGAVGTGEPAFSMNYGRLQASIDRVEAIVTQSDRY

SEQ ID NO: 166367 - protein, 156 aa, Oryza sativa
  Clone ID: PAT_MRT4530_65083C.1.pep
ARGENIWLDGSLLPVNIAEFLEKLPRCSSSPLNILSLSGNNMTGTLPKSIWQFNNLDTLDLSNNNISGAIAPGVQNLTRLVSLILSSNKLTGQIPKLPKSLQVLDISMNFLSGNLPSKFGAPRLTELILSNNRITGHVSGSICKLQDMYMLDLSNN

SEQ ID NO: 166368 - protein, 214 aa, Oryza sativa
  Clone ID: PAT_MRT4530_65084C.1.pep
MSFPLPCRLSLLFLIAPRCRLTAVAAAIGRRLGSAWKGRAGGEENDGASERGGQWAERTDGGWRPWWGGGGGERGEVDSDGRQEEGKCAGDRAEEIRGRSIVKDDNDKDIGGLEGHVSGEDGRHRGQPLTCGTGVVVIVLCSLTPRLCRGRRLLEMRVELSLAPRLLRPPPLRRPASATARPTPRLLWPGERGIIFVVGREEVEERSARVYRGA

SEQ ID NO: 166369 - protein, 71 aa, Oryza sativa
  Clone ID: PAT_MRT4530_65085C.1.pep
MAKIEGAEASNPDHKKSRAAMLFNNSGEIQTPRKEEEEVEDAEEEEERSGQTFFSNSDDLLFFSDTGDTLG

SEQ ID NO: 166370 - protein, 80 aa, Oryza sativa
  unsure (1)..(80): unsure at all Xaa locations
  Clone ID: PAT_MRT4530_65086C.1.pep
TNHIKNKLKRTKYVACRIFQSSTKKLLSSKTQSCKRNLEVLVSPNPALPGRIGCNIFCRXYLPDSESRNRNGGEGWGGGG

SEQ ID NO: 166371 - protein, 55 aa, Oryza sativa
  Clone ID: PAT_MRT4530_65087C.1.pep
MEMELQGVEHVVGLTVASSTEGDDSGSHGRGPKRTRHKWCRQGFCGVDLRRMPAV

SEQ ID NO: 166372 - protein, 57 aa, Oryza sativa
  unsure (1)..(57): unsure at all Xaa locations
  Clone ID: PAT_MRT4530_65088C.1.pep
CXRAFETSLKFKTKKLDDDQEIKDTWSPGWPVALLSQVNVQFVGRALICWSFHVHEC

SEQ ID NO: 166373 - protein, 331 aa, Oryza sativa
  unsure (1)..(331): unsure at all Xaa locations
  Clone ID: PAT_MRT4530_65089C.1.pep
APAGAVTVGAAEXGPDGGVVTTDEALRVVQAADLAGVTHVVVVYDLGAGDPSGESTYNVLDGFTSFFSNLFSRVQSLPLNEFLAKVVETDVRYTLIKTSLTDDYSPESTYGLVLAKEGASSTTSSTETGKVSKLQIAGLVADVFSNVAVAENKVVQVSTSSSVTSKTIEEAFSAIPEDSRRKEYQDAVAKAQAEEETRASQRTRQAEEDTTTVKAGGKKTPSDEAAASEAQASLENLLSRAKGFGTDFSWEKLSTQLAGVATQDSDEVEPKAQIATVRGQAKAKKLAPQRAVVKPAAQKTRPTPKQPESKPDVRPVFGGLFKQETIFVDED

SEQ ID NO: 166374 - protein, 219 aa, Oryza sativa
  Clone ID: PAT_MRT4530_6508C.1.pep
WRRRRRQRRRLRKKARRATAMAARSRPRRRTRRAPRARTKARTAKATSRRRRRRASRNAASARPGRKPPHAPTRLAAPVGRRRRPRTRSQPRTATTSTATNPNRRRWRWSTSTTTTTAGRSRPWWCRFTSRTTPRTRRRTMPEDTTRSRRRCRRCSVTLLSSGRSRHASTRTTSTRTTPSAATSCETAKHAKLLLAPAMYNRSITKKSATTIRLKKKKK

SEQ ID NO: 166375 - protein, 120 aa, Oryza sativa
  Clone ID: PAT_MRT4530_65090C.1.pep
MASGRCGCQDPDIGVLPMPSDVRRQVRTPARASERAEHSGMEGSDGGVLTGDVPFPLICGGSGVGAGLVRRWDNEGRRLDGHGDWRHPQRAVPIESTRSSRQRATDGGWTEASDASCPRS

SEQ ID NO: 166376 - protein, 247 aa, Oryza sativa
  Clone ID: PAT_MRT4530_65091C.1.pep
MLPTTASKGRGAARSAPPLFGPYLRRIVKWQQMDIEYTFWQMVHLCTSPKVVYQHTKYHKQTKNQWARDDPAFVVILILFLVFATSAYCAAYGESPSHAALTITSVVLVHFLFAGIVLATLCWFLTNSYLREEPNSHVVEQRVEWLYAFDVHCNSFFPAFVILYVLQYFLSPLLVAHGFFPALLSNLLFVVAISYYHYLNFLGYDVLPFLDRTTFFLYPIGLVIILSPLMILIGFNPTRYFLSLYFR

SEQ ID NO: 166377 - protein, 238 aa, Oryza sativa
  unsure (1)..(238): unsure at all Xaa locations
  Clone ID: PAT_MRT4530_65092C.1.pep
MASRREGPLMRGGAGGGAGQPLSRGSRIAAAVAVGVALGCVCAFLYPDGLLSRSSDAALHWPRQADSVACETSEGVTSLKSHVVLLERKNAEFRKQINELTMKLQLAGQGKDEVLYKAGPFGTVKAIRKNPTVIPDESINPRLAKILQQVAIKKELIVALANSNVREMLEMWFTNIKRVGISNYLIVALDDSTETFCKSKGVPFYRRGSXRRVXHIGKVGGNHAVSGLKFRILRGFLQ

SEQ ID NO: 166378 - protein, 123 aa, Oryza sativa
  Clone ID: PAT_MRT4530_65093C.1.pep
GTETRKTKRKRQERAGPHAEDEAQKESTRNQRRRDAAQTHRQSGKRPDTGPDSDEKRSLQGASSRREGRRRRGKGRKGEGRRRKRGGEEEGRKRGSREREEQRREEKRQTRASGITSKLSTHL

SEQ ID NO: 166379 - protein, 458 aa, Oryza sativa
  Clone ID: PAT_MRT4530_65094C.1.pep
MASRREGPLMRGGAGGGAGQPLSRGSRIAAAVAVGVALGCVCAFLYPDGLLSRSSDAALHWPRQYFKWLSSIANRCDSQGTSNEPLSRNWAEREDTADSVACETSEGVTSLKSHVVLLERKNAEFRKQINELTMKLQLAGQGKDEVLYKAGPFGTVKAIRKNPTVIPDESINPRLAKILQQVAIKKELIVALANSNVREMLEMWFTNIKRVGISNYLIVALDDSTETFCKSKGVPFYRRDPDEGVDNIGKVGGNHAVSGLKFRILREFLQLGYSVLLSDIDIIFFQNPFDHLYRDADVESMSDGHDNRTAYGFNDVFDEPLMGWARYAHTMRIWVYNSGFFFIRPTIPSIELLDRVAGRLSREPKSWDQAVFNEELFFPSHPGYEGLHISKRTMDIYQFMNSKVLFKTVRKDANLRKLKPVIVHLNYHPDKSERMKAVIEFYVNGKQNALEHFPDGSE

SEQ ID NO: 166380 - protein, 276 aa, Oryza sativa
  unsure (1)..(276): unsure at all Xaa locations
  Clone ID: PAT_MRT4530_65095C.1.pep
WRPRRRRRRICTVRRPTATTTTTTSASPSSSPTPGSSPGAASCATSSAASRATRTSTAPPSSPSHGSRSPWTGTTSSPSRSGSCRGCCFRRRWRSTRPPAPSSASPTGASTTSPSPTPAARAASGAPADGSXCSGRAPRESSAPRPPQLYMSSTRCFRTSSSASPTSSPSSRSMPPRTWRSTSCGCHYRRRRASVPASPWLRGCSACTSPTRRTTPTSPWSRSRAAPPAPTTTTASRSASTSAAAASPSRAPGTRRGRASRWAGSTWSRQSTTASS

SEQ ID NO: 166381 - protein, 404 aa, Oryza sativa
  Clone ID: PAT_MRT4530_65096C.1.pep
MTVTFDGSLGLPSLVRHLAVARHRELQPVTGDGPSPVTDMTSGPSLILSLHPSKSLFSSSHRPPASFAHLQRSPPPSPSAPWSPPPSLRHPVIGSFAYRLRVAASFAHHPRSPPPSRLHHARSRSYRAKDEDNAGARTIGQWGTTRLPNAIDKPLRPSSLISGRRRASTSPSLPLTVPATMNSGAPDPDTLNSQVADPTIPSLGAPDPAVLASAIPDPFVSQLAGEYGCKNDTLIVYYEKCHELMKEFRLVTLKHVSREQNVEANDLAQGASGYKPMIKDVKVEIAAMTADDWRMACHGSIQVPPYKLVYGHEAVLPWEVRIGSRRTEFQNDLTVDEYYNLMADEREDLVQSRLRALAKVTKDKERVARHYNKKVRGIAFFKLHQELNLASFKLINIGFDRTFR

SEQ ID NO: 166382 - protein, 1614 aa, Oryza sativa
  Clone ID: PAT_MRT4530_65097C.1.pep
MVRRGAGGRRGGIGGGDDARLCMGGAKAADGREFRVGDCALFQAVEVPPFIGLIRWIEKKEEGFPKLRVSWLYRPADIKLNKGTQLCAAPNEIFYSFHQDETSAVSLLHPCKVAFLRKGVELPAGISSFVCRRVYDIDNKCLWWLTDQDYINERQEEVNRLLHRTKLEMHAAVQSGGRSPKRLNGPSSAQQKSGSDGAQNCGLSKGKKRDRGEQGTDPAKRDRERPLKAEDGESGNFKVENLKSEITKITEKGGLPHAEAVEKLVHLMQLDRTERKIDLPGRVILADIIAATESPDCLGRFVQLRGLPVFDDWLQEAHKGKSGEGGSPKETDKPMEEPVLALLRALAKLPINLTALQSCSIGKSVNHLRSHKNPEIQKKAKCLVENWKKRVDAEMKSNDVKPVVSGQAVSWPGKPGFPEISSAGNRRSGSSESSLKSPVSQLSSSKALTSKPVAADAAAKSSPVISGSSKLQHMQPGNAVTNLKEQPSKSTGGTCGSELPAVKEEKSSSSSQSLNNSQSCSSEHAKTIGSSKEDARSSTAASGVAYKTSGSSSRVHRRTNNGLLGSGIQKEAAVARSSSLDHSSVQEKVSQSGTACEKGADIQSDQGNSHRLIVRFPNPGRSPARSASGGSFEDPSFTGSRASSPVADKHEQSDRRVKMKTENSNPHLGNDTNAESWHSNDVKGASVSEEGDKSPRAMLTDDSKTTEGAGRDVPVSRVACSSYANEKGICSSETGLTKLFNPMNALIEIKYSEASHSLQAGDDTAMNLLASVAGEISKSELISSSPSPRNSSANEQGCEGDNIGKLKVECDVSLPQHAGPSNEVEKVISEKSEKSGVGLVGKELHREDVNMLSVNNLLSQGDKGTTSAGSSPLPEIDSKAKTENREVEDTDKCSHPPSRGDDGVKSNAKQPIGFKIDTNSNIKSSTTSEYRSAFTVRGKVEDGCTTSSDVGSTLGDQCKLAVSNRKMLPAEEPLCGGDKQAHGLLKPTDQKHLLGLPDYSEHIDKSGDSTANKLKLKPSFSSSTVEVNKADGLLVGSNTVLKEDEKKEHPADVTKLAVATGVKHGPENGISSKESKDNSSESSSHTRPGGTVSQETEHSAQRSSKKSSDDAGGKDDLVSSDDGSSFSAKTRSNATAKLDFDLNEGIPGDEGHLSEPATSPAVCSSAIHLPRPSPFVSPDASGNEDPIAAPDKGPFVPPDNLIRLKSETGWKGSAATSAFRPAEPRKIFEMTLSASGILVSDAAGKNRPALDIDLNVADEQFLEEDVSQSSVQTTGSESGNTRRSNGPVRSVGFKLDLNRADEVAENGQIVSNTNHRVEVPLLSRPLPGVFSSSDANSSRDFDLNNGPTLDEAGTEHAPRSLSSKNTSSIPFLPQVASMRMNSAEMSNISPWFASANACAPVAIKSFLPSRGEQPHPVETAAGSGTQRIITSLADGVQHGSDPSRTPVISTSPTMMFHPPAYQYAGFPFTPSVHLQAPGFSIGSTSYANSAPGGIPYFPTIAPTLVGPAGALPAQHTRQYAINLPEGSSTVGHDNNRKWGRQGLDLNSGPGSVDVEVKDDRVTLPVRQNFIAPPHAFVDEHTRMYQMPPGVGIKRKEPEGSWDAERSSYKQLSWQ

SEQ ID NO: 166383 - protein, 203 aa, Oryza sativa
  Clone ID: PAT_MRT4530_65098C.1.pep
SILTYKKGTPTPHPWGPPPPAQSLSSSSQSLFSSSHRPPASFAHLQRSPPPSPSAPLSPPPSLRRPVIGSFAHRLRVAASFAHRPRSPHRAKDEDNAAAQRHRQAPPSIAAYLRSTTSFYIPHPPPDGPSNHELGGSRSGHPELRGRGSNHPEFGCSRSVREVSGPPSTPPHVVEVNMSWGEQASAVPFHPILGSHCRLIYFT

SEQ ID NO: 166384 - protein, 159 aa, Oryza sativa
  Clone ID: PAT_MRT4530_65099C.1.pep
IRVAASFPPPPRQIRVVSSQRRRQRRCQDHRRTGHHAAAQRHRQAPPSIAAYLRSTTSFYIPHPPPDGPSNHELGGSRSGHPELRGRGSNHPEFGCSRSCSPSFSDARSVREVSGPPSTPPHVVEVNMSWGEQASAVPFHPILGSHCRLICDVFYSLSH

SEQ ID NO: 166385 - protein, 83 aa, Oryza sativa
  Clone ID: PAT_MRT4530_6509C.1.pep
GPAQWSIIPQPDPVLRHPERGECRFPAPRTQAKALGRRQPRRREVFRPPPLEGEGSGYCVSSVQAPSPKPHGGQGHGALSLRF

SEQ ID NO: 166386 - protein, 123 aa, Oryza sativa
  Clone ID: PAT_MRT4530_650C.1.pep
MRGVNLAALLVIFLGVLSAAATTAAGRLPGVATTPTPAASLPINREPRGLHHAPSPAPAKMTTTQPPASASPAPAKMTTTQPPASASLPINREPRDFHVAAATAGSGSISKAALLLLPVMVAL

SEQ ID NO: 166387 - protein, 62 aa, Oryza sativa
  Clone ID: PAT_MRT4530_65100C.1.pep
MEFGWALDGLCGFRIHLGTRGDCPLPYEEWGEFVIGTNKYRFPNELFGSSTTGLRADPSCRG

SEQ ID NO: 166388 - protein, 92 aa, Oryza sativa
  Clone ID: PAT_MRT4530_65101C.1.pep
MALQFIITICFFRWTSGWGCRTCHVVRGEWLNDQLDSELGAVLPCRWLARNLATIHRGTTRCAAKCLRYNMNAGHEVEGEAMRKAMHGAHSL

SEQ ID NO: 166389 - protein, 85 aa, Oryza sativa
  Clone ID: PAT_MRT4530_65102C.1.pep
VDPISARQICHGGKHRPVRRPWAPPPPPLGGSTASLLHGFGKDATDLAPMGGTAPGGAGSGVDFGGLGLRQLVPAIKWVGPGARV

SEQ ID NO: 166390 - protein, 208 aa, Oryza sativa
  Clone ID: PAT_MRT4530_65103C.1.pep
MAPVSALAKYKLVFLGDQSVGKTSIITRFMYDKFDNTYQATIGIDFLSKTMYLEDRTVRLQLWDTAGQERFRSLIPSYIRDSSVAVIVFDVASRQSFLNTSKWIEEVRTERGSDVIIVLVGNKTDLVDKRQVSIEEGEGKAKDLGVMFIETSAKAGFNIKALFRKIAAALPGMETLSSAKQEDMVDVNLKSSNANSSQSQAQAGGCSC

SEQ ID NO: 166391 - protein, 96 aa, Oryza sativa
  Clone ID: PAT_MRT4530_65104C.1.pep
MGNRLRLASWLGRGDTASWSRAELAPSRMGKHRPGDAPTNNGDDADLRETTRRWIGKKLKPMGVSGPRVVSWRNRFYVAVNWATTLVCGRDNIRIG

SEQ ID NO: 166392 - protein, 90 aa, Oryza sativa
  Clone ID: PAT_MRT4530_65105C.1.pep
GTQQREKGVKGLRKWPGNYRAKKRGVGKSLNTHWGKTGNGVGAPNLGRGKGLGKTIFLGGNLKGFFIKKHGGGQRLTIWPFGDWLGLGGA

SEQ ID NO: 166393 - protein, 224 aa, Oryza sativa
  Clone ID: PAT_MRT4530_65106C.1.pep
MAKSGFSSGDAERGLRGRGGGRERTSARVRGTGGDSAAVADGDGNRHRGVAGKGGGSLYEGRKGLERLRECESLPSTTRRDVFRCSAAAALTGGDARLDGVNCPDARGPCALTTAAGATPPEWAERRPAVSVDYDRGQREARAEVEGVGAVAFPARHRLRVEGSRWQRDWKVLEAAARVLAIPRAEAGAVDAVLNCWAGRFARGNFPLLIRVRASSHALKYFMN

SEQ ID NO: 166394 - protein, 113 aa, Oryza sativa
  Clone ID: PAT_MRT4530_65107C.1.pep
NNVIVIVYHFREASQFADKGDSPRSSSGSSLSDKSEFPPRSVSLPSWYSGFLGSPDQQSLPRRSNSISHPFPFSRQLENGVENISPIRPNSVDVAPKGCSPNSRHQSKGTSPT

SEQ ID NO: 166395 - protein, 351 aa, Oryza sativa
  unsure (1)..(351): unsure at all Xaa locations
  Clone ID: PAT_MRT4530_65108C.1.pep
DTAGRRSAHSGGVAPAAVVRAHGPRASGQLTPSSRASPPPSLAPAASTPPLPLLPRAPQRPLRSPPXPAPPSAAHPHLPACAPHRPTPCVPTSHSRSLSKPLRPSYNEPPPFPATPRWRFPSPSATAAESPPVPLTLADVRSRPPPLPLSPLSASPDPPPQCSPSPPQQAMVAVLSRRPPSPSXPLLPPAALHSWSLRRCLTADADRPPFPTRPASPDYEKKPSPPPSPLLSGVQEPSRVPAPPPDLDKDKAPPKPKPPKPKPKPPKSEPEPGPPPPPRSCAPTRATTSRSSPSASPRRSXPPPPPPPPPAXPNGAAPAPARITWNPSPPPPPPSPPELGSIPAATTTRSS

SEQ ID NO: 166396 - protein, 2132 aa, Oryza sativa
  unsure (1)..(2132): unsure at all Xaa locations
  Clone ID: PAT_MRT4530_65109C.1.pep
MDRQWMYADRRSKEFIDGVHYFLRVAEANRQRGFICCPCNKCKNQKEYSASRTIHFHLFESGFIPSYNCWTSHGEQGVEMEEDEVEDDNIPDFAQYVGFEENQTGEEEIAADGNDVADDLGQMLQDAMEDCESEKEAHKLDKMLEDHRTSLYPGCEQGHKXLDTTLEFLQWKAKNGVSDKAFGDLLKLVKNILLGGNKLPETTYEAKKIVCPLGLEVHKIHACPNDCILYRGEEYENLEACPVCKALRYKIRRDDPGEVDGQLTKKRIPAKMMWYFPMIARLRRLFRNKGNARMLRWHAEERQQDGMLRHPADGSQWRNIDRKFKEFGKDARNIRFGLSTDGMNPFGEMSSGHSTWPVTMCIYNLPPXLCIKRKYIMMPIIIQGPKQPGNDNDVYLRPLIEDLKQLWKKEGVPVWDEDKQEEFNLRALLFVTINDWPALSNLSGQSNKGYKACTHCMDETESTYLKHCRKVVYMGHRRFLAANHLVRKKGKHFEHKADHRTKPKHRSGKTMFAMVKDLKVVFGKGPGSQLIESEDGHAAMWKKNSIFWELPYWEFLDVRYAIDVMHLTKNLCVNLLGFLGVYGKSKDTLEARNDLKHMEQRGDLHPEPKEKGSHYLSPASYTLSKAEKESMFECLESIKVPSGYSTNIKRIISTKEKKFTNLKSHDCHVLMTQLLPVVIRGILPDNVRATITKLCAFMNAISQKVIDPDRLEALQNEVVQCLVSFELIFPPSFFNIMTHLLCHLVKEIRILRPVYLHNMFPFERYMGVLKKYVRNRARPEASIAKGYGTEKVIEFCVEFIEDLRPIGVPESRHEGRLRGKGTLGRKAIMTVDNNLFRKAHFIVLQHSSLVAPYIEEHLALVRARNIGKSDAWITQHHIDTFPTWLRQHLMGNESINQQLVFLARGPSGSIATFQGYEINGYTFYTRAQDMKSTNQNSVVRVDAMGHDGTTATYYGAIEDIWELDYGPLKVPLFRCQWVRLTGGGVMIDDSGMTIVDLNKVGYSDEPFVLANDVTQVLFVKDMSSKGKKGRGPDEPKRQVVLPARPRLLHQHLXVFGRSISLGLSPSPPLPRVNPRADAAVSRRRLELVVLAAASASSAAAASLRCFLYQQMADHDEEQILYDTIAEGSSQYWNKEEGNGDPNQYLNEEGNVERDAEGNQQGHVESDVEGNQEEEASGSQPSVGQKRAHGQRGAAKKLEGRHIITEVEEDGRPSAPAEAAKNYVRHSGWVVRDNVPVSTVYWRRTRARGDHESSVPDSEKEMLWTTMLETFTLPAGTEDKVKRWTLKKMAEQFQSFKGELYKKYILKGQTPNFDTFPKLRDHWDEFIAYKTGEQGQAMMERNKENAAKKKYHHHLGSGGYSVAKPKWEEMEASLIERGFEPATANWSERSKFWYYAHGGTLNPADGSLVFGDQIREAARRLTDAVEASSQGTFXPDRDRDELTLALXTPEHPGRTRGKWVIPWKIGFKEDIHTYRSRMRSKRDTEAKIADLEFRVLSYELSMQEEVARKVDERMAAHRSHDPQPTIPPAMVSPSGNCSSCASTGQVGSQSMDAMQTQDESTCPVDDITQRTPCELHIPYKNLSIKVASGMAIPTDPSGTYHCRPIPAGYSKVEVELVEGAYEDLELDYPGGDGETHLRDTSHAIILWRRRYIILPGRQAASRVPYPPAPPSPPQDPAPSPPHAPPAPSPPQAPAPTPPQDPAPTPPRAPTPTPPQAPLPAPSKSRXPPAPPPAHTRATKKAKVDAAKNKDPAYDCTQEELDTYVASEVKRQFKPRSPEKKIPIDPSVRNFFRGMSASVKEAIKLSDYERTLKKASSRKSKPVPQLGEQPNQEIEPLVTGKEMTIEQFIIDTGLTTDQLLGVAPIEKAEVKYMYELGKPLVKPELLQSLPTQMYKFHQLYMEMSATGREMIGARIRDTDFLQGDDILWINFKGIYELYQLDALDVSIMSCWILMEIQRARRRRVFDTGFIDPRRVNVAMLDQYPQETEDNLVHLLKAQHYKTFILLPYNTEFHWVLLLFDLSACTVNVYDSMDKKESTFDKVFELIDRAWYRFRHLIRGKWRERLRRKFKFPFIRMRDNLTTHKEFIAAVQDQLMGFINEEILDPKGEFYYDGNTIHRSLASELAASTTTTSKS

SEQ ID NO: 166397 - protein, 75 aa, Oryza sativa
  Clone ID: PAT_MRT4530_6510C.1.pep
SSSIQQEAIWDESWSLPQSAPSPYLTCELRRALFLFELQVSMLHLNLKNWQYPCNISQHLKFHMARTPIVALQIS

SEQ ID NO: 166398 - protein, 128 aa, Oryza sativa
  unsure (1)..(128): unsure at all Xaa locations
  Clone ID: PAT_MRT4530_65110C.1.pep
LADGEHSTESFDSLVRLARPPQKLRNHVRSPRERARPIDGRWQTTDGGDPVRVPCTSCIADGXFPWADRSIYQFPRQRVTAGPVARHGLPLNGRFRLRAAGFLLLVPRTRRDRETLPYARASIAAAGW

SEQ ID NO: 166399 - protein, 2032 aa, Oryza sativa
  unsure (1)..(2032): unsure at all Xaa locations
  Clone ID: PAT_MRT4530_65111C.1.pep
MDRQWMYADRRSKEFIDGVHYFLRVAEANRQRGFICCPCNKCKNQKEYSASRTIHFHLFESGFMPSYNCWTSHGEQGVEMEEDEVEDDNIPDFAQYVGFEGNQTGEEEIAADGNDVADDLGQMLQDAREDCESEKEAHKLDKMLEDHRTSLYPGCEQGHKKLDTTLELLQWKAKNGVSDKAFGDLLKLVKNILPGGNKLPETTYEAKKIVCPLGLEVHKIHACPNDCILYRGEEYENLEACPVCKALRYKIRRDDPGEVDGQLTKKRIPAKVMWYFPIIPRLRRLFRNKGNARMLRWHAEERQQDGMLRHPADGSQWRNIDRKFKEFGKDARNIRFGLSTDGMNPFGEMSSGHSTWPVTMCIYNLPPWLCMKRKYIMMPIIIQGPKQPGNDIDVYLRPLVEDLKQLWKKEGVPMWDEDKQEEFNLRALMFVTINDWPALSNLSGQSNKGYKVCTHCMDETESTYLKHCRKVVYMGHRRFLAANHPVRKKGKHFEHKADHRTKPKHRSGKTVFAMVKDLKVVFGKGPGSQHIESEDGVYGKSKDTLEARNDLKHMEQRGDLHPEPKEKGSHYLSPASYTLSKAEKESMFECLESIKVPSGYSTNIKRIISTKEKKFTNLKSHDCHVLMTQLLPVVIRGILPDNVRATITKLCAFMNAISQKVIDPDRLEALQNEVVQCLVSFELIFPPSFFNIMTHLLCHLVKEIRILRPVYLHNMFPFERYMGVLKKYVRNRARPEASIAKGYGTEKVIEFCVEFIEDLRPIGVPESRHEGRLRGKGTLGRKAIMTVDNNLFRKAHFIVLQHSSLVAPYIEEHLALVRARNIGKSDAWITQHHIDTFPTWLRQHLMGNESINQQLVFLARGPSGSIATFQGYEINGYTFYTRAQDMKSTNQNSVVRVDAMGHDGTTATYYGAIEDIWELDYGPLKVPLFRCQWVRLTGGGVMIDDSGMTIVDLNKVGYSDEPFVLANDVTQVLFVKDMSSKGKKGRGPDEPKRQVVLPGKRKIVGVEDKTDEDYDQLDGQPLFTVTIDPSILLSNEDTPYSRSDHKEGTIVRRKNTYMADHDEEQILYDTIAEGSSQYWNKEEGNGDPNQYLNEEGNVERDAEGNQQGHVESDVEGNQEEEASGSQPSVGQKRAHGQRGAAKKLEGRHIITEVEEDGRPSAPAEAAKNYVRHSGWVVRDNVPVSTVYWRRTRARGDHESSVPDSEKEMLWTTMLETFTLPAGTEDKVKRWTLKKMAEQFQSFKGELYKKYILKGQTPNFDTFPKLRDHWDEFIAYKTGEQGQAMMERNKENAAKKKYHHHLGSGGYSVAKPKWEEMEASLIERGFEPATANWSERSKFWYYAHGGTLNPADGSLTPEHPGRTRGKWVIPWKIGFKEDIHTYRSRMRSKRDTEAKIADLEFRVLSYELSMQEEVARKVDERMAAHRSHDPQPTIPPAMVSPSGNCSSCASTGQVGSQSMDAMQTQDESTCPVDDITQRTPCELHIPYKNLSIKVASGMAIPTDPSGTYHCRPIPAGYSKVEVELVEGAYEDLELDYPGGDGXPAPSPPHAPPAPSPPQAPAPTPPQDPAPTPPRAPTPTPPQAPLPAPSKSRXPPAPPPAHTRATKKAKVDAAKNKDPAYDCTQEELDTYVASEVKRQFKPRSPEKKIPIDPSVRNFFRGMSASVKEAIKLSDYERTLKKASSRKSKPVPQLGEQPNQEIEPLVTGKEMTIEQFIIDTGLTTDQLLGVAPIEKAEVKYMYELGKPLVKPELLQSLPTQMYKFHQLYMEMSATGREMIGARIRDTDFLQGDDILWINFKGIYELYQLDALDVSIMSCWILMEIQRARRRRVFDTGFIDPRRVNVAMLDQYPQETEDNLVHLLKAQHYKTFILLPYNTEFHWVLLLFDLSACTVNVYDSMDKKESTFDKVFELIDRAWYRFRHLIRGKWRERLRRKFKFPCAKQKQGTNLCGYYVCEYCHCLADQIITTRELDFIRMRDNLTTHKEFIAAVQDQLMGFINEEILDPKGEFYYDGNTIHRSLASELAASTTTTSKS

SEQ ID NO: 166400 - protein, 933 aa, Oryza sativa
  Clone ID: PAT_MRT4530_65112C.1.pep
MEEDEVEEDNIPDFAQYAGFEGNQTGEEDRDADYNDVAEDLGQMLQDSKEDYESEKGAYKLDKMLEDHRTSLYPGCEQGHKKLDTTLEFLQWKAKNGVSDKAFGDLLKLVKNILPEENKLPETTYEAKKIVCPLGLEVQKIHACPNDCILYRGEEYENLEACPICKALRYNIRRYDPGEVDGQLTKKRIPAKVMWYFPIITRLRRLFRNKGNARMMRWHAEERQQDGMLRHPADGSQWRNIDRKFKDFGKDARTIRFGLSTDGMNPFGEMSSGHSAWPVTMCIYNLLPWLCMKRKYIMMPIIIQGPKQPGNDINVFLRPLVEDLKLLWKKEGVPVWDEDKQEEFNLRALLFITINDWPALSNLSGQSNKGYKACTHCMDETESTYLKHCRKVVYMGYRRFLAANHPIRKKGKHFEHKADHRTKPKHRSGKTMFAMVKDLKVVFGKGPGSQPIESEDGVYGKSKDTLEARNDLKHMEQRGDLHPEPKKKGSHYLSLASYTLSKAEKKIMFQCLESINIPSGYSTNIKRIISTKEKKFTNLKSHNCHVLMTQLLPVIIRGILPDNVQATITKLCSFLNAISQKVIDPDRDRYSGPVFLHNMFPFERYMGVLKKYVRNRARPEASIAKGYGTEEVIEFSIEFIEYLHPIRVPESRHEGRLRGKGTLGRKAIMTVDNNLFRKAHFTVLQQSSLVAPYIEEHLALVHARNIGKSDAWITRHHIDTFPAWLRQHLMGNETINQQLAFLARDPSGSIATFQGYDINGVVRIDAMGHDGTTGTYYGAIEEIWELDYGPLKVPLFRCQWVRLTGGGVMIDDSGMTTVDLNKVGYSDEPFVLANDVTQVFYVKDMSSKGKKGKGPDEPKRHVVLPGKRKIVGVDDKTDEDYDQFDGQSPFTVTIDSSILLSNEDTPYTCSDHKEGTIVRRKYMRTTVTADVLP

SEQ ID NO: 166401 - protein, 131 aa, Oryza sativa
  Clone ID: PAT_MRT4530_65113C.1.pep
HRAPRPASLLPGPPPPTTPSSFGLQRRCCRGSSLREPTSAGASRSPCVSTPPPRRRTSAVLQSYAASRRSLARRKPGRPCRNVPAGHLRPPCRAPASRHRYALIRSSALSMQCPCLIEKRWVDWPSGEAKQ

SEQ ID NO: 166402 - protein, 1837 aa, Oryza sativa
  Clone ID: PAT_MRT4530_65114C.1.pep
MSDQECMEANHRLEEKIDMILEKLNEVEANRSKFFKEMSASIKATVAVLKDAPYPPPQDPPSSMLTTYSTMCSNNDHPRATSSSSHIDKETAPTVVLGLRDGEDKVHDPCIVTKDFLEVTLTMCSMKCSSPHTVPDLTMVAVVMCATTATTSTELVVFEDTTGVAYINTPDYSKMVHAKCSTAGLDIDGGMDQAVVVFQIMKSVSKVVPISVEPLSIFSLRLTANLKQDRPTPTKCSMKSPLHRNMVLLIVYDLHHITMATTNSDKFLGINLEPSVNTSAEAAYANYWSINLLENVTHKGSASYQAIYEMDRQWMYADRRSKEFIDGVHYFLRVAEANRQRGFICCPCNKCKNQKEYSTSRTIHFHLFESGFMPSYNCWTSHGEQGVEMEEDEVEDDNIPDFAQYVGFEGNQTSEEEIAADGNDVADDLGQMLQDAREDCESEKEAHKLDKMLKDHRTSLYPGCEQGHKKLDTTLELLQWKAKNGVSDKAFGDLLKLVKNILPGGNKLPETTYEAKKIVCPLGLEVHKIHACPNDCILYRGEEYENLEACPVCKALRYKIRRDDPGEVDGQLTKKRILAKVMWYFPIIPRLRRLFRNKGNARMLRWHAEERQQDRMLRHPADGSQWRNIDRKFKEFGKDARNIRFGLSTDGMNPFGEMSSGHSTWPVTMCIYNLPPWLCMKRKYIMMPIIIQGPKQPGNDIDVYLRPLVEDLKQLWKKEGVPVWDEDKQEEFNLRALLFVTINDWPALSNLSGQSNKGYKACTHWMDETESTYLKHCRKVVYMGHRRFLAANHPVRKKGKHFEHKADHRTKPKHRSGKTVFAMVKDLKVVFGKGPGSQHIESEDGVYGKSKDTLEARNDLKHMEQRGDLHPEPKEKGSHYLSPASYTLSKAEKESMFECLESIKVPSGYSTNIKRIISTKEKKFTNLKSHDCHVLMTQLLPVVIRGILPDNVRATITKLCAFMNAISQKVIDPDRLEALQNEVVQCLRYMGVLKKYVRNHARPEASIAKGYGTEEVIEFCVEFIEDLRPIGVPESRHEGRLRGKGTLGRKAITTVDNNLFRKAHFTVLQHSSLVAPYIEEHLALVRARNIGKSDAWITRHHIDTFPAWLRQHLMGNESIDQQLAFLARGPSGSIATFQGYEINGYTFYTRAQDMKSTNQNSAVRVDAMGHDGTTATYYGAIEDIWELDYGPLKVPLFRCQWVRLTGGGVMIDDSGMTTVDLNKVGYSDEHRSHDLQPTIPPAMVSPSGNRSSCASTGQVGSQSMDAMQTQDESTCPVDDITQRIPCELHIPFKNLSIKVASGMAIPTDPSGTYHCRPIPAGYSKVEVELVEGAYEDLELDYPGGDGETHLRDTCHAIILWHRRYIILPGRQAASRAPSPPAPPSPPQDPAPSPPHAPPAPSPPQAPASTPPQDPAPTPRAPTPTPPQAPLPAPSKSRAPPAPPLAHTRATKKAKVDAAKNKDPGGMSASVKEAIKLSDYERTLKKASSGKSKPVPQLGEQPNQEIEPLVTGKEMTIEQFITDTGLTTDQLLGVAPIEKAEVKYMYELGKPLVKPELLQSLPTQMYKFHQLYMEMSATGREMIGARIRDTDFLQGDDILWINFRGIYELYQLDALDVSIMSCWILMEIQRARRRRVFDTGFIDPRKVNVAMLDQYPQETEDNLVHLLKAQHYKTFILLPYNTEFHWVLLLIDLEACTVNVYDSMDKKESTFDKVFELIDRAWYRFRHLVRGKWRERLRRKFKFPCAKQKQGTNLCGYYVCEYCHCLADQIITTRELDFIRMRDNLTTHKEFIAAVQEQLMGFINEEILDPKGEFYYDGNTIHRSLASELAASTTTSKS

SEQ ID NO: 166403 - protein, 82 aa, Oryza sativa
  unsure (1)..(82): unsure at all Xaa locations
  Clone ID: PAT_MRT4530_65115C.1.pep
MLVTEHTSVRVRQTXGTQTPDEKSLSVYRSMWFTNARAWELPALARHRPKHGRFQENDFYGFEETVSCVLGKENKAQVKRKI

SEQ ID NO: 166404 - protein, 710 aa, Oryza sativa
  Clone ID: PAT_MRT4530_65116C.1.pep
MDRQWMYADRRSKEFIDGVHYFLRVAEANRHKGFICCPCNKCKNQKEYSASRTIHFHLFESGFMPSYNCWTSHGEQGVEMEEDEVEDDNILDFAQYIGFEGNQTGEEERDTDGHKKLDTTLEFLQWKEKNGVSDKAFGDLLKLVKNILPEGNKLPETTYEAKKIVCPLGLEVQKIHTCPNDCILYRGEEYENLEACPVCKALRYKIRRDDPGERREFLLRNKGNARMIRWHAEERQQDGMLRHPADDSQWRNIDRKFKDFGKDARNIRFGLSFKQPGNDIDVYLRPLVEDLKLLWKKKGVPMWDEDKQEEFNLLALLFVTINDWPALSNLSGQSNKGYKACIHCMDETESTYLKHCRKVVYMCHRRFLAANHPVRKKGKHFEHKADHRTKPKHRSRKTVFDMVKDLKVMFEKGPGSQPIESEDGVYGKSKDTLEARNDLKHMEQRGDLHPEPKEKGSHYLSPASYTLSKAEKESMFECLESIKVLSRYSTNIKRIISTKEKKFTNLKSHDCHVLMTQLLPIVIRGILPDNVRATITKLCAFMNAISQKVIDPDRLEALQNDVLQCLVSFELIFPPSFFNIMTHLLCHLVKEISILGPVYLHNMFPFERYMGVMKKYVRNRSRLEASIAKGYGTEEVIEFCVEFIEDLRLIRVPESRHKGRLRGKGTLGRKAIMTVDNNLFRKAHFAVLQQSSLVAPYIEENLALVRTRII

SEQ ID NO: 166405 - protein, 675 aa, Oryza sativa
  unsure (1)..(675): unsure at all Xaa locations
  Clone ID: PAT_MRT4530_65117C.1.pep
EVDGQLTKKRIPAKVMWYFPIIPRLRRLFKNKGNVRMMRWHAEERQQDGMLRHPADGSQWRNIDRKFKYFGKDARNVRFRLSMDGMNPFGEMSSGYSTWPVTMCIYNXPPWLYMKRKYIMMPIIIQGPKQPGNDIDVYLRPLVEDLKLLXKKEGVPVCNEDKQEEFNVRVLLFVTMNDWPALSNLSGXSNKGYKACTHCMDETESTYLKHCRKVVYMGHRRFLAANHPVRKKGKHFEHTVDHRTKPKHRSGKTVFAMVKDLKVVLGKGPSSQPIESEDGVYGKSKDTLEARNDLKHMEQRSNLHPEPKEKGSHYLSPASYTLSKAEKDSMFECLESIKVSSGYSTNIKRIISTKEKKFTNIKSHDYHVLMTQLLPVVIRGILPDNVRATITKLCAFMNAISQKVIDPDRLEALQNNVVQCLVSFELIFPPSFFNIMTHLLCHLVKEIGILDPVYLHNMFPFEWYMGVLKKYIRNRARPEGYEINGYTFYTRAQDMKSTNQNSVVRIDAMGHDGTTGTYYGAIEDIWELDYGPLKVPLFRCLWVRLTGGGVTNDDSGMTTVDLNKVGYSDEPFVLANDVTQVFYVKDMSSKGKKAKGLDEPKRHVVLPGKRKIVGVEDKTDENYNQFDGQPPFTVTIDPSILLSNEDTPYSRSHHKEGTIVRRKYVRSTVTADVLP

SEQ ID NO: 166406 - protein, 1938 aa, Oryza sativa
  unsure (1)..(1938): unsure at all Xaa locations
  Clone ID: PAT_MRT4530_65118C.1.pep
MNRQWMYTDRRSKEFIDGVYYFLRVAETNRHKGFICCPCNKCKNQKEYFASKTIHFHLFESGFLLSYNCWTSHGERGVEMEEDEVEDDNIPDXYVGFERNQTGEEERDADGNDVADDLGQILXDAKEDCESEKGAHKLDKMLEDHRTSLYPGCEQGHKKLDTTLEFLQWKAKNGISDKAFGDLLKLVKNILPERNKLPETTYEAKKIVCPLGLEVQKIHTCPNDCILYGGEEYENLEACPICKALRYKIRRDDPGKVDGQLTKKRIPAKVMWYFLIIPRLRRLFRNKGNARMMRWHAEERQQDWMLRHPANGLXWRNIDRKFKDFGKDARNIRFALSTDGMXYPFGDMSSGHSTWSVTMCIYNLPXWLCMKRKYIMMPIIIQGPKQPGNDIDVYLKPLVEDLKLLWKKEGVPVWDKDKHEEFNLRALLFVTINDWPALSNLSGQSSKGYKACTHCMDKTESTYLKHYRKVVYMGHRRFLAANHPVRKKGKHFEHKADHRTKPKHRSGKIVFAMVKDLKVVFGKGPGSQPIESKDGHAAMWKKNSIFWEFPYWEFLDVRHAIDVTHLTKNLCVNLLGFLGVYGKSKDTLEARNVLKHMEQRGDLHPEPKEKGSHYLSPASYTLSKAXKESMFECLESIKVSSRYSTNIKRIISTKEKKFTNLKSHDCHVLMTQLLPVVIRGILLDNVRATITKLCAFMNAISQKVIDPDILEALQNDVVQXPPSFFNIMTHLLCHLVKEISILGPMYLQNMFSFERYMGVLKKYVRSRARPEASFAKGYGTEEVIEFCVEFIEDLRPIGVPESRHEGRLRGKGTLGRKAIMTVDNNLFRKAYFTVLQQSSLVAPYIEEHLALVRARNIGQSDAWITRHHIDTFPALLRQHLMGNETINQQLVFLARGPSGSIATFQGYEINGYTFYTRAQDMKSTNQNSAVRIDAMGHDGTTGMYYGAIEDIWELEYGPLKVPLFRCQWVRLTGGGVMIDDSGMTTVDLNKVGYSDEPFVLANDVTQVFYVKDMSSKGKKGRGPDEPKRHVVLSTRPHLLHQHLEVFSXDRSLSASPSPPLPRASPHRXAVVSRRRLVRVVVATSVAASPSLSLNYFLYEQMADHDEEXILYDTIAEGSSXYWNEEEGNEDPNQYLNEEGNMERDAEGNQEGHMERDVEGNQEEEASGSQPSAGXKRTRGQRGAVKKLEGWHIITEVDEDDRPSVPAEAAKNYVRHSSWVMRDNMPVSTVYWRRTRTRRDHESFVPDSEKEMLWTTMLETFTLPMGTEDKVKRWTLKKMTEQFQSFKGDLYQKYILKGQTPNFDTFPKLRDHWDEFVAYKIGQQGQAIMERNKENTTKKKYHHHLGSGGYSVAMPKWEEMKASLLERGIEPATANWPDRSKFWYYAHGGTLNPVDGSLVFSDQIREAAHRLTDAVEASSQGMFRPDREKDELSLALQTPEHPGRTRGKGVIPWKIGFKEDIHTYRSQMRSKRDTEAKIADLEYRVSSYELSMQEEVASKVDERMAAHRSHDPQPTIPPAMMSPSGNRSSCASTGQVGSQSMDAMQTQDETTCPVDDITQRTPCELHIPFKNLSIKVASGMAIPTDPSGTYHCRPILAGYSKVEVELVEGAYEDLELDYPRGDGETHLRDTSHAIILWRKRYIILPRRQAASRAPSPPALPSPPQALAPSPPHAPAPSPPQAPAPTPPQVPAPTPPXAPTPTPPHAPRPAPSKSRAPQAPPPAPTRATKKAKVDTAKNKDPGYDCTQEELDAYVALEVRRQLKPRSPEKKIPIDPSVMNFFRDMSAPAKEAIKLSDYERTLKKASSRKSKPVPQLGEQPNQEIEPLVTGEDFGIQEFINDTRLTTDQFLRGAPIEKAEVKYMYELGKLLIKPEQLQSLPTQMYKFHQLYMEMSATGREMIGARIRDTDFKQQYILLYLHIICITPLYKIYSIHYYSVLYC

SEQ ID NO: 166407 - protein, 168 aa, Oryza sativa
  Clone ID: PAT_MRT4530_65119C.1.pep
MALVIADEIKAKAEVYYDDEICQQCTRLLLKEAGLPNGLLPLKDIMECGYVEETGFVWLKQKKRIDHVFQSLGRLVSYGTEITAFAEKGRIKKVKGIKTRELMVWVPVEEIALDEQKTGKLICKSIAGITKTFPASAFQIPEKEEKITCAIPKPVVLMERAHQVIKNN

SEQ ID NO: 166408 - protein, 833 aa, Oryza sativa
  Clone ID: PAT_MRT4530_6511C.1.pep
MVVSASMGVMNPLMAKLTTLMGDEYKKLKGLRKQVSFLKDELTTMSAFLEKLALMDDDDDGELDPLAKDWRNHVREMAYDMEDCIDDYFTSHLDHRYSSSDAGLIRKIARRLRALRVRHRIASQINELKARVVEANERRVRYRLDDCNNKHGVSANPAIDPRITSLYQNAGSLVGIDGPSQELIQLLSLDRDTDQRQLKVVSVVGFGGLGKTTLAKYVYDKIGHQFDCTAFVSVSHKPDITRILSSIQSKLDIGGTSQACDDVQQLIDDIRAYLEHERYIIIVDDLWKQEAWVIISCAFPNNGKGSRVIVTTRVKDVARLACGKDGQIYKIQPLNNKDSRKLFFDRVFRPEDSCVLQYEEISTEILKKCSGLPLAIVTVGSLLACRPRTMEEWKSIRDSLGAPFDKNKSLEGMRNILNLSYKNLPLHLKTCLLYIGKYPEDYEIGRDELVTEWIAEGIMGNPHGENLEATGNGYFSELINRGLIQPESTGYDGGQVDLTAISHVLQLRYLRVETPGCEIDLPSKICGLVHLETLSIFSHKAVSRLPSDISSLPRLSVLSLVVPWATRLPNKLNKLKGSLRSLTILFNPPDALGMEAIGELKNLRDLNISVNRWRDDEILSLYALGSSIGKLDELRSLQIHVPPATLGDVDLLGSLPIFPQSIERLILHGWCFSKVPRWINGTLRNLQHVLLEVSETSSSEVDLLGELPSLADLELRVGLKTRDVIAFGGTRASLFPALLKLKLRVGEHVASRLQFQAGVMPKLQSLHLWFRNCESGIHVTPEGMQHLLSLQSICVEIYLRDEELKATYPWDAMERAFREITGANPNRPSFKFE

SEQ ID NO: 166409 - protein, 66 aa, Oryza sativa
  Clone ID: PAT_MRT4530_65120C.1.pep
LIAVVFLFHQCVNSICKALNGINPEERMCLLKLRQAHTEETQSRGGLHQKKKKKLETSSLSLLVPI

SEQ ID NO: 166410 - protein, 79 aa, Oryza sativa
  unsure (1)..(79): unsure at all Xaa locations
  Clone ID: PAT_MRT4530_65121C.1.pep
PIYNFSQENMSSDKINVALQRDSRHRDGLPPLYPSFESPKKGFVPFKKIFFLGTPKSFXGLKPPTKKTNTNVFDLVFRA

SEQ ID NO: 166411 - protein, 89 aa, Oryza sativa
  unsure (1)..(89): unsure at all Xaa locations
  Clone ID: PAT_MRT4530_65122C.1.pep
ASSPPPAAPPPRHPYPAAGSLXRIPPSPSLSDHHTACLPSPLPLPSPIASPTEPTPPPPVPGHPHAPASSLRSSPPGEPSSSSLAPPSS

SEQ ID NO: 166412 - protein, 609 aa, Oryza sativa
  Clone ID: PAT_MRT4530_65123C.1.pep
MRGLLRRVYLRLPPFPPATSLYYWSRTRPAAAGPNHPIPRRMSTSSTAAAVVAEGSAARRFWIAAASREAAFAAYTPFLVSLAAGALRLDSFRQYIAQDAYFLHAFARAYEMAEECADDDDDKATIVVLRKAILRELNLHASVLQEWGVDPNKEIPPIPATTKYTDFLLATSTGKVDGGKGSDKMVTPFEKTKIAAYTVGAMTPCMRLYAYLGKELAVFLKQDENHPYKKWIETYASSDFENNALQIEELLDKLSVSLTGEELEIIGKLYQQAMRLEVEFFSAQPVDQPVVAPLSRYCGPKDKLLIFCDFDLTCTVVDSSAILAEIAILSHQKASQGGADSSLDRTKSADLRNSWNMLSNQYMEEYEQCIASLLPPEEARSLDYDQLYKGLEVLSQFEKLANSRVVDSGVLRGMNLDDIRKAGERLILQDGCKIFFQKIGKTRENLNLDVHILSYCWCADLIRSAFSSVGCLDGLNIHSNEFAFEGSVSTGHINRQMESPLDKAEKFKSIKSDVGSTGTLLSVYIGDSVGDLLCLLEADIGIVVGSSTTLRRVGKQFGVSFVPLFTGLVEKQRRIEKEESSIFKARSGILYTVSSWSEVQAFILGNDFS

SEQ ID NO: 166413 - protein, 58 aa, Oryza sativa
  unsure (1)..(58): unsure at all Xaa locations
  Clone ID: PAT_MRT4530_65124C.1.pep
CRECRCAAIRRMVRSYXESMPMPLKQGWSSSSPEYYSCEESSSEQWYYCEGSSEEGYY

SEQ ID NO: 166414 - protein, 123 aa, Oryza sativa
  unsure (1)..(123): unsure at all Xaa locations
  Clone ID: PAT_MRT4530_65125C.1.pep
SWSFPDILSRDVDKILRPQFXPFLQSCGFSKDQVMALVAGYPPVLIKSVKHCLXPRMKFLVXXMGRDMGEVVDYPQFFRXGLKRSLEYRHKVLKQMNSRCSLSEMLDCNQKKFAMKFGLLAAV

SEQ ID NO: 166415 - protein, 431 aa, Oryza sativa
  Clone ID: PAT_MRT4530_65126C.1.pep
MMLEGNSCLISRSLPSSCEPESQWAYLSHEVLNGKRPAPEDAEAEDMDEVDFGGGKRSKPPSPQPHTPDISEGHGSSRHVAASGGGEEHGNGSSLIGAIGRDLTINCLLRLSRSDYGSVASLNKDFRSLVRNGEIYRLRRQSGVAEHWVYFSCNVLEWDAYDPYRERWIQVPKMPPDECFMCSDKESLAVGTELLVFAMAHIVFRYSILTNSWTRADPMISPRCLFGSTSVGAKAYVAGGTDSSGRILSSAEMYDSETHSWTPLPSMNRARKMCSGVFMDGKFYVVGGVASNNKVLTCGEEYDLKRRSWRVIENMSEGLNGVTGAPPLIAVVNNELYAADYSEKDVKKYDKQNNKWITLGKLPERSVSMNGWGLAFRACGDRLIVIGGPRTSIGGTIELNSWTPDERPPVWNLIARRPSGNFVYNCAVMGC

SEQ ID NO: 166416 - protein, 67 aa, Oryza sativa
  Clone ID: PAT_MRT4530_65127C.1.pep
HDASVCFRSFICQTKSQELVHQKLTLHSFESMCSHVVNSLMILGGCLANETHNRKKKTATNAGKSMD

SEQ ID NO: 166417 - protein, 36 aa, Oryza sativa
  Clone ID: PAT_MRT4530_65128C.1.pep
MALEDFVRELASLHNQGFPWKPFFVLIYRRSDSWAI

SEQ ID NO: 166418 - protein, 41 aa, Oryza sativa
  Clone ID: PAT_MRT4530_65129C.1.pep
VHASGGSSSTKERACRAVEIAPYVMASRDTTVCTLQGSSPP

SEQ ID NO: 166419 - protein, 105 aa, Oryza sativa
  unsure (1)..(105): unsure at all Xaa locations
  Clone ID: PAT_MRT4530_6512C.1.pep
MPPVDRTTREEDYRQEARGRGHIGRRREVVTFARIRAKRSLQGARARVLFYPTLLYNVLRNRFEFEFSLWDRIDHYVLLXGAAPVYIDVQHLKQLGVRGVVTLNE

SEQ ID NO: 166420 - protein, 1293 aa, Oryza sativa
  Clone ID: PAT_MRT4530_65130C.1.pep
MSTCPVLNDRPIDEWKVTELKDELRRRDLSIKGLKDDLVKRLAEALQGEVIDGGEETVNGTPPVENQTQDGALVLDDASGFQASAEQNVDEGPAEVAAKNEGLVSVIEASTEGGTLVLDDGSGFQASTEQNVDEGPAEVAAKNEGLASVTEASTEDGTLVLADASGIQASTEQNVDEGPSEVAAKNEGLVSVTEASKDSAIATTEVSQEAVVAAAEVSPEALVAVTEVSEAPLVDVAGTNENSLGDAEATKEGDPESVPSDSNVVKEVCSHAEIHCEVIAEKTPDNGSSKKMTVDDISSDDTSTNTKLEESSAKGEPCVSIGCEILEQETKSSHLDVILSHADAVASAEEMITESLILKKDSNENDLMYEKDQKDSDHISTDCKPEQSGPKDQVSEVNQDLESQIKCVSISPDDILVNKNDNVEGNMNADNFDLGLESKQDIVKPSSSNPSSVGDDLQTPDDDKEISLIDMSLQDTDMSLKKKEGSPDSIYPEKLNLDRSPGDEPMEEDAMETKHMDSKTIPDYLEGKSEVTLEHVSSGDESMEEDVMETKHVDSNTKVEHVSSGDESMEEDVMETKHVDSNTKPDYLEGKNDVTLEHVVKEVILLDTVTEGSSVDQKEAISQEKPVMPTEKRKAEDQEVVANNEPIKRQRLWNVDDVKPEQATSKLSGSDASKVVHPPARRRSFGRSDSTARGNSPKERMVPPPQKPATTSLRIDRFVRPFTLKAVQELLGKTGSVCSFWMDPIKTHCYVTFSSVEEALATRNAVYNLQWPPNNGSSLVAEFVDPHEVKAKLEPPPPPPAPINPTAATAPSHQSKANQIMPPHAADTSRGLLPTPPALARLPTFNNAPAREMLPPAPKNPEPPVVVTLDDLFRKTQASPRIYYMPVSEEVVSAKLAARGKGKKAALAEYHAKLRMMKNLRDSLNARIATRLDAKTIILKDCIFDLFIEERGRAEKLEEKKKAEQASRDLRERTALLNLAFVTLKKKRNDSSVMHTNAMKAAQMGLMATTSEHLKMQSKAMKQLCRLFPLRRVIKDGEQNDGYNGPYDVICNARLPRGLDPHSVPSEELSASLGYMLQLLSIVVPILAAPALHISGFGASCSRVWQRSSYWSTRQSQSKVYPLFIPRKNNCSVGEDNSWTESGSGNFGVQSVDSDNKSVLDSKRSNSFNFSIASSHSMERHQDLQRGISLLKTSVTAITTYYYNSLGMDVPSNLSTFEAFAKLLHMLSSLKVLRTTLQSNVASRSEKQGQQLNRSIWKASSAISSNSSLMDSVNTAIMFSGQPPVELQHELPV

SEQ ID NO: 166421 - protein, 261 aa, Oryza sativa
  Clone ID: PAT_MRT4530_65131C.1.pep
YVASDSEASLGSVDIHIYLGMSTASAGGGAKSSSSWSSSTFFRWIKAARYVVAVAVIVAIVVMIAYAIKMVGRERPLVVSVTGHTVKVQRPSNMSGNLTFAFTVRAANTGGFGQIYYTNIKALLAGRSASSPASPTYFVKTGLLDMAVIPRLTAVSQSFVMSGIGANGDGTMSSKDLRPYFMDLYKGNTMRDAVLRLNGTLMTEIYSGYNSTARTVVYCCEPIFVGDDDDAPDTPERPCVEQNDHSIDMTNKKNMLSCELS

SEQ ID NO: 166422 - protein, 64 aa, Oryza sativa
  unsure (1)..(64): unsure at all Xaa locations
  Clone ID: PAT_MRT4530_65132C.1.pep
HSHTSHTLTHPTHTHSVVTHRHHSLSDNQTLRSVPPHSHTRATLPXHSRVATEWLTHYSSPLQR

SEQ ID NO: 166423 - protein, 82 aa, Oryza sativa
  Clone ID: PAT_MRT4530_65133C.1.pep
HAHSHGKYIWSDPEIHGGFCRGYLYTLERVHSTDKRIPVEASTMKRAFDQQGGHTTTAAEHTFILKQHGCCQHLPREEYYSM

SEQ ID NO: 166424 - protein, 123 aa, Oryza sativa
  Clone ID: PAT_MRT4530_65134C.1.pep
GKPRPNRPRTKKGGGGKKYNRTPLTWGPKTRKGGPPPKTGGPRFKKKGPGPPESETQKKTPRGGAQPPNYRLGPPPKGGGPPKTTKNAKHKAHIPQGKRWPKTKNPRALPQKHGGFGPRQSRG

SEQ ID NO: 166425 - protein, 72 aa, Oryza sativa
  Clone ID: PAT_MRT4530_65135C.1.pep
LTTQYLSDEVHNVHNTTHYMIRSHYIYNTQPYNNEVHRNTYIHPQHTTAYTGPRTQIDTDQDRRARPGTYLD

SEQ ID NO: 166426 - protein, 73 aa, Oryza sativa
  Clone ID: PAT_MRT4530_65136C.1.pep
MRMAFIMTMHWLFWDPHQQGDLYAQTCVLLALSPFKFGSPPVPKRLLIKTTFLFGKPIGSHWPKPGRPQNKIF

SEQ ID NO: 166427 - protein, 71 aa, Oryza sativa
  Clone ID: PAT_MRT4530_65137C.1.pep
MAYKSQWMDVDVQGRARRPCEGMRIGTRGRMAGMAACDKAGGEGKCEEAMRGERGGGGGGDWRREGGAVQG

SEQ ID NO: 166428 - protein, 158 aa, Oryza sativa
  Clone ID: PAT_MRT4530_65138C.1.pep
LKERYGGTIVGQLHRLGASLDWSREAFTMDEQRSNAVTEAFVRLHKEGLIYRDNRLVNWDCTLLTSISEIEVDHIDLKEETMLKIPGYATPVQFGVLISFAYPLEEGLGEIVVATTRIETMLGDTAIAVHPEDKKYMHLHGRYAVHPFNGRKLKIICD

SEQ ID NO: 166429 - protein, 95 aa, Oryza sativa
  unsure (1)..(95): unsure at all Xaa locations
  Clone ID: PAT_MRT4530_65139C.1.pep
LKQSSKCITRQLTPPRFPSCFLHCEKKXWVKMKQMSGTSNWAHXKLSEINXXLPFSPFKDPNEARILHYCQAKIKICHCSLNCSSLKCICMPMQR

SEQ ID NO: 166430 - protein, 49 aa, Oryza sativa
  Clone ID: PAT_MRT4530_6513C.1.pep
MAWRGEIQETEEACEAGGEKKGDQPWMEAGNLRGAAEVEESYGRRQMEA

SEQ ID NO: 166431 - protein, 86 aa, Oryza sativa
  Clone ID: PAT_MRT4530_65140C.1.pep
HPPSLSATTATTTSLERETHERLFGLVWLVFPCSLSLLPSSPSTLAPSMTMHGPFRVFLAPHPWVSFTPHHGAAAAASQQREHQEA

SEQ ID NO: 166432 - protein, 70 aa, Oryza sativa
  Clone ID: PAT_MRT4530_65141C.1.pep
NSGGYNVHSSKASHRRHSETHVLGQRSRCQSRAICAGATSWLRAPTSGYSIGSLRSSIHVSNIFLLAQAY

SEQ ID NO: 166433 - protein, 439 aa, Oryza sativa
  Clone ID: PAT_MRT4530_65142C.1.pep
MGSLFIRFQEVHTLSLFAVYIPPQTITSGSRSAPCASERSAVDPAVKTLAKNPMFANNRLFARDPRHLQFEADVNRLFLYTSYYRLGANAEEKDAEEIIDMASKASVSEQQKQVQENVHYQLTNMCQAMDSILLPDTKNGASEANNYPRRSGLSFAVGTGVASANKPDVPSTRPLNRAELSNKFRDHFQYTLDIRPSQIPHKDAGQGLFLSGETNAGAVLAIYPGVVYSPAYYRYIPGYPKIDACNNYLITRYDGTIIDAKPWQLGGDSREIWDGSDLVDYNAVPSKSQESNSDRAWRMLSKPLKKGHTENFGEVLERRNPLAFGHFANHPPKGSTPNVMICPYDFPLTEKDMRVYIPNITFGGEEEPVTMKRFGSFWFKSGRSGNQEGESPVLKTLVLVSTRSICDEELFLNYRYSNSKKRPEWYIPVDEEEDKRRWS

SEQ ID NO: 166434 - protein, 154 aa, Oryza sativa
  Clone ID: PAT_MRT4530_65143C.1.pep
PRVRWRRDALRPDGSERERQAVVLRLLLPGYDRHNGGRQERAAAGEGVRRRGRRWRRHFLLRRDVLLLLPHGVRAGGGGRGRGSRRQGQSVQREGGRPLPQALLHDAIVDEDDGTNEDVAPLEERVPHEPAWDELHHGGRTGFERRRCAYGRSH

SEQ ID NO: 166435 - protein, 84 aa, Oryza sativa
  Clone ID: PAT_MRT4530_65144C.1.pep
MTLSLVARSSGEGITLALIECNICDVDTNQNKSRTPCNRYTTNDVVPTVTHDPFLVVSDPGTKVQRLGVVNDIGNALIPLAAEI

SEQ ID NO: 166436 - protein, 99 aa, Oryza sativa
  Clone ID: PAT_MRT4530_65145C.1.pep
MGSIEAWVHMDSHSNNTTAKWRSGSNRQRRWPTDEEGLKRELDAGGEEAGFHYRIAYAGPPILKTSNSKEHCQQAKAIAGMAFVDALLTFSDSWDDFKQ

SEQ ID NO: 166437 - protein, 400 aa, Oryza sativa
  unsure (1)..(400): unsure at all Xaa locations
  Clone ID: PAT_MRT4530_65146C.1.pep
MPMMAREDEKADAMEIDGQHQQVANTAVPDGFNADYLRIYYGKLFPHVDFFKWLSYGNDGKHPGCDQSYVXRREFSFTLENDIYGRFQSIDSVAEIENAFKENXPFKIDIGPVYSVDPAKRHAYAQSGNNVFVPVERELIFDIFGDPKMLWYFPVRLNNEQRAAIADYFRVYKVGGENTMKKVSLTGAVLHPFLARSYTDVLKGFFEDKLLLSQQLFASEERYQKILDLIPDENVASELHDKWQGNRRSSISKEDVNATRWEQLKSTLQSGKHKGLRRCIEEIVFSYTYPRLDMEVSKHMNHLLKAPFCIHPKTGRVCVPIDPNNCDDFDPTTVPTLSQVFQGIVSATIAESLQGGIRKLIQCQAPAVQEYLDLVKFTQLPADLTNLVPHEKLLLHETNH

SEQ ID NO: 166438 - protein, 191 aa, Oryza sativa
  Clone ID: PAT_MRT4530_65147C.1.pep
YGANQTFLPLLRRRLAAACVPACCHGGSRSDMFERTQASRQLAINSGSGRQGSTSASTGQHFPSFEFQPQQARCKVRQHSQAGQPRVYTRQQWLSQQPMYMHHIQRRGQPQQGTLPAGTSGTHKLASSFMHTATARHLPSCATRRLQEGTRRGGGRRRSWRRSAGGDQGEGCVKCLGSPAPEKMVADCAWV

SEQ ID NO: 166439 - protein, 111 aa, Oryza sativa
  Clone ID: PAT_MRT4530_65148C.1.pep
FLNCRDTHEVKLEPGLQVLKIFKDHVCKTSLLDDFDFYDNREKMMQERKAKHQQLKKETAEVEIDVLNKEPHGKAGQVDGKENGVLAVSVNGVTPEDVQLTNEKLASLSVC

SEQ ID NO: 166440 - protein, 54 aa, Oryza sativa
  Clone ID: PAT_MRT4530_65149C.1.pep
NFQIKAFHVFKLFAANKHKPLEVVNILVPNLIKLLRFFSGFKIDNEHHQFMAFV

SEQ ID NO: 166441 - protein, 46 aa, Oryza sativa
  Clone ID: PAT_MRT4530_6514C.1.pep
AVWLLSSLSFYFLVSQGCAFNRRMKQTGFNFADDSSNEKLILFVII

SEQ ID NO: 166442 - protein, 602 aa, Oryza sativa
  Clone ID: PAT_MRT4530_65150C.1.pep
MEAPANSVAVADGNPKTATETPRVEDYKDAAMYYGTYPAYLYGAYGGWGEYSTYLSHDGAETPTAGAYGDMYYGYSPYGYSTSGHDSQMYGSQHYQYQPTYNKQQNTTGKPSNNGKTENPAALPQGVRSANGVDSLKGQKKTNLLPKASQNTPGSNGSYGRPSGRFGNYQNQTNRTTYPCYSSQIFNGKQQKLPTGNRSLTTSNSKSKGQSRNQNTYPHLMGLQTPTSPLGPPSIYSASGMYGYNGSSYGSGLWYGSHLYGSGLYGGWNALSDGKYNPRGRGNGSYGYIHGNQDGFNELRRGPRSGLFNNQQGVGATVAPVKGQELSASDSSLSVMKDQYNRADFVETYSDAKFFIIKSYSEDDVHKSIKYNVWASTSNGNKKLDAAYQEAKEKSSDSSVFLLFSVNASGQFVGLAEMVGRVDFNKTLEHWQQDKWTGCFPVKWHIVKDVPNSLLKHIILENNENKPVTNCRDTHEVKLEPGLQVLKIFKDHVCKTSLLDDFDFYDNREKMMQERKAKHQQLKKVVDEKLLNAVDTENSLLTVKSKLQETAEVEIDVLNKEPHGKAGQVDGKENGVLAVSVNGVTPEDVQLTNEKLASLSVC

SEQ ID NO: 166443 - protein, 345 aa, Oryza sativa
  unsure (1)..(345): unsure at all Xaa locations
  Clone ID: PAT_MRT4530_65151C.1.pep
GIRHEGIITTSPHLSSRAPLPATAARDEGDRIGLGWIGEREWRRRRPSRPPTSPASPTSAAQASPPPPRRIRSSSASGAPAAAXQRVVAMAGSGKFFVGGNWKCNGTKDSVSKLVTELNAATLEPDVDVVVAPPFIYIDQVKNSLTDRIEVSAQNVWIGKGGAYTGEISAEQLVDIGCQWVILGHSERRHVIGEDDQFIGKKAAYALSQNVKVIACIGELLEEREAGKTFDVCFKQMKAFADSITNWADVVIAYEPVWAIGTGKVATPEQAQEVHAAVRDWLKTNVSPEVASGIRIIYGGSVNAANCAELAKKEDIDGFLVGGASLKGPDFATIINSVTSKKVAA

SEQ ID NO: 166444 - protein, 63 aa, Oryza sativa
  unsure (1)..(63): unsure at all Xaa locations
  Clone ID: PAT_MRT4530_65152C.1.pep
KLLYITXGWFLGQKHLQQAQGKEHQARGAPLSFTIAAKAHSCIIYYNHRVFRSHMQITHEASS

SEQ ID NO: 166445 - protein, 343 aa, Oryza sativa
  Clone ID: PAT_MRT4530_65153C.1.pep
MFPPGNNSLALSAPRPGMELANIQQHPNQALGPGGKQRTSSLEAPIMLLTGHQSAVYCMKFNPAGTVIASGSHDKDIFLWYVHGDCKNYMVLRGHKNAVLDLQWTTDGTQIISASPDKTVRVWDVETGKQVKKMAEHSSFVNSCCPARKWPPLVVSGSDDGTAKLWDLRQRGAIQTLPDKYQITAVSFSEAADKVFTGGLDNDVKWWDLRKNEVTEYLKGHQDMITGMQLSPDGSYLLTNAMDNELKIWDLRPYAPENRNIKTLTGHQHNFEKNLLKCSWSPDNRKVTAGSADRMVYIWDTTSRRILYKLPGHNGSVNETAFHPTEPVIGSCGSDKQIYLGEL

SEQ ID NO: 166446 - protein, 59 aa, Oryza sativa
  unsure (1)..(59): unsure at all Xaa locations
  Clone ID: PAT_MRT4530_65154C.1.pep
HEEKLFEDGVXKREDLFITSKLXWCDCHAPEDVPESLDKTLSDLQLEYLDLYLVFILFS

SEQ ID NO: 166447 - protein, 90 aa, Oryza sativa
  Clone ID: PAT_MRT4530_65155C.1.pep
RLNEACFACHVYTNWLSTYGLGLYDQPILVYMLLEEVRADRRETVLSAEDTHKATALYITIDICVTCLSTSDTEVRARPDLTFCRAADLF

SEQ ID NO: 166448 - protein, 42 aa, Oryza sativa
  Clone ID: PAT_MRT4530_65156C.1.pep
HICICQNVRVRLPVSQYLVAKCLDSRCSIPLTLCHMHMCGRV

SEQ ID NO: 166449 - protein, 58 aa, Oryza sativa
  Clone ID: PAT_MRT4530_65157C.1.pep
KQLNNLPPWSKNNQELGKGKGFTLNGRKGPNAKGKPRGLIPIPGLTYKTGPTPLTKKP

SEQ ID NO: 166450 - protein, 70 aa, Oryza sativa
  Clone ID: PAT_MRT4530_65158C.1.pep
SKANHATMLAKQLEHKFTCYSHTVHPCIIIHRIYCTCIHTRFRSHRTIGSYKACVHNIRYTSIYRIQQRT

SEQ ID NO: 166451 - protein, 53 aa, Oryza sativa
  Clone ID: PAT_MRT4530_65159C.1.pep
GLNEYFACVARTMDVSSESLAYESCDRERKNCMDHLDLREDGGTIGLIELSHL

SEQ ID NO: 166452 - protein, 156 aa, Oryza sativa
  unsure (1)..(156): unsure at all Xaa locations
  Clone ID: PAT_MRT4530_6515C.1.pep
CRPTRLLPTKPPRGPATSDAVAVMAATLEKGGGWRVGRNLAERGGRGEGPAAGLPAAAXAPLHLSPRARGPAPAARSPLRSAGRALTCRRRRSAPLPARSLQRSPATRSWPLTLPAQAETAPPRPAADDVVAAATTAASPVAGHLPSRPLASLSPA

SEQ ID NO: 166453 - protein, 402 aa, Oryza sativa
  Clone ID: PAT_MRT4530_65160C.1.pep
MRKQPQPQGNRRLRWLRALLLALPLLSVPVLYAALGAARPAAPPRRGAAPHQLPPRLAYLVSGGAGDGPRIRRMLRALYHPWNFYLVGVAGEEERADLEAFVRGEEAPRRYGNVRVAAAGEWGPVSRRGPTELAATLHAAAVMLREFDGWSWFINLSASDYPLMPQDDILHIFSYLPRDLNFIEHTSNIGWREYQRARPIIVDPALQISNKTEVVTTKEKRSLPSAFKIFVGSSWVILSRSFLEFCLLGWDNLPRTLLMYFANFLASSEGYFHTVICNSKYYQNTTVNNDLRFMAWDNPPRTLPVNLTTEHFDAIASSGAPFAHSFANDNPVLDMIDTKLLRRAPERFTPGGWCLGSSVNDKDPCSFFGRSFVLRPTKSSAKLEKLLLKLLEPDNFRSKQCI

SEQ ID NO: 166454 - protein, 73 aa, Oryza sativa
  Clone ID: PAT_MRT4530_65161C.1.pep
THKRKADQPASRLTTGSPHQSTYNINRHPNGKQASAKHPQFNNKDDARVKCTPGYPRQGGTRRNAPLRGHRPR

SEQ ID NO: 166455 - protein, 140 aa, Oryza sativa
  Clone ID: PAT_MRT4530_65162C.1.pep
LQICFWCSECIPPPFTYFLIILVFLTVPHFCVLWKLNASQRLKELHAKEPPSEGKMLRLSVEAGGCSGFQYSFSLDDKKNSDDRIFEKEGVKLVVDDVSYDFVKGATVDYEEELIRSAFVVSTNPSAVGGCSCKSSFMVN

SEQ ID NO: 166456 - protein, 81 aa, Oryza sativa
  Clone ID: PAT_MRT4530_65163C.1.pep
CYRLTYAMSINPIPDIVVAAPSTDPSQGEALHQSPILTRRQVGRPKEKPADPRIAIKRAVRCSRCKGYGHNKATCKVPIAA

SEQ ID NO: 166457 - protein, 96 aa, Oryza sativa
  Clone ID: PAT_MRT4530_65164C.1.pep
HKKRFNWEEQAPKKGLTSITSYQFGGAYQNWQTKRGRSSITLLGNLGLQNKNLVILVERENTNITLIGNFDIKQVIPSGGGQKSPIVLGLFQPKME

SEQ ID NO: 166458 - protein, 45 aa, Oryza sativa
  Clone ID: PAT_MRT4530_65165C.1.pep
LILLLYYYYLMITTSNLMFSYHIENLSTNLFEGILNFFKYLIFLY

SEQ ID NO: 166459 - protein, 60 aa, Oryza sativa
  Clone ID: PAT_MRT4530_65166C.1.pep
AARSQSSPSSSSLALAALVGLANLHRTATSLTKSSERGIDQPEQQVTVVVVGVRPSVALP

SEQ ID NO: 166460 - protein, 580 aa, Oryza sativa
  unsure (1)..(580): unsure at all Xaa locations
  Clone ID: PAT_MRT4530_65167C.1.pep
MTGTNQQKKERGTLVCSPYAMYEVILHLSPRQKEAIEGSGLGNLLKIDNIHIDRNLYNEIARSYDKEKKAFNINGTFVTMTLDDVDCLLGLPSKGDDIFEAPKINKPELFNLYKKEGQTTITLQALREAIINSSSYDDHFIRRFILFSIGSFICPTTQRYVRSEYLNLVDDVDKMRELNWSSLTLNQLLKGIIKFREKTTNIEGNVCLLQIWYWEKVRIDKLAATIYHSSRQRPLIQYWDKKXEKKRISYLFGQGKVVDDIRGTIHCNEIPDEKAHDNDSETRSNEDFQGTSEEVDAIXDVEQEQNDPGEHVSNHNEESYINQNVNMTSETKDNSNQSNQSRKRLTGPTGRTYKPTNRTDFIYETRGKKKDIIRTQAQTKKTIVYIEKEDLTQQIIDKNPPKNALRGQKKTKTNGQTPLKNSEELTKKEYPFITYINNTEDNKVMVHIEEVEVKRKKMKVLTQPAFLNDDVMDAYIQCLRYKEKGIRGDGKAFLEMAITTGLLNIFLPINIKDTHWYLAVLNAKRREVQILDSLAKPISKDRPDLRRVKEVKTFRQDLAGILINSELNNIKDRPLLPTTT

SEQ ID NO: 166461 - protein, 51 aa, Oryza sativa
  Clone ID: PAT_MRT4530_65168C.1.pep
MEAQRDKGVEAEGGGPAVGTRQRQRWRLAAADSGEARTAANGGEAKGKWQP

SEQ ID NO: 166462 - protein, 706 aa, Oryza sativa
  Clone ID: PAT_MRT4530_65169C.1.pep
MARCPKKYGPATWDNTGNSLKGSEIPVEPNPHPTPTPIPTKKDIGTLVCSPHAMYEVILHLSPRQKEAIEGSGLGNLLKIDNIHIDRNLCNEIARSYDKEKKAFNINGTFVTMTLDDVDCLLGLPSKGDDIFEAPKINKPELFNLYKKEGQTTITLQALREAIINSSSYDDHFIRRFILFSIGSFICPTTQRYVRSEYLNLVDDVDKMRELNWSSLTLNQLLKGIIKFREKTTNIEGNVCLLQIWYWEKVRIDKLAATIYHSSRQRPLIQYWDKKKEKKRISYLFGQGKVVDDIRGTIHCNEIPNEKAHDNDSETHSNEDFQGTSEEDVEQEQNDPREHVSNHNEESYINQNVNMTCETKDNSNQSNQSRKRLTGPTGRTYKPTNWTDFIYETRGKKKDIIRTQAQTKKTIVYIEKEDLTQQIIDKGPPKNALRGQNKTKTNGQTPLKNSEELTKKEDPFITYINNTDDNKVMVHIEEVEVKRKKMKVLTQPAFLNDDVMDAYIQCLRYKEKGIRGDGKAFLEMGIKTGLLNVEGAHVEASEPRDKRWIRDMACDYLPFDMIFLPINIKDTHWYLAVLNAKRREVQILDSLAKPISKDRPDLRRVLLAIERGLYGTENQHPQLKHDWPDFNITEWEYNKVQKLPKQGDGVSCGLYTLKFMEHWTGSYLLKIQLQKEVKTFRQDLAGILINSELNNIKDRPLLPTTI

SEQ ID NO: 166463 - protein, 42 aa, Oryza sativa
  Clone ID: PAT_MRT4530_6516C.1.pep
SCRPLYNDFYTLKWHGKTKPCSGFYYSLLNKKLFSMLIQLVR

SEQ ID NO: 166464 - protein, 199 aa, Oryza sativa
  Clone ID: PAT_MRT4530_65170C.1.pep
YIEKEDLTQQIIDKGPPKNALRGQKKTKTNGQTPLKNSEEVEVKRKKMKVLTQPAFLNDDVMDAYIQCLRYKEKGIRGDGKAFLEMAIKTGLLNVEGAHVEASESRDKRWIRDMARDYLPFDMIFLPINIKDTHWYLAVLNAKRREVQILDSLAKPISKDRPDLRRVKEVKTFRQDLAGILINSELNNIKDRPLLPTTT

SEQ ID NO: 166465 - protein, 1115 aa, Oryza sativa
  Clone ID: PAT_MRT4530_65171C.1.pep
MDKVKGHGKNVRSDIMSSSYVSLEDQEEYKIMGTVVFSSEEEGYKFYVDYAKGKGFSVRKNNLKRKDGEIIWRQFVCSCEGYRELKHFERTDRKREPRALTCCGCLAKLEIERNEEKGVHRVMSDSKKAQAVELRMSGLRAFQIMEVMENNYDELDEVGFVRKDLYNFFTRTYRVNKYNLPFIPFIGVNHHRSTTIFGCGILSNESVNSYCWLLETFLEAMRQVHPKSLISDGDLAMAKAISKSMDEEEFERRWADFKENGGTGNGQWIALIDVPTKGEVGSCLYRWEILVGIDADPLEKDAVRIYTAVVFKKVRAQIRLIAGLEVISGTNQDGSSLYVFGLKDDNEVWDEVRVTFRGQSLEEVSTLKRKGIIRFWQQRKDFKEISKDEYFAKNNEFATWSKEEKGKFFSDLSLESARDLFEKFVKTWNKGKLPSQYYEGITRGPRWVLQIAGEEASMKDRFVSPHRQTANRSHAIKNTVGHHDCEHAEIQPSTGTLVCSPHAMSEVILHLSPPQKKAIEVSGLGNLLKINKIHIYRDLCNEIARSYDKEKKAFNINGTFVTMTLDDVDCLLGLPSKGDEIFEAPKINKPELFNLYKKEGQTTITLEALRVAIINSSSYDDHFIRRFILFSIGSFICLTTQRYVRSGYLNLVDDVDKMRELNWSSLTLNQLLKGILKFREKETNIEGNVCLLQIWYWEKLRIDKLAVTIYHSGRERQLIQYWDKIKEKKRLFYLFGKGQVVDDIRGTIDCKEIPNENAHDNDSETRTNEDFVCTSEEVHSIISTEQSADITLQERIQESIQTLQDNFNDFTKDFWPRMRALILDCMENDSKCPERKDTTHVFEDVEQEQIDPREHVSNHNEEYYINQNENMTCETKDNSNQSNQSRKRLTGPTGRTYKPTNRTDFIYETRGKKKDIIRTQAQTKKTIVYIEKEDLTQQIIDNGPPKNALRELTKKEDPFITYINNTEDNKVMVHIEQVEVKWIRMKVLTQPEFLNDDVMDAYIQCLRYKVKGIRGDGKAFLEMAIKISLLNVEGVHVEASKPRNKRWIRDMARGYLAFDMIFLPINIKDTHWYLAVINAKRREKEVKTFRQDLAGILINSELNNIKDRPLLPTTT

SEQ ID NO: 166466 - protein, 83 aa, Oryza sativa
  Clone ID: PAT_MRT4530_65172C.1.pep
WTINHGSSNTSACSSCSILKPGETTCLCAAPWTFSSTTCHRGRGCPGTRPWKDVRCSCLRPVVMMLVLVLGERKSFQVNCRLL

SEQ ID NO: 166467 - protein, 234 aa, Oryza sativa
  Clone ID: PAT_MRT4530_65173C.1.pep
MRSKRNILFSVNQGTLVCSPHAMYEVILHLSPHQKEAIEDSGLGNLLKINKIHIDRNLCNEITRSYDKEKKAFNINGTFVTMTLDDIDCLLGLPSKGDEIFEAPKINNHELFNLYKKEGQTIITLQALWEAIINSSSYDDHFIRRFIIFSIGSFICPTTQRYVRSEYLNLVDDIDKMRELNWSSLTLNQLLKCILKFREKKEKVRIDKLATTIYYSCCQRPLTQYWDKKNVGTR

SEQ ID NO: 166468 - protein, 50 aa, Oryza sativa
  Clone ID: PAT_MRT4530_65174C.1.pep
HAVLCSMSLVIYISSECCKSNSENIIAKRLQPPNFSPSQDYEEGRYRSST

SEQ ID NO: 166469 - protein, 48 aa, Oryza sativa
  Clone ID: PAT_MRT4530_65175C.1.pep
TKYTQSIFMPSLFTSSTLTKISIIPHSYLTLSIWQTKLFNSIQIHIDI

SEQ ID NO: 166470 - protein, 361 aa, Oryza sativa
  Clone ID: PAT_MRT4530_65176C.1.pep
MEQFHDRDHVRLRSRVHGTYLHADEDGRGVSLQPTGASLTAVWTVHLEGGSPQRRLLLHSAAYGRYLAATGKPGPSGLRGHRVALINLDRLDDESVSWEAVRTAKGDDVLLRHATGRNLRANHGAGATVDDRYSRMLLWVDQVVEAIPSADSVPRPPPISRRQDGPEIRTIRFVPAAPNGTIAEDWRTFQFTGRSVQRLKEEITSRAGEATQYCVQAGRYGRLIPLTHELPHNTETIDIIIMMTGTTDPHMDNSPRTQLSAPESLGEHRVADIQTSYSHRLHTNNVLESQQRKTGITRAELELKTRNIHWGDLNLEEKKRTRKELKAEYNELLAAENCISKSQEDDVITNENYERASLRDP

SEQ ID NO: 166471 - protein, 72 aa, Oryza sativa
  unsure (1)..(72): unsure at all Xaa locations
  Clone ID: PAT_MRT4530_65177C.1.pep
SPHXXRESVVTILDRYEQLSSAFTNQXXYXXLXYIXSPPXQVYXSNTCTIDXXTPLXQITXXKLSRKGNFNY

SEQ ID NO: 166472 - protein, 65 aa, Oryza sativa
  Clone ID: PAT_MRT4530_65178C.1.pep
YSIKKEPMTGSIQSAQWNLALEWFKVYCSAIMHLSQSIQQNMQHKYIRFHADASGGSSINILDSR

SEQ ID NO: 166473 - protein, 161 aa, Oryza sativa
  unsure (1)..(161): unsure at all Xaa locations
  Clone ID: PAT_MRT4530_65179C.1.pep
SSSAGTATLEAAAPPWLGRIRVYHRIRCPRAVAAGEERGEEELRGSSNKTCARRPHASPACWICKGSRGGKGGAARRXRPSPPCXPSACDGCKGRGRAPRCPPPPXTPAVRRRHRPHASPPPAXDAKGGRGGAARRAVCRRKSAFCRCRRERVTKAGIQPK

SEQ ID NO: 166474 - protein, 121 aa, Oryza sativa
  Clone ID: PAT_MRT4530_6517C.1.pep
MSSSEPKPLHCLLRRGSKLPEPEPLLNLPLLRESISIPADEPDTTKHKRASGHCPRSSRSPNNIGSGRRHGHNDGSVEERWWHGPSGDDAGRGSTGSLLELTLWRRRPPRAHTSDLAEEAV

SEQ ID NO: 166475 - protein, 185 aa, Oryza sativa
  Clone ID: PAT_MRT4530_65180C.1.pep
MMMMMMSAASSPSCLLLLPRPTKPTPPLLPSTSSCRRPPRCRIRSLRPENPAPPAAGVARAVASSSSPMEMEAAQTQACGGGEGQQEAMRLLFVEMGVGYDQHGQDVTAAAVRACRDAITSNSIPAFRSGSIPGVNTEQMKLQIKLGVPRPTQHLLDVERVKAVFPYGKIISFEVVDGGMICSSG

SEQ ID NO: 166476 - protein, 78 aa, Oryza sativa
  Clone ID: PAT_MRT4530_65181C.1.pep
SQLLLQVVNHPKVLCPPVATVAVPLTSVPRRVATIGAVVVWAIPVSDSGIMSPPSAAAAALEGVVGWRRATRTLGEEE

SEQ ID NO: 166477 - protein, 99 aa, Oryza sativa
  unsure (1)..(99): unsure at all Xaa locations
  Clone ID: PAT_MRT4530_65182C.1.pep
MKAKLVLSCAGHPRFEFHESTKIDYAISFCTRASNLTXTGTMEKVTANGNFIDTGNWKLNGALWNQLDRAGIEAMDDILALEATTAGNSAKLVALSALR

SEQ ID NO: 166478 - protein, 431 aa, Oryza sativa
  Clone ID: PAT_MRT4530_65183C.1.pep
MEEETAVADWSALPEDIIITVMGCLSVLGDLVRSGAVCSTWRDAYATFRRLHLPSTTAQPPWLLYACDAHGPAAAALYCPATGKSLRVPLPAALLDGRPVIGASQGWLVTVDEAPNLHLVLVNPITGATAALPPITTLHNVERFTSKKGKTRYRVYDDMGYSEASLEYSPAQAREWVYHQVVLSRSPAEGSACVALLLHRPDGYVSFARLGDERWTPVAYPGQDCSTGCRHAIYDDADGLFYTLRYDGSVYAIDVPRAAAASSPPATREVMRSVTNADNGSKYLVRVPCSGDLLQVWRFVDYDDGDEVEEDEDAEDLPLGTKHLQIFKVDGGEQKLVEASAASLEDHVLFLGHGFSACFPAEHFPALKPGCAYLADDHELVSVSKHCRRDIGRWDMKRGQMERLSGEDDVAAPSQPWLNWPSPVWITPTFY

SEQ ID NO: 166479 - protein, 310 aa, Oryza sativa
  Clone ID: PAT_MRT4530_65184C.1.pep
WGIWPTPTTSSAPAPSAPPGAPRTPRSGDSACRPRRHGRRGCSTPATPTAPPPPRSTAPPPASPSVSRSRPPCSMDGPCSARRRGGWSPSTRRPTSISFSSTLSPAPWRPSRRSPASTTSRGSRAERARRGTGCTTTWHTTRRPLCTRRRRRGNGRTTRWSSRAAPPRGAPASRSSCTGPTAMSGGRPSRTRDRRAPPPVATPSTTTPTASSTRCGSMAPSTLSTSHAPHPRRRRRRRRRRRERFGGSTTPTATTSKTTKPDSSPDNCRSSRSTAVSRSSWRRRRRAWRIMSSSSATSSRRASRLSTSRR

SEQ ID NO: 166480 - protein, 143 aa, Oryza sativa
  unsure (1)..(143): unsure at all Xaa locations
  Clone ID: PAT_MRT4530_65185C.1.pep
WLRYIESSLKIIHFFEATIQSNPFDIPSILGYTLYTDTVYLRVYGCFLYALRKFITKXETESTDRREPTRTGLGRYYIVRGLISPSPTWRSTDPRYKRDPPGGPKASNLIAKITATAYEVGAYRSQVAGXSSRTNSTTVSSVL

SEQ ID NO: 166481 - protein, 39 aa, Oryza sativa
  Clone ID: PAT_MRT4530_65186C.1.pep
RKECKKAKRKCVKTMESEVAKLRVITTTAAINVKIQGES

SEQ ID NO: 166482 - protein, 404 aa, Oryza sativa
  Clone ID: PAT_MRT4530_65187C.1.pep
MGSSATPSTAASAPGRRKVALYLALLTLQYGAQPLISKRFVRQEVIVTTLVLSIEVAKVWLYVQSFYWWQKNSLLQISYKNLDSLTFSILNQTKLLFTAFFTYLILGFTMFESNTWESCKSQLATIKHKGDDGVVLLRIRKTAEERKMIVDLSSSSRIAAMPYPCVDQQDVHIDHVWQKQSPKQIFALTLLIAAAVLLSIGESSSKGSGGGNSDYILLYGIIPVTVASVLSGLASSLCQWASQVVLVIVLSMKHPIAIVDPFNKTQVKKHTSYMMTIEMSFIGSMCLLASTSQSPDGEAIRKHGFFHEWTLLTVVPVLMNAVGGILVGLAIRLFLPSWYCYYFLNPLPYQTIRLFLPSWHCYYFLNPLPYQAIRLFLPSWHCYYFLNPLPCQEASSLDSCTPRL

SEQ ID NO: 166483 - protein, 99 aa, Oryza sativa
  Clone ID: PAT_MRT4530_65188C.1.pep
METWTEEVVVAVVYEIRGETMPLDSERPTPAKARAPLKYTIDLAQPLSENNARVSDIVRRKRETAQSCAATVARSATDDCDCLLFFFFASTIASNLRIY

SEQ ID NO: 166484 - protein, 159 aa, Oryza sativa
  Clone ID: PAT_MRT4530_65189C.1.pep
MGSSATPSTAASAPGRRKVALYLALLTLQYGAQPLISKRFVRQEVIVTTLVPSIEVAKVICAVILLVAEGSLKKQFNNWSITRSLTASGLPAAIYALQNSLLQISYKNLDSLTFSILNQTKLLFTAFFTYLILGQQQSPKQIFALTLLCAAAVLLSIGE

SEQ ID NO: 166485 - protein, 359 aa, Oryza sativa
  Clone ID: PAT_MRT4530_6518C.1.pep
MASCGFEGFEKRLELVFELPASGGEVARHGLRLLPAEALREVLDAAQCAVVSAAGNAAADAYVLSESSMFVYPGRVVLKTCGTTPLLRAVPVLLRAAAALRLRLRSCRYSRGEYLFPEAQPFPHAHFADEVAYLDAALPRELLRFRRSAVMPSSSSSSPGASHRWHVYSASSSASSSDADGAARLTAEVCMTELDRGMAARFYQRPGDGRTSHAIGDEMTAASGIGGVVDENDPRSLVCAYAFAPCGYSMNALDGARYATVHVTPEDGHCYASFECATDDAAAALAAIRRAVAAFRPATVSVSISHTSSAASSLCTPVAEALEPLGLACHCRAAEVFPGAGTVTYQTFTAPATKHEHDN

SEQ ID NO: 166486 - protein, 68 aa, Oryza sativa
  Clone ID: PAT_MRT4530_65190C.1.pep
TRGRGGQASLQPAPVLNVYWSEVGRSRCLDHSITRSHLALQELSFAVNCHIAESISSSVLFFFFCWVH

SEQ ID NO: 166487 - protein, 76 aa, Oryza sativa
  unsure (1)..(76): unsure at all Xaa locations
  Clone ID: PAT_MRT4530_65191C.1.pep
XVSXRXSXSGAXXXHQXXXXCCXSNTQXYSEXXGSXPIGTNKXXXXXFPMXGXXXEDXXYXXMXFNXFYXDLSFGS

SEQ ID NO: 166488 - protein, 66 aa, Oryza sativa
  unsure (1)..(66): unsure at all Xaa locations
  Clone ID: PAT_MRT4530_65192C.1.pep
IAKSGRATRGTRTGXGEHGVRPGWRWEDRGVGNNADGGQIRHQVPPAQVHLQWYFDFEQXHYPGGS

SEQ ID NO: 166489 - protein, 115 aa, Oryza sativa
  unsure (1)..(115): unsure at all Xaa locations
  Clone ID: PAT_MRT4530_65193C.1.pep
VYPLPFDIRHISIWHVHVFMNDPLPTWRKSFMEFTDGKNPTRTRLGHQCIVXGPMSPSSIWKPPDLRYKRAPLRGPKASNLIANTTTTTYEVRACRSQIAGRSSRTNSITISSVS

SEQ ID NO: 166490 - protein, 198 aa, Oryza sativa
  unsure (1)..(198): unsure at all Xaa locations
  Clone ID: PAT_MRT4530_65194C.1.pep
GRRRRRRRRRPTFRSPRRPSSCASSGSSHPRRPRRPARSXRRRGSLWRRRQPRRARLLRRRGQPQRQPRRTGGGLLLPPRRLRPRLARRRSRRPPRRRQRRLPRRHQAHPRRAGELPCNSLISKFLNNGGETTARWTWLTSWSPTLRRAASRISASALSPAGSPPPPPPPPRSRPAASCGSGICSASSTPRRGSPQCT

SEQ ID NO: 166491 - protein, 52 aa, Oryza sativa
  Clone ID: PAT_MRT4530_65195C.1.pep
MSHITGRNLLIVLEWDADFVRALSERQASERQKQTAGGRNMYCKPSEQNPNI

SEQ ID NO: 166492 - protein, 57 aa, Oryza sativa
  Clone ID: PAT_MRT4530_65196C.1.pep
KALHHPPAERGARLQQLPGGPPSAAHSAWSSATTTTSGDDDGNAKRERSEALILVAS

SEQ ID NO: 166493 - protein, 87 aa, Oryza sativa
  Clone ID: PAT_MRT4530_65197C.1.pep
MTGDEIGGAQRSKNVQNPEGFRVDSGVGSDITISQAHREGSSPTRRQHDCAGRSGRQGRAGEGEKTDDFLDEPYAADAHTFSKLTSY

SEQ ID NO: 166494 - protein, 84 aa, Oryza sativa
  unsure (1)..(84): unsure at all Xaa locations
  Clone ID: PAT_MRT4530_65198C.1.pep
XSMXQQKGGXXKVVXXCXSKEXKNSKXXAXIPXDVXSGEXKNIPINILTINQLIPINNFCSDTVSCCSGEQIGLVNIQCTPILS

SEQ ID NO: 166495 - protein, 80 aa, Oryza sativa
  Clone ID: PAT_MRT4530_65199C.1.pep
MTTTSPPMPPMLPSSSSSLRDLLEQERCESHALAAAPRRARSGRHASPPPQRVAPEEEDDGGGGAAAVGAVVAMLSGYVG

SEQ ID NO: 166496 - protein, 104 aa, Oryza sativa
  Clone ID: PAT_MRT4530_6519C.1.pep
MDSTQEQQQDFGVLLKQGAEGRVFVSTFVGRKCVIKERFSKKYRHPLLDSKLTLKRLNAEARCMTKARKLGVPTPVLYAVDPLLHTLTFEYVDGLSVDGVLLIW

SEQ ID NO: 166497 - protein, 261 aa, Oryza sativa
  unsure (1)..(261): unsure at all Xaa locations
  Clone ID: PAT_MRT4530_651C.1.pep
MAEHHLPPEPADEPHHHNHGGKAAVHADDLKPGGRRRRYGYYYGDGYGSADPARTLCFVVLVVILLAGITALVLYLVYRPSRPAFAVTSVAVYSLSLNGTGTGTGAVAGGPATLAASFQLTLVIRNPNERSAARYDXLAAYVAYPRGSPSTAPAPXPPLVQDADSAVAVAPVLGAGAAAPPVPVSPDTAAALATDVSYGVVALRVVVLGRVRFVSGPFRSGWHSMYARCDLLVGVRKSGGGGAGGGPEAPLLGNPTCAVDM

SEQ ID NO: 166498 - protein, 436 aa, Oryza sativa
  Clone ID: PAT_MRT4530_65200C.1.pep
MALVVLLISLLAPPSAPGSAAAAAQPPPPVTAATLVYLESPTDTPGQKLVGALLDAAVFVALVAVVTFVLVALYYYRCTGFLKNYMRFSAFFVLFSMGGAIAAAVLRRLGAPLDAATALVLLFNASAVGVLSVFASAVPIVVRQGYMVALAVIVAAWLSRLPEWTTWVMLIALALYDLVAVLAPRGPLRMLVELASSRDDELPALVYESRPTVGPASGSSSYASAMGSVEMQPVADPGRSGGNQYDRVEQEDDSSRAVVEMRDVGGSRSSIRERNLEREAPMAVSVSGHSSNQGGSSQHAVIQIEQHEEGETVPLVSAASANNAAPNEEHRENSSSDSGMEFEMFESTRGIKLGLGDFIFYSVLVGRAAMYDLMTVYACYLAIIAGLGCTLILLSICKHALPALPISILLGVTFYFLTRLLMEPFVVGSSTNLVMF

SEQ ID NO: 166499 - protein, 740 aa, Oryza sativa
  unsure (1)..(740): unsure at all Xaa locations
  Clone ID: PAT_MRT4530_65201C.1.pep
SLLVVIFFFFFSILIDITMITGLDVTSSANPMSLNTKNXFDFRTKSIGGWSGYVAAYMGKGSVTPREHTAFLLMWLEKFLFCRSSYGPTTNWQFLAKALETKRQFPLGKILLGYLYQTLSNASAKIATGSVVGAGVPCMKVVNRPPLTEAEFPRLEPTTNDDGEEVTHRRCLSYGEAASTPADSGAKLSAELLKDWFCSFYEGFQRDAQVWFPYEDSVNFDLPSDFRFEDINSKKFYXSKEVFSAAISPCILSVDIHQGRNIQVSYEFYHPISSARQFGMGQLPIGLFFADKIQCRGEISSMLMIDRLINIPGPPLGSIXNIELARFRSKNLDRWWGEWKQHIFHQPASMYMTDLYPDVVPQTAESSPPRKSNRGRDIEYAPSLLPNGGGLAPPVIGYHAPRTSSLLQGQMREPADVGRKRKTKTSAIDPSALAPKKKTKKDKPKPADDLPALDPSIEQALDEEEIGEDVDXAVAELSEGEKTPLASRKQTAPTPAAPAHFSRPPPPPSPHVQQMSSDRTPSATGSHHVEEEEQPAAPAIPVLADLFSFDIQDYFDETEEETTSKALAPLDETVKKTLEDISLRLESSLDNLVAGCGSIRAQFAKIQALIPDDLANTITPAVYLEQHQXEATIQANRQVVHEEKAKLDQLSVGPIQSNXLIAQLEECSAKLDLEMQKLANLPSAVEEHKSRLRSAIKNVADMTKSLKVISGTDAQDIQAIEEVDQIRQRAMSAIQRYLSG

SEQ ID NO: 166500 - protein, 764 aa, Oryza sativa
  Clone ID: PAT_MRT4530_65202C.1.pep
MASRSSRGERVGVVFVLVVVVLCVDVSTLVAAQPLVSSQAKTLLWVRRLLGFPPALDALAGAPDACALPPTPSLTVACAGGQVTELSVLGGRAPGAALPANFSADALFTTLTRLPALSRLTLASLGVWGELPGAKLHRLQALRVLNLTGNCLYGAVPEHFSRMYSLQSLVLSRNRLNGAVPNLSGLAFLDELDLGHNRLGPAFPEVGNAVVRLVLADNNFTGRIPAAMSSLGQLQFLDVSGNRLQGWIPSSIFALPALRHIDLSRNQLAGQLPASTACADALAFVDVSDNLLAGARPACMRGNSSARTVLDAGNCFRDARSQRPSTYCNPGALAAVLPPAQGTGGEQGSGGKGGQVGMALGIVGGVVAGAALIALVMMAVLRRARRQNPEVSVLPKSPLASTPAAKKKAAADGGKAPAKVTQRIVTPAEKRHASQAARVNTLEVPAYRVYTLEELQEATNNFGSSNLIKSSPVVKHYNGQLQDGSRVSLRCLKLKPKYSPQSLTQYMEIISKLRHRHLVSIIGHCIVEDQENPNIASSLCLLSECVTNGSLRSHLTEWRKREMLKWPQRVSAAIGVARGIQFLHDVTAPGIVHNDLSIENILLDKTLTSKISNFNLPLISTSKNGKIFSESPFATSEDNDLGSVPSTEQGDKDDIYQFGLILLEVITGKPTESPKDLDSLKTQISEAIAEDPDLLKDMADPTIRGTFAVESLSTVAEIALNCIASDTSSRPSIEDVLWNLQYSMQVQDGWASSESLSLSTRSQG

SEQ ID NO: 166501 - protein, 425 aa, Oryza sativa
  Clone ID: PAT_MRT4530_65203C.1.pep
MERVFSVEEISDPFWVPPPPPQSAAAAQQQGGGGVASGGGGGVAGGGGGGNAMNRCPSEWYFQKFLEEAVLDSPVPNPSPRAEAGGIRGAGGVVPVDVKQPQLSAAAAAAATTSAVVDPVEYNAMLKQKLEKDLAAVAMWRASGTVPPERPGAGSSLLNADVSHIGAPNSIGGNATPVQNMLSGPSGGSGSQLVQNVDVLVKQPTSSSSREQSDDDDMEGEAETTGTARPADQRLQRRKQSNRESARRSRSRKAAHLNELEAQVSQLRVENSSLLRRLADVNQKYNDAAVDNRVLKADVETLRAKVKMAEDSVKRVTGMNALFPAASDMSSLSMPFNSSPSEATSDAAVPIQDDPNNYFATNNDIGGNNNYMPDIPSSAQEDEDFVNGALAAGKIGRTASLQRVASLEHLQKRMCGGPASSGSTS

SEQ ID NO: 166502 - protein, 46 aa, Oryza sativa
  Clone ID: PAT_MRT4530_65204C.1.pep
FIILGVLILQITTIQITINHQPIFSNLSFNKQKYYLSYLHTLPHHS

SEQ ID NO: 166503 - protein, 138 aa, Oryza sativa
  unsure (1)..(138): unsure at all Xaa locations
  Clone ID: PAT_MRT4530_65205C.1.pep
AECVLDVVRLHGGMXVMGGRLVFFXPALSASIGVAKPAKYPERPXFRLFASCEQIMSIRFIWVLLXTMVEESVPYTTGXVMKLAEEWHLEFRENHYKWMEEGNILFAVVSAVDQAASRSVGKPAIYWIFKRKYRVMYV

SEQ ID NO: 166504 - protein, 186 aa, Oryza sativa
  Clone ID: PAT_MRT4530_65206C.1.pep
MGISKVIGIAGTSLLVTSVGLWKIGLRIVAVPFLATSTIAYIIAVASHNSINIPWMLGKNSKGRFPIWSSVLFGPFLILARVYATMKRHMRKKEAVYNMITEGVYLGGWPFMLKHLPPGDPSVIDCTCHGRSACVVCAVLVALGIAENWKDAENIIREKRKIKMNAVHRKTLDDWSKYRASQKKDK

SEQ ID NO: 166505 - protein, 239 aa, Oryza sativa
  Clone ID: PAT_MRT4530_65207C.1.pep
MGISKVIGIAGTTLLVTSVGLWKIGLRIVAVPFLATSTIAYIIAVASHNSINIPWILGKNSKGRFPIWSSVLFGPFLILARVYATVKRHMRKKEAVYNMITEGVYLGGWPFMLKHLPPGDPSVIDCTCELPRSDFVPTNEYLCVPTWDTRAPTISQIEFAACWACEKRAKGKPVYVHCAFGHGRSACVVCAVLVALGIAENWKDAENIIREKRKIKMNAVHRKTLDDWSKYRASQKKDK

SEQ ID NO: 166506 - protein, 121 aa, Oryza sativa
  Clone ID: PAT_MRT4530_65208C.1.pep
MAECRQGQAQRRHLVPPEEGHRQRHAFAMDIIRARRQSASVQDRDDVLSRSSGLSWFFWLLSSQPDVMARIADVVHVVRKATGACPSELFGFDALREMHYLHAVLMESMRLYPPASGVRGG

SEQ ID NO: 166507 - protein, 663 aa, Oryza sativa
  unsure (1)..(663): unsure at all Xaa locations
  Clone ID: PAT_MRT4530_65209C.1.pep
MLEDHRTSLYPGCEQGHKKLDTTLEFLQWKAKNSVSNKVFGDLLKLVKNILSEGNKFPETTYEAKKIVCPLGLEVQKIHACLNDCILYRGEEYEKLEACPVCKALRYKIRRDDPGEVDGQPMKKKILAKRKYIMMPIIIQGAKQHGNDINVYLRPLFKDLKLLWKKEGVSVWDEDKHEEFNLRALLFVTINDWPTLSNLSGQSNKGYKACTHCMDETESTYLKHCRKVVYIGHRRFLAANHPVRKKGKHFEHKADHHLKVVFGKGPGSQPIESEDSHAAMWKKNSIFWELPYWEFLDVRHAIDVMHLTKNLCVNLLGFLAVYGKSKDTLEARKDLKHIEQRGDLHPEPKEKGSHYLSPASYTLSKAEKEKIGILGPVYLHNMFPFKRYMSVLKNYVRNRARLEASIAKGYGAEEVIEFCVEFIEDLRPIGVPESRHKGRLQGKGTLGRKAIMTVDNNLFRKAHFTVLQQSSLVAPYIEEHLALVRARNIAQDMKSTNQNSAIHIDAMGHDGTTGTXTVPSRTYGNLTMDLSRLTGGGVTIDDSGMSTVDLNKVGYSDEPFILANNVTQVFYVKDMSSKGKKGKGPDEPKRHVVLPGKRKIVGVEDKIDEDYDQFDGQPSFTVRIDASILLSNEDTLYSRSDHKEGTIVRRKYVWSTVTVDVLP

SEQ ID NO: 166508 - protein, 859 aa, Oryza sativa
  Clone ID: PAT_MRT4530_6520C.1.pep
MSSSEPKPLHCLLRRGSKLPEPEPLLNLPLLRESISIPADEPDTTKHKRASGHCPRSSRSPNNIGSGRRHGHNDGSVEERWWHGPSGDDAGRGSTSGRQKMRTTAPPSYGSREALLPLRRLPCRLRIDLGGAASLSSSTPSSTFYLPHCCCHAVAASSSSRCGGGDLPEPTRRIWPKRRSRRWRPQALAVVAEKLEERSGNFGSITGQCVPVRPVVIERSDRPAREFFDLCFTGFRRSNWQLTGGQTGGIAAVRPAGARRSDWRRRQAQQAISAVRPEIQHRSDRWHPLGQTGRTTSVRPTSVDFEAWERQKEDKDGEKTNNNNKPKGTFKGRKIKENLKKAFDQVYAAFEPLSDVDGDSGDEDKGKNISVVCFMARGESYSECEDNEALMARKENMWIVDFGCSRHMTGLVKRHTGGQTGGIAAVRPAGARRLDRRWQQGRQAIPGRSDREINTGRPAASERSCDGRARQRARTAAERRRAERAAAGFGQSGGSCGAKLGTVGSAAATAAIREAAETMASPDPSSTVVEVLHGMTIPIELSNHKTGLTNSSRRQSLTRRPRPSCPSRGRFLAAPAANAASSPPLFGITSSLAQAVDRRRLVASSALCHHPRRVGTARACGIGGGRTAGEEEEGRALLHPTRRRRTLMSPGGAMAGEAATGERGGVRSDDGRRDGGRSGDGRARRAERRRASVAACGATTGGATACGATTGGATAGGAATGERGPLSSDAGTAVVTAEEGFGEAMVAAAAGTAVVMAAEPTVRPAARLLPGQAKGDQMRGNLNHRRRLRLKRKSMEAGKQRPLSQDFQERTTGPYFVPPMEMIRCGEMKQIRARTINGGGVLLSVLGRGFVGGARAWTA

SEQ ID NO: 166509 - protein, 84 aa, Oryza sativa
  Clone ID: PAT_MRT4530_65210C.1.pep
MIVTDLCGLGRHRKFRTNMFSLFSMNKRMKRCIFDELQIPSPNLANFGTPDELRDSCSRFSSNSDDLLFFFGAGDTLDFGEGSY

SEQ ID NO: 166510 - protein, 69 aa, Oryza sativa
  Clone ID: PAT_MRT4530_65211C.1.pep
PSTFSNLLYCYSVLKQPIFLSPSFLTYNRLEWSTSVMNRKGVVNRSLWRPRITKNVFKTLSDNKLVIIP

SEQ ID NO: 166511 - protein, 763 aa, Oryza sativa
  Clone ID: PAT_MRT4530_65212C.1.pep
MSEFLDLELQDGIRMPWNVIPGTKQDAANCVVPVSAIYTPLRPNPAIPVLPYGPLRCRMCRSILNPFCVVDYVAKIWVCPFCFQRNHFPQHYSSISESNLPAELFPQYTTVEFMSTAETGPVVPPVFLFVVDTCMIEEEIDYLKSALAQAIELLPDQSLVGFITFGTYVQVHELGFGLLPKSYVFKGTKEVTKDQILEQMCFFAGKTKPTTGVIAGSRDGLSAESISRFLLPASECEFVLNSIIEELQKDPWPVSADQRASRCTGTALSVAASLLGVCVPGSGARIMAFIGGPSTEGPGSIVSKSLSEPIRSHKDLDKGSAPLYTKAVKFYEEISKQLVHQGHVLDFFACALDQVGVAEMKVAVERTGGIVVLAESFGHSVFKESLQRIFQSSDNDLGLSFNGIFEINCSKDVKIQGIIGPCTSLEKKSPLSSDTVVGQGSTSAWKMCGLDRKTSICLVFDIAKKDGPDAISQSTSNQFYFQFLTYYQHHEGQMRLRATTLSRRWVAGSGGVQDLIDGFDQEAAAAVMARLVSFKMEAEADFDPIRWLDRALISMCSKFGDYQKETPSSFSLSPRLSIFPQFMFNLRRSQFVQVFNNSPDETAYFRMMLNRENVANAVVMIQPSLISYSFQSGPEPVLLDVTAIAADRILLLDSYFTIVIFHGITIAQWRKAGYQDQQGHEAFAQLLKAPREETDSIIKERFPVPRLVVCDQYGSQARFLLAKLNPSVTYNSDNPPPPGGDVIFTDDVSFEVFMDHLQRLAVQ

SEQ ID NO: 166512 - protein, 79 aa, Oryza sativa
  Clone ID: PAT_MRT4530_65213C.1.pep
PNLGEAHLPKSQHFGPTVLVTSPPLLGLLDLWLAMVQACTNPHKWGILVQPTPAEQQSILFPVSISIIHHTLCLCPHIS

SEQ ID NO: 166513 - protein, 57 aa, Oryza sativa
  unsure (1)..(57): unsure at all Xaa locations
  Clone ID: PAT_MRT4530_65214C.1.pep
LASSLLFSGDPPAAMDLDKSTSTTASMKKLQDDGALPGRGTMXRETGGIKPEPVLGR

SEQ ID NO: 166514 - protein, 68 aa, Oryza sativa
  Clone ID: PAT_MRT4530_65215C.1.pep
MAQEAAAKRDTHMWVHLPPHNSVKPISYKCTPSTVFLTPASYRATTSGDWRCAVLSSSSPAITLDRSK

SEQ ID NO: 166515 - protein, 73 aa, Oryza sativa
  unsure (1)..(73): unsure at all Xaa locations
  Clone ID: PAT_MRT4530_65216C.1.pep
MAPSVMASSATTVAPFQGLKSXAGMPVARXSGNSSFGNXXNGXRISCMQXXXIEXXKXFXTTLFTWPLYLFLF

SEQ ID NO: 166516 - protein, 428 aa, Oryza sativa
  Clone ID: PAT_MRT4530_65217C.1.pep
GSPPGAGPSPPSDGSNDGDNRGRITDETRDDEFDESPSRLDPLKFDDVKSITLRRSKLVKWFMEPFFEDLVSGCFVRLGIGKSKSGTPDYRLCIVRNVDANDPDRKYKLEGYTTCKYLNVVWDNEANAARWQMTQVSDSFPSEEEFKKWLQVAEKNGVRVPTRQDVLEKKEAIQQAYNFVYSAHTVQKMLKEKKSAIRRPINVAAEKDRLRNELDMAIARRDEAEAERIRSKLNQLQKMSKPISNNEKAAKLEAMNKKNRAENFKNASEMKPVNTSLKVGEAGYDPFSRRWTRSRNYYAAKPEGESAEVPNGNDGSAVAGDEDTKNGPRGGSAATAAALVAAADAGKLVDTNAPVDLGTESNLLHNFELGISLAGLEEFGGPKGLFDGYMARKQKIEATMGYKVPDNDGRRHALTLTVSDYKRRRGLL

SEQ ID NO: 166517 - protein, 47 aa, Oryza sativa
  unsure (1)..(47): unsure at all Xaa locations
  Clone ID: PAT_MRT4530_65218C.1.pep
YITXVHKLNLHLNYCKFYHMCILSSHFXYRHXCFSHMRTDAWVDPGI

SEQ ID NO: 166518 - protein, 90 aa, Oryza sativa
  unsure (1)..(90): unsure at all Xaa locations
  Clone ID: PAT_MRT4530_65219C.1.pep
MEDDDAGGGGGGGEASPPHAGSAAAMAGAGRDIAASXTSSRSVTQTVNGSHRFVIQGYSXAKGXGVGKHIAKQNVHGWEGTNWAILXFNP

SEQ ID NO: 166519 - protein, 155 aa, Oryza sativa
  unsure (1)..(155): unsure at all Xaa locations
  Clone ID: PAT_MRT4530_6521C.1.pep
LKRQGRYSRRTHRPNRRNGFPSSMATPGVTGAVVXDSAVVLAKFLERAVKSVRLALRDARALELGVGCGLAGCVATLFGVHVLLTALPDRLKLLRKNFYLNVGDDARGSALVAQSYPLPLLLLLFFFSFPGIPTSISMNLPSSRNNRKHTHGSLE

SEQ ID NO: 166520 - protein, 432 aa, Oryza sativa
  unsure (1)..(432): unsure at all Xaa locations
  Clone ID: PAT_MRT4530_65220C.1.pep
MEDDDAGGGGGGGEASPPHAGSAAAMAGAGRDIAASPTSSRSVTQTVNGSHRFVIQGYSLAKGMGXCGKHIASETFTVGGYQWAIYFYPDGKNPEDNSAYVSVFIALASEGTDVRALFELTLLDQSGKAKHKVHSHFDRSLESGPYTLKYRGSMWGYKRFFRRTALETSDFLKDDCLKINCTVGVVVSTMDYSKPHSIHVPESDIGYHFGTLLDNQEGVDVICNVAGEKFHAHQLVLAARSSVFRSELFEHESDEEKNEVDTSNEIKEIVIDDMEPKVFKAVLHFMYRDNLVGDDELSASSSDCSIFDTLAGKLLAAADRYELPRLRLLCESYLCKHISVNSVATTLALADRHHAMELKSVCLKFAAENLSAVIRTDGFDYLKDNCPALQSEILRTVAGCEEECSSGGKSQSVWGQLSDGGDTSGRRVRPRV

SEQ ID NO: 166521 - protein, 90 aa, Oryza sativa
  unsure (1)..(90): unsure at all Xaa locations
  Clone ID: PAT_MRT4530_65221C.1.pep
ECRKLPLPKVTQIKKGKASLFAQGKPRYARKQSAYGGQTKPVFPQKANPPKKIVLKLQCQKCKHFSPPPIKRGKHLXIGEGKKGKGTFFF

SEQ ID NO: 166522 - protein, 424 aa, Oryza sativa
  Clone ID: PAT_MRT4530_65222C.1.pep
MDLERSPPPPPPEGGGGGGGGGASCSICLDPVVAGGRSVARLQCGHEFHLDCIGSAFNAKGAMQCPNCRKIEKGRWLYASGHHPSPDIDIGGWVTGETYDITSDIPFGFQWCPFSGFTQLASVFEEGEAEQTSYHTVGDHSNAASSSLVCPYLALRGFLHPVHVPSSSSSGAENSSFHRHPTSLEGHAAHDLSNTQVFHATESRNHDNDHRYMSNLPVSGIPDHSVAPFGIGLPRYDSSSQQRTRPYAHHRPLVHRPTPRNGSNMVTPLGSVPAVMAETRGHGHGARGHMYQQSMHSLQSSPFPPTSRRVRPRALTITSFIAASSSAEIGGHHGFAPPVNRSNSSDGEAVSRPVDRPYGWGQEGFTPFPWIPADGESHWWGTFNPMQNHTHGGFTRRPTGERMPQSHPDSGYHSMHPQRMPPFL

SEQ ID NO: 166523 - protein, 150 aa, Oryza sativa
  unsure (1)..(150): unsure at all Xaa locations
  Clone ID: PAT_MRT4530_65223C.1.pep
GRVGPEANATRAFSACFLLGVARAAAAAGLPNLAGRGLNPGFRWVAXRGGADPGPGARAAGKGREGLSGGAFQPSRELRGKLSFVPKAKDQSLARQKSVAKGKAAITEQIKGESMAWNANNSLSAYLDRDTVALKGFAKSFKESSDEERD

SEQ ID NO: 166524 - protein, 177 aa, Oryza sativa
  Clone ID: PAT_MRT4530_65224C.1.pep
MALPSSAQAAGSTLSWSSPWPRQDLAIGEEGLHEEWFAQLAGKTGHHHRQPLPRAHHQARERQLLPHAPLTHAAELGVTTPPLAAAVPAARSSGHRLHVALTPRQPPPPPRGPCAAATASERPSHRRLRHRAAPLPTRAAQPRSSQGGPNSNSTASDLAIVTRAALSSSGLVGAPTG

SEQ ID NO: 166525 - protein, 1003 aa, Oryza sativa
  unsure (1)..(1003): unsure at all Xaa locations
  Clone ID: PAT_MRT4530_65225C.1.pep
MEDRTGAWFCPPSGSWRRRLRLEGIRLTSGSNLLGWNVRGLNNADKRALVRESVMSSGVSVVCFQESKLEVVDSAVVFDSCGLDFDGFAALPAEQTRGGVIIAWKGAAFQGNVVHIGQWSITVQLRWILGERSWFLTSVYGPQGDADKLLFLEELSMVRNSCQGEWMITGDFNLIAAAMDKSNSRINRRLMNAFRNKLNELELRDMYLFGRRYTWRERTRRFRFESYWTKLDGFLEAVMESWQQEVQSDDPYSILHVKLARLCKKLTKWGQRRISKFRLQIQIANEVILRLDVAQESRLLSDLERRLRGWLQGEMFGVGIIGKNSAETKGSDMQALAREYFEMVMSSGESDKREILFQHTQLRRGDMIELDNPFTEDEVWAAIRSMPNEKSPGPDGFTGLFYQTCWDVIKPELMQALDKFCSGFSATVSQTEGGDDSLEARHFQGLRHGILVLPTVHVEISGFWAELEAVAFYDLRYREDEHPDQRSSIEPLQTGSGAEARRSIIAVAICTGNGFPSSFGGSSKNHASSFPLSARQNLPSISVYADDAVLFFRPTAREALVIKAILGLFGDATGLKTNFSKSANTPIHCSADQLSLIEETLSCRVENFPITYLGLPLGTRKPTKAELQPILDKLAKKVAGWKPKMLSIDGRLCLIKSVLMALPVHFLSVLQLPRWAIKDIERKCRGFLWXRTRRSQWRSLPDLDLFGQALRLRWRARQLEQKDRPWASAGFLPGSDVDAIFNSVAGSLSTEALGEFFQLWDEMREVTLDNSADSIRWKMAADGLYSASSAYNLFFLAKEDCPFGELLWQSRTPSRVRFFMWLALKGKCLTADNLAKRNWPHEDLCQLCRQNSEDGHHLLVDCAFTTEVWRRIRGWLGVDFPLPAEMATPLSDWWLTVRSRCRLSYRSDFDCLFMLICWIVWKERNARIFQNVSRTAQQLVQDIREEIEVWKAAGIFSLIRFEASNQTGPNRSERFRRGRDIKPLSSKPHNIKMGNRFSSIKYT

SEQ ID NO: 166526 - protein, 423 aa, Oryza sativa
  Clone ID: PAT_MRT4530_65226C.1.pep
MQLKCSERLVSLKASVLHTVDDTMWLKLHRRRNPEGYDMPSDLDQALLLYFDGQEQDKPSTQEEPHKPLNFVKETLNIFPSQPMDGEPTPTPKKEGGSGSGGAMAASASSELKGPKTPDPKTLRRLAQNREAARKSRLRKKAYIQQLETGRIRLAHLEQEIQFTRAQGAFCGAGILSPDAALFNLEYERWQEAHHQVISRLRAAVEEHRPDGELQPHVDEAMSHYGVLMAHKARLVGADPLHLLSGLWKGAVEQCFLWIGGFRPSELIKVVVRHVEPLTEQQLAAVYSAQQAARQEEDALDGGLQALLRSLSDVVSSSDAPSSSQQTPPVMYHPSAAAAMAAASFMGQYGSYSNLQLAMDKLANLAIFLRQADEERMRTLHALRRMLTVRQAARCFVAVDDYFGRLRALALFWTTTRPHPAAG

SEQ ID NO: 166527 - protein, 72 aa, Oryza sativa
  Clone ID: PAT_MRT4530_65227C.1.pep
CEHAACVFILDDPQLTVMCPMQSRLSLDPDVWALSVDSYLAHGHAGDFNHQCPPLSDSNVSSGSALIIFNVC

SEQ ID NO: 166528 - protein, 69 aa, Oryza sativa
  Clone ID: PAT_MRT4530_65228C.1.pep
PTRSLVSSLLSSSSSSCYISCCIMISETRSMAYNFVYTYVDTSRFQGQYNSHNTTNGTATCSARSMPRT

SEQ ID NO: 166529 - protein, 76 aa, Oryza sativa
  Clone ID: PAT_MRT4530_65229C.1.pep
DVCLLLLSAGHLMASAAAARPDTDDDAAALLRLKDRIELQEEEALALAEELDLLDNGDCDRDTAIWSEQHKLQYEH

SEQ ID NO: 166530 - protein, 112 aa, Oryza sativa
  Clone ID: PAT_MRT4530_6522C.1.pep
MVRKHRRSMRLLRVRLSRKAAINGPQNKLILYKTLQGLRGGQLMSSRKSRIPPFLSIQRRQPANIHHRLDRRCLEGIRAVGDADLGGAEEEEIGNGGVETKITSGCKPTIRN

SEQ ID NO: 166531 - protein, 96 aa, Oryza sativa
  Clone ID: PAT_MRT4530_65230C.1.pep
MDNLWHLGDEFRGQSKVVEDRQWSLMTSKLAEINKSKAERTNELDYARMNTIPDVKQWDKVSYHQDESKMDHLNLGLMNLDLKMNDIRMNDATMKN

SEQ ID NO: 166532 - protein, 314 aa, Oryza sativa
  Clone ID: PAT_MRT4530_65231C.1.pep
MDNLWHLGDEFRGQSKVVEDRQWSLMTSKLAEINKSKAERTNELDYARMNTIPDVKQWDKVSYHQDESKMDHLNLGLMNLDLKMNDIRMNDAAMKNPFRGMAYNMNQLYPKGGNGNVNSFKMNVGVNKYLHSPNGKDVNGKNSGANSNGSNSSGNNSSNSAVDKRFKTLPTSEMLPRNEVLGGYIFVCNNDTMQEDLKRQLFGLPARYRDSVRAIIPGLPLFLYNYTTHQLHGVFEASSFGGSNIDPTAWEDKKCKGESRFPAQVRIRIRKLCKPLEEDAFRPVLHHYDGPKFRLELSIAETLSLLDLCEKEGV

SEQ ID NO: 166533 - protein, 136 aa, Oryza sativa
  Clone ID: PAT_MRT4530_65232C.1.pep
MKGSSWKNSGHGNGLLAPPPPPQLDADAVALHQSNGFVIVVVVTSERSASGGREPPWHVNASAPPAPQPRSLRLASTSSLVITGASENAHGVVWVWPPPEWPTAVGVIGTELPAGDDKQVAGAAPLLVPLLRGVLR

SEQ ID NO: 166534 - protein, 129 aa, Oryza sativa
  unsure (1)..(129): unsure at all Xaa locations
  Clone ID: PAT_MRT4530_65233C.1.pep
TDSPTSSSDEKFPIGGRRLRLPVCYSGAGEATSVVSLPPPPTRLPGRRGXCPPPLSLRLAALLVVSPTSLPLPPHSLPSSSSRLLQRRREAPRPPSLPRLRRLGAXAPEXAGFLPLPLTHHGGLXKAYW

SEQ ID NO: 166535 - protein, 127 aa, Oryza sativa
  Clone ID: PAT_MRT4530_65234C.1.pep
PRNPGPPGLASPLLSVDSRRPLLAMDPRYLQELGALLPRARGVTLPQVFVGGRHLGGAEEVRHLHESGELRRVVAGAGATALAACSRCGGERYVLCGSCNGSHKRYSLKEATVRGRLAPPLLPLPLS

SEQ ID NO: 166536 - protein, 82 aa, Oryza sativa
  Clone ID: PAT_MRT4530_65235C.1.pep
MARGVVQLQQLVVVVGGVALNARMLLPRRLFSIRIFRYSDIPLVDHKRYLLITVVLRASEFRKGTKLPMTPTPTNKVLRMYT

SEQ ID NO: 166537 - protein, 148 aa, Oryza sativa
  unsure (1)..(148): unsure at all Xaa locations
  Clone ID: PAT_MRT4530_65236C.1.pep
TAEVTHTWTLPVPGMKTIGNYHRESFRIRRHRLGEQLLWPKRGHVXDGLVDGCFLVMLCWFDGLRPDYRQFAMENRNKITLRRTLGTVYMQLPHGRGLRSTKNLPDGTVVGSVPCSCYKSKYHGVQMLWYSVILWSEAKKINLLIIVF

SEQ ID NO: 166538 - protein, 88 aa, Oryza sativa
  Clone ID: PAT_MRT4530_65237C.1.pep
SRYIGMMYASLTHGNVSTGLRAHTFSHRGAHSLYSTAFQQARAGRSIIHLTNPTGTPSICGGSPQEISSSNNLVAKPPDKGSSSLVAV

SEQ ID NO: 166539 - protein, 73 aa, Oryza sativa
  Clone ID: PAT_MRT4530_65238C.1.pep
LATCNLGFGFDHAIDSVASTPGLLGFFNGIARKEVSVLWFLRVVQPCMQTLHCIYQIFELYIVVVHISNKEPF

SEQ ID NO: 166540 - protein, 64 aa, Oryza sativa
  Clone ID: PAT_MRT4530_65239C.1.pep
IPRCNISNISKLQLPHFFGGHYLVKKKLEDPFFLNNGTSLKFIFLVLNINKKKFVPFFKKICFF

SEQ ID NO: 166541 - protein, 129 aa, Oryza sativa
  Clone ID: PAT_MRT4530_6523C.1.pep
PVSIRKFHRDRRRSIFRESASWADGQSLVSVRAAGVCLFLLSCSWACFCSWISCPLLSAPSAWTPLCSWLILAFFFVLRGAFLSCLHPAANFCVYSYHVKELDFFLKLERLASPISVKYALISCSPGDP

SEQ ID NO: 166542 - protein, 187 aa, Oryza sativa
  unsure (1)..(187): unsure at all Xaa locations
  Clone ID: PAT_MRT4530_65240C.1.pep
RSPSPAPAPAXPSRPSPPGLGKTLGYEPTSHLHGAQFLPCWFSTIASNGSHMQKAQETCKPVAGMEHSDALKVMEGTSPKVVAFSPLEAAITKPRSSPLTIESSKVKRSEIATLVTFYMIPSLLVSSKNGLATSILVGAVFHQIYMFHKEIFLDYVHHDITRKWALIYFKLLLLIMAKETIVYFNFI

SEQ ID NO: 166543 - protein, 60 aa, Oryza sativa
  unsure (1)..(60): unsure at all Xaa locations
  Clone ID: PAT_MRT4530_65241C.1.pep
MGIDLVXXGRNKKTKRTXSRSEDVYLKLIVKLYRXXVRXXKSHXNVVIXXXGFXMXQXQP

SEQ ID NO: 166544 - protein, 98 aa, Oryza sativa
  Clone ID: PAT_MRT4530_65242C.1.pep
GPNIPVNGAQSPRSGGGGGGSGGGGGAYPAGRGAAASEEGGGGGYGPRGGGYGGGGGYGGARGGGGGGYGGTRGGGYGGDSGGNWGNCLGGPLGASYP

SEQ ID NO: 166545 - protein, 327 aa, Oryza sativa
  Clone ID: PAT_MRT4530_65243C.1.pep
MALIAGSYERFIWGFSLKTLTSSSASASSSETLALAPLFSYPAHAGPIRCAAAAARAGLAASGGSDDTVRLYDLPAAADLGPLLDPAAPVSALAIHSLGPVPRNLLAASDDGLLHLYDAGEGFPLLASLRVFPRHREPADALAVHPTGRVALAVGRSGGLAMLNLLRGRRSFSCRLEHPATAIAYAEDGAGGDRFVMAAEEKVTVHDSEDARIIHEIDCGKRVLAFAPAKKGILYTGGEERGITAWDLSSGKVTSRIEDAHSTRVKGIVVFDDKNDGSELCNLIASASSDGIIRIWDARMIAKEKTTPLAEANTKARLTCLAGSSLN

SEQ ID NO: 166546 - protein, 258 aa, Oryza sativa
  Clone ID: PAT_MRT4530_65244C.1.pep
MEGEDEERQHSAGIRGCAGVAAAGGLERDEGKRGGGGGAPSDGKIEKLSAEERVAAVLHHLVGAVDGQVDIHCFPMGYLPTRLELSFGAPCFIRWPACSCWVPPWTTAAIVINAAEVISSAFPNWCITRKDAAESKERSEALSAAAKKFKLPSSENLGEIAEHCNERKCAGHCAEEAGQKLYMWTLIKRKELLVADAIVLGLRTKFMYVYVPKLTMERRIHYDEVESLSIECLEATGMLVLEACRNRPPQRRGNQVNW

SEQ ID NO: 166547 - protein, 129 aa, Oryza sativa
  Clone ID: PAT_MRT4530_65245C.1.pep
MSSWAGPDEIFLSTSLAGFLDKKLIVLLRDGRKLLGTLCSFDQFANVVLQGACERVIVGELYCDVPLGLYVIRGENVVLIGELDREKDELPAHMTCVSEAEIRKAEKAEREARDLKGSMRKRMEFLDFD

SEQ ID NO: 166548 - protein, 127 aa, Oryza sativa
  unsure (1)..(127): unsure at all Xaa locations
  Clone ID: PAT_MRT4530_65246C.1.pep
YAGCGSWIAWFFGSGCGEKLIVLLRDGRKLLGTLCSFDQFGXACERVIVGELYCDVPLGLYVIRGENVVLIGELVWFWIEQDREKDELPAHMTCVSEAEIRKAEKAEREARDLKGSMRKRMEFLDFD

SEQ ID NO: 166549 - protein, 383 aa, Oryza sativa
  Clone ID: PAT_MRT4530_65247C.1.pep
MPEKPGNHLAFAASCWNIVVTINPKLSTARSSLLVSSLHHPCWRQGFIASCTRFLSAANASASRSISYACFSCLVRLKIMLNGLLILIMTGHNTVHLAILFWKLEAKKLHDWVACIWPPSTIKDTGSRLHSKLKEAIAQISINVKTGLEKNVFGNHFVTMPKADTRTPPAFASDPLKRVSISGDRESNGANIINSAIDANVQSGGMYSSATVGSGTPSHVEPEIVEIDGPSPITTQFPEQESNFIRSPSPHGPSAMTRKGANYVERQNSEISYYADDEDANRKKYTKRGTFRHKFLRMLLPFWSSALPTLPVTAPPRKESDAPEGRSRHQKSSRMDPTKILLALAIIEASVAFDMMMAFERDATIASVPFSVECCAFCVYYKG

SEQ ID NO: 166550 - protein, 94 aa, Oryza sativa
  Clone ID: PAT_MRT4530_65248C.1.pep
GGARGVGHKYRHETGLASRDRDDDCYYRAREESGVGAVDRSIDPRAMRCDAATPAGGRWERARGIVAAVRRVYGDTRSRGRQQVASLHEVPVAL

SEQ ID NO: 166551 - protein, 74 aa, Oryza sativa
  unsure (1)..(74): unsure at all Xaa locations
  Clone ID: PAT_MRT4530_65249C.1.pep
MVHGSTEADPVXNPRQVVDKRTPLDTTRAAHVGTTMLPSRHTYTVTTRTSERLPTPVHGYWGRQPHNGHGRYQK

SEQ ID NO: 166552 - protein, 34 aa, Oryza sativa
  Clone ID: PAT_MRT4530_6524C.1.pep
MNDRNFLIGDMSLTGYKDVSPSRAPSKEAIDPSA

SEQ ID NO: 166553 - protein, 67 aa, Oryza sativa
  unsure (1)..(67): unsure at all Xaa locations
  Clone ID: PAT_MRT4530_65250C.1.pep
MTARSLLAGRMVAAARRAFRSWPLHTITTTTTTDAAXREMAAVLRRSRVAAVEHNNFNIRQLANPYH

SEQ ID NO: 166554 - protein, 144 aa, Oryza sativa
  Clone ID: PAT_MRT4530_65251C.1.pep
MTARSLLAGRMVAAARRAFRSWPLHTITTTTTTDAATAIATKEQHKVVSRLDVMEDISFPYMTREMAAVLRRSRVAAVEHNNFNIRQLANPYHGPADGDILYDRAWINNLALLFTLSTLFGAFSTLAKLKQTRTVDQCVQTQTS

SEQ ID NO: 166555 - protein, 226 aa, Oryza sativa
  unsure (1)..(226): unsure at all Xaa locations
  Clone ID: PAT_MRT4530_65252C.1.pep
KQGDSHFWSGLMKVKSTFXDLGSWIVNDREQIRFWEDKWLGNLAFKDKYPSLYAIVXRKSSSIVIVIGSVPLNFSFRKGLVGQNLVYWYELCASMVHIQLNLSSDYFRWNFHXNGRLSVRSMYLALINNGYVERNKYIWKLKMPLKIKIFMWYLLMGVMLTKDNLTRRNCNGSLRCCFCMKNESIQHLFIRCEDDGEFLMVACRKLESTVMQLFANYGWRFTNRLQ

SEQ ID NO: 166556 - protein, 44 aa, Oryza sativa
  Clone ID: PAT_MRT4530_65253C.1.pep
LSERVQKIVGQAGVVKCLIIKVLVTPDQAILNVVVECVLLKAES

SEQ ID NO: 166557 - protein, 56 aa, Oryza sativa
  Clone ID: PAT_MRT4530_65254C.1.pep
HGGGSGSCPMRSGGGVTSVARGGRTSLFGVIHSGWRNGRGKVMDGAYSSQIICPRT

SEQ ID NO: 166558 - protein, 235 aa, Oryza sativa
  Clone ID: PAT_MRT4530_65255C.1.pep
IQLVSMSKCTANIGHETYRIFIVDNGGKNYLAVDTSGNVVLVEDPERTQPSSNSYGRQLIWYKVVDEATGGGGSTTNQNFVLKNNSKPLVVKSSRGDGRQRLDVVLGQGRDVGERWTLEEIHKGVCYIKSGSYSNHIFTGVSTKRTVHLQEKRLANALSLWTFVPAEDADPRHTPDGGASLTLSRTAPHGVPQVLEPSGKMHTFTGDAGTSLGSAQSNQRKPVKGGRDGGRRRNP

SEQ ID NO: 166559 - protein, 106 aa, Oryza sativa
  Clone ID: PAT_MRT4530_65256C.1.pep
MAKAAIAVTAPQQLRRPRRAGGDDAAAVRQWAADPAAKFKASSGRLPSIIPLPPEAVTAACFLDIPAKSEPGCLLTKALSFHRPPKPCTPAWSSQLQVKVTSAKSG

SEQ ID NO: 166560 - protein, 101 aa, Oryza sativa
  Clone ID: PAT_MRT4530_65257C.1.pep
MSLEHTSREMIFLDTGPAVTADGRGGGRERRWRDDGDHEQRQCGNGDNDRSSGSATTVAMSGGGERRLHDDGSGSGAMTATTRTMATMSGGCATTTTTGFF

SEQ ID NO: 166561 - protein, 158 aa, Oryza sativa
  Clone ID: PAT_MRT4530_65258C.1.pep
GERCGWRMPRLPRAGDRLPRGLLSARERVRRPRGTAAHAAGDGMEDLAWSRWRRGQKRGPARGLSSRVGSGESHRVASKDGALLGRRERHHHGTTRRRPSGRAPRAAAWVGGRATTRCAPATGLWGRGRPSQPQDGRVLGRRQRRSERLIAASCVTCQ

SEQ ID NO: 166562 - protein, 215 aa, Oryza sativa
  Clone ID: PAT_MRT4530_65259C.1.pep
MALVPMFLSEPDHTSSQPISSPLFFFLCDCEPRKRRTWRRRAGCNLQEAKKRPRQAAMSGRSRPWPGDPSPAPPQPPVVAAAADAGGEASTSLRAFGTSMDAISFGFAATAILVSMFLLMAIFEHLIKPHVFPPLASAALRPARRRHGVSPAGKLRSPPMVETVLQAADLSVLMPGQRYPTYLAQPAPLPPAPCPREGVHWPPHDHDVHHSYMPP

SEQ ID NO: 166563 - protein, 91 aa, Oryza sativa
  Clone ID: PAT_MRT4530_6525C.1.pep
MANRIQVALHLHHQLLHPLALPHVAGNEVLEFLQVLLSLRGHVLQLCNTPIRGRNDFLSSFDLGEHVACAGFEQATRLPYYISAGAGRGGV

SEQ ID NO: 166564 - protein, 415 aa, Oryza sativa
  Clone ID: PAT_MRT4530_65260C.1.pep
MERIGVTKLHHHLLLLVLLLVVAAAGGGSVQAAEEDEMSGRRRRSRRRRAADVMVPITILNSAVDKGAVCMDGTPPAYHLDPGSGGGNRSWVVNLEGGGWCNNARTCRFRTASRHGSSDHMERRIAFTGIMSSAAADNPDFHSWNRVKIRYCDSGSFAGDAFNEGLKLQFRGQRIWGAVIQHLLDVGMASAEHVLLTGCSAGGLAAILHCDQLRALLPAAATVKCLSDGGLFLDAVDVAGGRSLRSYYGDVVGLQAVAPNLPETCTDHLDATSCFFPQNIIDGIKTPIFLLNAAYDVWQIEQSLAPNAADTSGTWRVCKFNRAACNASQLQFLQGFRDQMVAAVRVFSESRSNGLFINSCFAHCQSELTATWNGGSPALQNKGIAKSVGDWYFGRAEVKAIDCPYPCDKTCHNII

SEQ ID NO: 166565 - protein, 121 aa, Oryza sativa
  unsure (1)..(121): unsure at all Xaa locations
  Clone ID: PAT_MRT4530_65261C.1.pep
PALQNNVILLAVSASIYSPPVVTSRHTQHCQHFANIMAHHWSPVMSGPGSMLQPSVLHTSSTSLHAKHRFPQSGSSRLGQFPFPHHNTSNTQHTXAHHHSVPWAPTHHTHVARPICTSPLF

SEQ ID NO: 166566 - protein, 439 aa, Oryza sativa
  unsure (1)..(439): unsure at all Xaa locations
  Clone ID: PAT_MRT4530_65262C.1.pep
MAMAMTNTALAFFLLVAAASLLSLPPPSLAVTSPYVRPKPRATLSLLKDDDDGRKPEQVHISAVGSDKMRVTWITGGDAPATVEYGTTSGQYPFSATGSTNTYSYVLYHSGNIHDVVIGPLQPSTTYFYRCSNDTSRELSFRTPPASLPFKFVVAGDLGQTGWTESTLGHIGGDDYDMLLLPGDLSYADLYQPSWDTYGRLVTGLATGAWTRGDAERYFHCSSPPHAVVRVLGVXARWRSSSSASPSPPGSNLSYSXDVAGGAVHVIMLGSYADYAAGSAQHRWLRRDLAAVDRARAAFVVALVHAPWYNSNEAHRGEGDAMRAAMEELLRGARVDAVFAGHVHAYERFARVYGGKEDPCGAVHVTIGDGGNREGLAGSYVDPQPAASAFREASFGHGRLEVVNATHALWTWHRNDDDEAVVADQAWITSLASNPACNK

SEQ ID NO: 166567 - protein, 37 aa, Oryza sativa
  Clone ID: PAT_MRT4530_65263C.1.pep
KHLNLSLNNLSGLVPNKGIFCNPTAVSLSSNDMLCGG

SEQ ID NO: 166568 - protein, 79 aa, Oryza sativa
  Clone ID: PAT_MRT4530_65264C.1.pep
LAEAIAESTGADTTAAIARYYDQHIVKQIIDREDQTIDHSLGDYNGYLERYLERNQRALARELAREEEVHEKAAKAKVT

SEQ ID NO: 166569 - protein, 87 aa, Oryza sativa
  unsure (1)..(87): unsure at all Xaa locations
  Clone ID: PAT_MRT4530_65265C.1.pep
MALALSTSAAAAAXAAARXLAARVTTTRGYAASGVXXAXXXXAXAVEGKXAXGMTXXKDXSSXSXXKXXSXVPDPXTGHXXAFNLAG

SEQ ID NO: 166570 - protein, 552 aa, Oryza sativa
  Clone ID: PAT_MRT4530_65266C.1.pep
MVGGGAGEPLRRAWGYHPECPGCRVDRRKEEREGIPYTELSLIWLVTVSSRASRCPELWHATIMLNAVDLLGALAALPIQSLFPFLYFMVQYDDILFHEKRRVTSVTIDFTFGLNSCAGSVIRDLHIAKQEEDIGFYAGFVGASYMFGRALSSVIWGIVADKYGRKPIIIITLISIIIFNTLFGLSSSYWMALTSRGLLGLMCGILGPIKHYFLISVFQAYATEVCRKEHGHLGLSLVSSSRGIGLIVGPAIGGYLAQPADKYPSIFSEKSIFGRFPYFLPCLCISLLAIVALLASFWLPETLHKHTQDMVLEDSISVEEGLSGPTAEENSAGCLNLFTNWPLMSAIIAYCIFSLQDVAYAEVFSLWAVSDRKYGGLSFSSQDVGSVLAFSGLFLLVFQILVYPSVAKSVEPITLVRIVAILTIPLLSSYPFMAGLSGSILQLIVNCASFLKNAFAVTTITVFNILMNDAVAQDVRASANGVAVTLMSIFKAIAPAIAGAIFAWAQRRQTASFLPGDHLVFFMLNVFTVIGLVSTFRPFYARRSTKHDPITT

SEQ ID NO: 166571 - protein, 108 aa, Oryza sativa
  Clone ID: PAT_MRT4530_65267C.1.pep
MWISGAVAREGPRCRRRKGQASTIVITARPCRTRGSASAPKAASGGSTLPGTGVVGPATVIVIVGFVRKAGGGGGSAPSKALVAGSMREKASVARQGRFNNFEGPRRT

SEQ ID NO: 166572 - protein, 87 aa, Oryza sativa
  Clone ID: PAT_MRT4530_65268C.1.pep
LRSAAVAAASAGDGSAARSHRRRGREGRSRGLPSLSSPPPPPPCLPSAGSARGGATRHRPPPPLSPPPTPVARRRSRREEGERERED

SEQ ID NO: 166573 - protein, 55 aa, Oryza sativa
  Clone ID: PAT_MRT4530_65269C.1.pep
ILEIVHVKIQKFHFGVLSQISTELKKQISQAFSQLKISDFFRFLETENEVEKASK

SEQ ID NO: 166574 - protein, 514 aa, Oryza sativa
  Clone ID: PAT_MRT4530_6526C.1.pep
MTRLAVRSLVVLFLTVASPFLVAGGGGAKLNASSSSSPLYGIEFPPFNAGVADGGCDGKLMVQGMEEVSRSPSLKLHMTHRSAAEAAAAGRTRKESFLDSAGKDVARIHTMLRRVAGAGGGRAATNSTPRRALAERIVATVESGVAVGSGEYLVDLYVGTPPRRFQMIMDTGSDLNWLQCAPCLDCFEQRGPVFDPAASLSYRNVTCGDPRCGLVAPPTAPRACRRPHSDPCPYYYWYGDQSNTTGDLALEAFTVNLTAPGASRRVDDVVFGCGHSNRGLFHGAAGLLGLGRGALSFASQLRAVYGHAFSYCLVDHGSSVGSKIVFGDDDALLGHPRLNYTAFAPSAAAAADTFYYVQLKGVLVGGEKLNISPSTWDVGKDGSGGTIIDSGTTLSYFAEPAYEVIRRAFVERMDKAYPLVADFPVLSPCYNVSGVERVEVPEFSLLFADGAVWDFPAENYFVRLDPDGIMCLAVLGTPRSAMSIIGNFQQQNFHVLYDLQNNRLGFAPRRCAEV

SEQ ID NO: 166575 - protein, 292 aa, Oryza sativa
  Clone ID: PAT_MRT4530_65270C.1.pep
MTRKSLLFLQLGLLVAASLPPASKQMEVSLKKWLADNQLLYTTPDAEDTAMDAGVVAASKAQVHVGVDPAGSGSGGGKRRTIAAALAGVPDSGGGEPKSYELSLKPGQVFREKVVVGKGKAYVTLKSDPANPAVIVWNDTAATLGKDGEPLGHVRSATLTVEADNFVASGVVIKNDAPSGLEGGKTVALRVAGTKASFFKCTIEAGGQGAAQAQRAPKYDGLDGTTNPAFLGFSFHNCTIEAGAGDSGGADDKVYLGRAWDDSSFVVFSNTMMARLCLLASKAKKSKSQQKG

SEQ ID NO: 166576 - protein, 92 aa, Oryza sativa
  Clone ID: PAT_MRT4530_65271C.1.pep
CAPLMLLLAWHSASTFDVSLRTSGPFGTMTNPCEQSHAFNAGLDMNVRLLDPIKDQLPILSYADLYQLAGFVNVEVTVGPEVPFHPARQDKP

SEQ ID NO: 166577 - protein, 363 aa, Oryza sativa
  unsure (1)..(363): unsure at all Xaa locations
  Clone ID: PAT_MRT4530_65272C.1.pep
MIIDRVQVEAINSFSNLELLKEVYGLIWILPILTLLLGITIEVLVIVWLEREISASIQQRIGPEYASPLGLLQAIADGTKLLFKEDILPSRGDIPLFSIGPSIAVISILLSFLVIPLGYRFVLADLSIGVFLWIAISSIAPIGLLMAGYSSNNKYSFSGGLRAAAQSISYEIPLTFCVLAISLLSNNSSIVDIVEAQSKYGFFXGWNLWRQPIGFLVFLISSLAECERLPFDLPEAEEELVAGYKTEYSGIKYGLFYLVSYLNLLVSSLFVTVLYLGGWNLSIPYISFFGFFQMNKMVGILEMTMSIFITLTKAYLFLFISITIRWTLPRMRMDQLLNLGWKFLLPISLGNLLLTTSSQLVSL

SEQ ID NO: 166578 - protein, 45 aa, Oryza sativa
  Clone ID: PAT_MRT4530_65273C.1.pep
RHNLRLRPRHGSEPPPATTNGGGAPYLPHAVSSPRTTASTRRRLP

SEQ ID NO: 166579 - protein, 90 aa, Oryza sativa
  Clone ID: PAT_MRT4530_65274C.1.pep
TQPMEHNQQLAMRSSGFGSFTSCFTQRNGFITRFLSPKGSDVTVKILGSQGCFSCTGLFICSTLDIQKFKGSILTDVSFQAFLTGQIHYI

SEQ ID NO: 166580 - protein, 145 aa, Oryza sativa
  unsure (1)..(145): unsure at all Xaa locations
  Clone ID: PAT_MRT4530_65275C.1.pep
RTASFSVSGESSIPFRCSTVRRCQPLGPLHFHQPPPATARGRRRAAFGVSYRANEATAPLNQAFSVADDVTSKDLHIDPNSSLSVRIFLLTPPSYPHSGTTXRLRPRHGSEPPPATTNGGGAPYLPHAVSSPRTTASTRRRLPIA

SEQ ID NO: 166581 - protein, 360 aa, Oryza sativa
  Clone ID: PAT_MRT4530_65276C.1.pep
MVLLNRSVLLVNEVTDVMKEKGWSLELDEKAISDACDGITDWQEKEKARQKAIRAEIKRFRANQDAAEAILRKRKASMPPSTVTKFCTDTDLRKVLDGIELDPQVHDIPGLSFFRLRLSSARHPPDLQGTSVAGADHNILVFYVGPYRPGFPAPGFYLVYDAWANSLSAIHQLPYLGGGSIGSEVAVLRHAPASDYILAELLLTGELPKASLWTWCSSGPSARQWIHKTVILPPEVCTPTYIFHADTTFSLGKFALCWVDLLVGILMTCDTLAPEPVFQFIPLPEGCYMEPPDPQDGRQVPQEYRSMCCGNDGIIRFISIDGYHQDLSINDMRNMFLRTWSLTLNPKEWKQEAALCIGDL

SEQ ID NO: 166582 - protein, 134 aa, Oryza sativa
  unsure (1)..(134): unsure at all Xaa locations
  Clone ID: PAT_MRT4530_65277C.1.pep
MYLEICHYNFTHIQKIPLLTPWMHFQIKMDQTTHFPLVLLLPLSPSSSLPSQGRRGASTVVAAATQHGASAAARRHSSNNGATRLGSDSETRLGGGSSSGAAVEQAAARAAGWRRSERRXEKRETVEDGEERER

SEQ ID NO: 166583 - protein, 125 aa, Oryza sativa
  unsure (1)..(125): unsure at all Xaa locations
  Clone ID: PAT_MRT4530_65278C.1.pep
MAAALRAALRRRHAASSPVARLLPYSSPGPCAKGGGAAFTLHAATRGAPAPSIQAPSVVRRYCSAGGGYAGARPARGASPLQAPFMVRRSGSTXTGATAPVTPAAGVXAFHRESPLPFLVPRRPP

SEQ ID NO: 166584 - protein, 98 aa, Oryza sativa
  unsure (1)..(98): unsure at all Xaa locations
  Clone ID: PAT_MRT4530_65279C.1.pep
GRHLKINSIKTVLKRHLLYMLFLYQLQVYXSFXTKQLLEKSSFLVLWPNLLRNYYLLGKHLWLIFNLSNSLKVNLIFLXYTETXYPGAEHPPXYPLLL

SEQ ID NO: 166585 - protein, 91 aa, Oryza sativa
  Clone ID: PAT_MRT4530_6527C.1.pep
SLDGLFHGGRGGGGEGGGGGGAAGDDRDRPAGRRPGDRLRAHGRRARRHLRAPLARSIGSGRRRRRRRSRSPSPTNLHFDRSMPKVYNYRT

SEQ ID NO: 166586 - protein, 64 aa, Oryza sativa
  Clone ID: PAT_MRT4530_65280C.1.pep
NYMHSYQGAISYAYITVTPNIDYVLIKCTVHVTHSTDAISLCSRVAHACTRPLNHIHNTRTIHT

SEQ ID NO: 166587 - protein, 496 aa, Oryza sativa
  Clone ID: PAT_MRT4530_65281C.1.pep
MGANFPGFNGVVLSVVGDVPVDIEAPVVTSSISPEFAGPVFEDAHRGRAYFSGGSSWVVDIGCTNHMTGKRSMFTSLDEEGGTRENIVFGDDGKGKGKLKGDLYLVDFNVDRVNPEACLIAKSSIGWLWHRRLAHVGVRNLSTLLNGEHILALTNVTFEKDRVCSAFKAGKQVGSLHPIKNIMTTTCLLELLHIDLFGPVAYISIGGNKYGFVVVDDFSCFTWVYFLHDKSEAQDVFKRFVEQPQNLYYLTIKRVQSDNGGEFKNIQVEEFLDEEGIKHEFSAPYDPPQNGIIERKNQTLIEAARTMLDDYKTSDIFWAEAVSTACHAINRLYLHKLLKKTCHAQKFTSNFRTYLCIKSSSRNQPRGMDSPLTPTDFSPLLSLAPRNEPCYTKDDADPSKAIGTKAIGDIRPVETQDDQEDRDQPPSSTPNSPTSSPLSADPEVPGTEDRNIRASPCQEVSKPSARKFRTDDSQGVPTAQVNGIDAEGTVEHLNQG

SEQ ID NO: 166588 - protein, 995 aa, Oryza sativa
  Clone ID: PAT_MRT4530_65282C.1.pep
MPRFLAILSAIAVVAISGHAPPAASTAATDRAALLSFSSGVHGNLSDWGSPAAAMCNWTGVRCDNRSGRVTGLLLSNSNLAGVISPAIANLSMLERLYLDGNHLAGGVPPELGALPRLRELSLHYNLLGGQIPEALGRLTSVTYLTLDGNGLAGGIPEAVFCNCSGLTFIGMSGNSLTGDIPLRPRCRGLPALRQLSLFGNALSGVIPPALSNCTDLRWLLLQDNSLSGELPPEMFGSMPSLVFLYLSHNHFSSSDGNTNLVPFFSSLVNCTGLLELGVASAGVGGEIPAIIGNVSSANLSSLFLSGNEFVGKIPPAIGNLVNLTELCLFGNMLEGPIPPEILRPPRLALLDLSNNQIVGEIPRSVGESQRLETINLSQNKLQGTLPESLSNLTQLDHLVLHHNMLSGTIPPGLNCSLILDLSYNKLTGQIPSEITVLGNFHVYLNLSNNLLDGHVPLQIGNMEMTEALDLSMNNLSGAIPATIAGCVALEYINLSGNSLQGSLPTSIGKLPNLHVLDVSSNGLTGVLPPSLQASPALRYANFSYNKFSGEVSGEGAFANLTDDSFVGNPGLCGSIAGMARCDRRRHVHRRLLCIVAVAVAVVAGVSAMALTWLKKLTTTSVSPHLSSGGVMDERNSEHPRISHRELVDATGGFSEANLIGKGGYGHVYRGVLHGGTVVAVKVLRAGDDVVVAGSFERECRVLRSIRHRNLIRVITACSSPEFKAVVLPFMANGSLDGLIHPPPPPPPGGKPAAKAHRRLDLELLLSIAGNVADGMAYLHHHAPFGVVHCDLKPSNVLLDDDMTAIVSDFGVSKLVAQQEDAKDPDAIDDDDDDASSTPYPRSSITRLLQGSVGYIAPEYGLGCNPSTQGDVYSFGVLLMEMITGKRPTEVIAEEGHSLHEWVKRRLSSDDDVVAAVELSAATSPRHETHVVVELLELGVACSRIVPAMRPTMDDVAQEIARLKDGAWRKCCCEDDNDHCIRSDPRDNSVLGEGF

SEQ ID NO: 166589 - protein, 221 aa, Oryza sativa
  Clone ID: PAT_MRT4530_65283C.1.pep
MGPTCQPHNYPLPLALRFARWLPALLLSFTVVAVARWHAVAEEGEPLRNRCNHGIRQECGELKTGRMESSSARDGSARLAKPSTSRHAIGAAEMVCRREREQRSAPPRPQPRAGAPPPPGKRGTALALATDGQTGERGEGDSCAADKRVKIDLIINHVTYGISKWFVTLIYNGLTVLNNYTACLSHRVSSAAWRCNQAPTVFRAAEEAAGYCGYVAAEQTQ

SEQ ID NO: 166590 - protein, 143 aa, Oryza sativa
  Clone ID: PAT_MRT4530_65284C.1.pep
MEEVADKSEKMRPFNVDRGLCPDAYSYAKDDQTSTFTCPTSTNYRVDFCPPMSGVTAGDDDGVHGHGLPRLSCRICASAAMVMVFLPPPAAASHGGDRHELPNFRGFGVGLPPAAELACSAAHLPIRSREGERGEREEGRREE

SEQ ID NO: 166591 - protein, 73 aa, Oryza sativa
  Clone ID: PAT_MRT4530_65285C.1.pep
AFNSSVLWDPERWGRYPTSEPDKSQDSVKFVQQVVLEDYSKVRGIPSDCSEVMVWHVNTTPLPSSQPSPQNKR

SEQ ID NO: 166592 - protein, 488 aa, Oryza sativa
  Clone ID: PAT_MRT4530_65286C.1.pep
MGEAVLVSNHGCSGGGGRVGVGVRGAGGGGPGEGKAEGQQGQVLALLLAALRRSVVLPCQMADADDPAAVAWGMEIGWPTDVRHVAHVTFDRLNGFLGLPGEFELEIPGHVPSASASVFGVSPESMQCCFDDNGNSVPKILLLMQERLYAQDGLKVAEGIFRITPENSQEENVREQLNRGLVPDDIDVHCLASLIKAWFRELPEGVLDSLSPEQVLHCNTEEECVELVRLLPPTQAALLNWVVEFMADVVEEEESNKMNARNVAMVFAPNMTQMSDPLTALMHAVQVMNLLKTLILKTLREREHDESEYSAISSQSSSSDELDEMHHHVEQGGDSGSDTDNFGDDGSQSQKDVAKVLQQNVVNEQPIGASRRHTSIDFRLPYISYGSDDDVSPNDIEECFLRRLEWNAVSKDASEIGSITVRSNQEAGQLSFSEENDGYYSTDYQSRNILLKDSVGIQSTLPRETESRAEITNDEVQDGAEVEVTLEQ

SEQ ID NO: 166593 - protein, 77 aa, Oryza sativa
  Clone ID: PAT_MRT4530_65287C.1.pep
LQEGWSWSWSCAKQALTTRAQALRSSRRSLTQLAAALLARVTAVDRCSDITARTEASSTERGLTYDSRSSTPAGIEG

SEQ ID NO: 166594 - protein, 122 aa, Oryza sativa
  unsure (1)..(122): unsure at all Xaa locations
  Clone ID: PAT_MRT4530_65288C.1.pep
MLSGGCRGIPFILRYMPCIGMVYLRVYGRSLHTLKESIMEFTDRKSPTRTRLGRQCIVQGPMSPNSTWKPRDLRYKRDPXEDLKGESDXPTSPPQPTKSEPAEARLPRGLVGLTRXRSRRFH

SEQ ID NO: 166595 - protein, 836 aa, Oryza sativa
  Clone ID: PAT_MRT4530_65289C.1.pep
MEAEDDERAEAEAEARREKEAGNAAYRKLYLETAVRHYTRGALLDPRDISFLTNRAAAYLLMSKVRLSVSAMPPNPSSLSDCLTSRRWRLVSPLQYKECVRDCDEAVEKGRELRADNKLVARALARKASALLKLAACAADYDPAIRALQQSLAEHYSEETLAKLGEAEEARKEIEERERLDQEAADHHRDRGNDFFKQKRYQEAAMHYTEAMKKNPKDPRVFSNRAQCHIYLGALPEGLEDADKCIALDPTFLKGYLRKAKVQLLMGNYEIALATYVEGLKCDPNNLEVLDGLRRCAACIKRANGGDSRAEDLREILGDLHLNDDLCNKLQKSMDEAAVLKKEASDERLKRIESERLARTLEDLYLSQVQQRKETEESLSRVQQEFEQLKIQQDEVTVELQRVNEQNENLLGQLSDSREHFEWLLSEHDQLLRERDNAVREVEELRQKRGQMLSVLVTAMHCEFSSSEVESATENFSNSLKIGEGGFGCVYKGILRNMTVAIKVLRPDSLQGQSQFEQEVSILSRVRHPHLVTLLGACSESSTLVYEFLPNGSLEDFLMCSDKRQTLTWQARIRIIAEICSALIFLHKNKPHPVVHGDLKPANILLGVNLVSKLSDFGISRLLIQSSTNNTTLYRTMHPVGTPLYMDPEFLSTGELTPQSDVYSFGIVVLRLLTGKPPVGIKNIVEDAMEKGDLNSVIDTSVGEWPHLHIEQLAYLALRCTELSRRCRPDLSGEVWAIVEAIRDAALSSPSSSRSAQDQNSPPSYFICPISQDIMDDPHIAADGFTYEAEAIRSWLCNGHDTSPMTNLLLEHEELIPNRALRSAIQEWLQQHSMSL

SEQ ID NO: 166596 - protein, 157 aa, Oryza sativa
  unsure (1)..(157): unsure at all Xaa locations
  Clone ID: PAT_MRT4530_6528C.1.pep
SKRKRYILPNSRIMIHQPLGGAQXHEIDLYIHAYDILYYKAISYGFLSFHTVHPLFXINCFTVRHYFLIAYVVYEYGLIDCATMNSLISSQLVSSFIHLLYVQFFTDHIFVYFFTFLILNSFFSIFPFFINSSFHSPYSLFFFYFLFFLVLPFFLSS

SEQ ID NO: 166597 - protein, 36 aa, Oryza sativa
  Clone ID: PAT_MRT4530_65290C.1.pep
MADARFGWSEAGLAILHEDTHKRTIMMDWVQQQEAT

SEQ ID NO: 166598 - protein, 204 aa, Oryza sativa
  Clone ID: PAT_MRT4530_65291C.1.pep
MEIGGVLVSLLFAAFSLPCLLLLLVLAEAGLRLASLALRGGRYAWPTRSDFLGYRIARRRRAAVSGGAGGADGEEEAQPTAECCDRLAVAMYRRGRDAAPVDCVFCLSRVDDGEEVRELRCRHVFHRACLDAWLVLPRATCPLCRDCLLPPPCEPPRSFPLDYYDDDDDVQFGFNDFSITSSTTTTTSAAAAVAYPHGVALWPM

SEQ ID NO: 166599 - protein, 110 aa, Oryza sativa
  Clone ID: PAT_MRT4530_65292C.1.pep
MGQDRACRPSNASAPMAVFMGAGTPPRRVEHRLLARRLCLRDHPAPPPLPPLTGAAPAPPRRTGLLSPSTRRRLAALRPPPRWANRHRLGRVVGRAAAPSLATAPAAPPR

SEQ ID NO: 166600 - protein, 92 aa, Oryza sativa
  unsure (1)..(92): unsure at all Xaa locations
  Clone ID: PAT_MRT4530_65293C.1.pep
RRVGVKPERIVIVRFGEKXIRIPFGWDKFRIVRIWIFSPRYEYEYEVELFFVFQEKDVSLFMSDHFLFLFVFEIICTCFNIQAIRITVFLSR

SEQ ID NO: 166601 - protein, 84 aa, Oryza sativa
  unsure (1)..(84): unsure at all Xaa locations
  Clone ID: PAT_MRT4530_65294C.1.pep
MSNTRVFFDMTEGGAPTGRILMDLYLKDVPRTVDNFRALCTGEKGVGKSGKPLXYKGSTFHRGIPXVMCQGGDFTXGNGTGGGV

SEQ ID NO: 166602 - protein, 323 aa, Oryza sativa
  unsure (1)..(323): unsure at all Xaa locations
  Clone ID: PAT_MRT4530_65295C.1.pep
MPSAGPTRDAPPCPEPNRPFVPATPFTRPVPRHSCRGNCPLCPWFQILRCLFRMGSCVKDALLWWCPCRFAGEVGRRKRRILARGIKFGPCDVGAGLHCQRSISQLEKTVGSDDYIASQPXLDEKADFADVRKRGTSHGREAAKEAHISVSQPAARGPMSDLGFGVGRDSARRGVVRHPFAWVAGETSGAIHVAMRRWGETSGALTPSMVKSNGPSLILNRQQRCIYIRNCQNQATAAPEPQQTLTHENMKQRRRRIIFLQQGLSRFFLFVNTSAPDPLPPVCRAASRLLCTCSATSLRPPSSLFEYCRFIGVVXSCLSLQSC

SEQ ID NO: 166603 - protein, 95 aa, Oryza sativa
  unsure (1)..(95): unsure at all Xaa locations
  Clone ID: PAT_MRT4530_65296C.1.pep
EGEPISLGLGARARVXGPEFGGTWAATAGHGRLRPGKPKVVGGPDKWGRRAHLSGRERRRRPRGLFRLCARGSRSRREGWGRPEREEGRREGRAG

SEQ ID NO: 166604 - protein, 847 aa, Oryza sativa
  Clone ID: PAT_MRT4530_65297C.1.pep
MVRSCGGTLQAEDFAYFHCTRHYTKQNSKFGCVNFAPHPKRGSPWPAVSAIREKWGNKWQSKWFYHQIPVSLLNDKDCPFSFSGKKPKAVSEPSVSLSPEFTAIQPRIEELVLNFSCRDLVEEFVLLKIRPLSSGWDITLGEIPEDCPSSLPPFVVSSDLVIPEDMVRPVRKFLGPYTKDEHLKFLTLQNGKRQNRVFASLGSDIPVRVHPEIVPKLKKKKSVKPSSSSSDDDVEVEDVDEEIGEENAEEEEGEEGADEEENDSSDDSDSSNSSSDNSIDSDEELDEDDIRIDLSAIHVTLIRADASFALSAKEVASLYVVAPANTVVDEDCSTQVGDTVETTNPLRADRDLVAKKAKTPVNAAEKSEAGKSAADGGVRTTGSSNPTPPPSPPFIATPSPELIQNVLGGFSERCAKDGHWLMGLPNFNELGESSHHGPNLCLNDLKYRHPLSSIGDELEKVLITPDLEKEFLEENDLMSSWAALDVSAAQTASLARLQRGVARKALRAICTRRKKSLDRIAKLEKDRDYLRCKLDRMADEKKITTDLVRKLSGEKKELSEEKKLLTEEKKKLLAREKAFERKIIEYQDVARQRAESEDKMKEQVEVLEKKNKELKLACKNQSEKISALELENESCRQLLLKSCETVRIALRSLGADISLLSEENTLAAVGKWFEEFSIGLKDSVTPFASRCSKTAVESLSACLLSNGCEHFTTLKADIQGMLNDEAKFAQLRDAAQPVVKAFQVLYWKKKGYEDTLRSLRASLASRLKSQPASSSQQDKDSSTPSSSAQVNSNRKLVIRRNNTLPTRNVKHLAFRDPAKLSSTRTAISDDELEAYYDNTCIFAFKFF

SEQ ID NO: 166605 - protein, 180 aa, Oryza sativa
  Clone ID: PAT_MRT4530_65298C.1.pep
PTRAPTRPTKFLHTRSSSHCLSEHQRRRPQARRGGAVGGRLSLLEARARRWRLSVGSARARSTRCLAAPGGGGLAPEMRATLDKVVGSHKVVLFMKGTKDFPQCGFSHTVVQILRSLDVPFETLDVLANEALRQGFKEYSSWPTFPQLYIDGEFFGGCDITVDAYKSGELQETLEKAMLS

SEQ ID NO: 166606 - protein, 933 aa, Oryza sativa
  Clone ID: PAT_MRT4530_65299C.1.pep
MGKNKKTAEKSKSKKSKNHENTSCGIGASSIKDKNLNDLVDVVGESRPSPKLGYTLVFEDFFYAGFKFPCSTFLVEVLKLFKLEFPQLTPNALVRIGLFEWMVRSCGETPQAEDFAYFHCTRHYTKQNSKFGCVNFAPHPKRGSPWPAMSAIRAKWGNKWQSKWFYHQIPVSLLNDKDCPFSFSGKKPKAVSEPSVSLSPEFTAIQPRIEELVSNFSCRDLVEEFVLLKIRPLSSGWDITLGEIPEDCPSSLPPFVVSSDLVIPEDMVRPVRKFLGPYTKDEHLKFLTLQNGKRQNRVFASLGSDIPVRVYPEIVPKLKKKKSVKPSSSDDDDDVEVEDVDEEIGEENAEEEEEEEGADEEENDSSDDSDSSNSSSDNSSDSSESDDSKTVPPPTVLADLKRKKTASSPPPEPSSKRVQFVIDSDEELDEDDIRIDLSAIHVTPIQADASFALSAKEVASLYVVAPANTVVDEDCSTQVGDTVETTNSLRADRDLVAKKAKTPVNAAEKSEAGKSAADGGVRTTGSSNPTPPPSPPFIATPSPELIQNVLGGFSERCAKDGHWLMGLPNFNELGESSHHGPNLCLNDLKYRHPLSSIGDELENVLITPDLEKEFLEENDLMSSWAALDVSAAQTASLARLQRGVARKALRAICTRRKKSLDRIAKLEKDRDYLRCKLDRMADEKKITTDLVRKLSGEKKELSEEKKLLTEEKKKLLAREKAFERKIIEYQDVARQRAESEDKMKEQVEVLEKKNKELELACKNQSEKISALELENESCRQLLLKSCETVRIALRSLGADISLLSEENTLAAVGKWFEEFSIGLKDSVTPFASRCSKTAVESLSACLLSNGCEHFTTLKADIQGMLNDEAKFAQLRDAAQPVVKAFQVLYWKKKGYEDTLRSLRASLASRSKSQPASSSQQDKDSSTPRSSAQV

SEQ ID NO: 166607 - protein, 109 aa, Oryza sativa
  Clone ID: PAT_MRT4530_6529C.1.pep
MRALPDHPVNNHTPSSSAPTPALSTSSSSSAATAASRYWEEEKLEVELAKVHGLIAAEMAAGWSVRHVGNARRHVGGELAAALLESLTEEVTAALMMTWSNELGTLPNG

SEQ ID NO: 166608 - protein, 221 aa, Oryza sativa
  Clone ID: PAT_MRT4530_652C.1.pep
MPSPNVLLELCLESSLAICIEHPKNQRKKNLLPNLFPATHPSLSCSPRFTGFTTHIVGDELLSGAISPLSLPGATSIRTAVEYIETAKRPKATPTARQGSHEWVKAAANAVSSSSAFRPLFLLRRGLQGKLMADGSVEWPSTAEDPEVGLGGGPRRQRTPMQADGSVVRWSGLGGGCRSGRSDEVPQRLAVGQSAATRFFLSPVLISSPARWRFMAITEAT

SEQ ID NO: 166609 - protein, 891 aa, Oryza sativa
  Clone ID: PAT_MRT4530_65300C.1.pep
MGKNKKTAEKSKSKKSKNHENTSCGIGASLIKDKNLNDLVDVGWISGRNVVIRPVGESRPSPKLGYTLVFEDFFYAGFKFPCSTFLVEMVRSCGGTLQAEDFAYFHCTRHYTKQNSKFGCVNFAPHPKRGSPWPAVSAIRAKWGNKWQSKWFYHQIPVSLLNDKDCPFSFSGKKPKAVSEPSVSLSPEFTAIQPRIEELVSNFSCRDLVEEFVLLKIRPLSSGWDITLGEIPEDCPSSLPPFVVSSDLVIPEDMVRPVRKFLGPYTKDEHLKFLTLQNGKRQNRVFASLGSDIPVRVHPEIVPKLKKKKSVKPSSDDDDDDVELEDVDEEIGEENAEEEEGEEGADEEENDSSDDSDSSNSSSDNSSDSSESDDSKTLVIDSDEELDEDDIRIDLSAIHVTPIRADASFALSTKEVASLYVVAPANTVVDEDCSTQVGDTVETTNPLRADRDLVAKKAKTPVNAAEKSEAGKSAADGGVRITGSSNPTPPPSLPFIATPSPELIQNVLGGFSERCAKDGHWLMGLPNFNELGESSHHGPNLCLNDLKYRHPLSSIGDELEKVLITPDLEKEFLEENDLMSSWAALDVSAAQTASLARLQRGVARKALRAICTRWKKSLDRIAKLEKDRDYLRCKLDRMADEKKITTDLVRKLSGEKKELSEEKKLLTEEKKKLLAREKAFERKIIEYQDVARQRAESEDKMKEQVEVLEKKNKELELACKNQSEKISALELENESCRQLLLKSCETVRIALRSLGADISLLSEENTLAAVGKWFEEFSIGLKDSVTPFASRCSKTAVESLSACLRSNGCEHFTTLKADIQGMLNDEAKFAQLRDAAQPIVKAFQVLYWKKKGYEDTLRSLRASLASRLKSQPASSSQQDKDSSTPSSSAQV

SEQ ID NO: 166610 - protein, 1122 aa, Oryza sativa
  Clone ID: PAT_MRT4530_65301C.1.pep
MGKNKKTAEKSKSKKSKGHEDTSCGIGASSIKEKNLNDLVDVGWISGRNVVIRPVGESRPSPKLGYTLVFEDFFYAGFKFPCSTFLVEVLKLFKLEFPQLTPNALVRIGLFEWMIRSCGGTPRAEDFAYFHCTRHYTKQNSKFGCVNFAPHPKRGSPWPAVSAIRAKWGNKWQSKWFYHQIPLSLLNDKDCPFSFSGKKPKTVSEPSVSLSPEFAAIQPRIEELVSKFSCRDLVEEFVLLKIRPLSSGWDITLGEIPESCPSSLPPFVVSSDLVIPEDMVRPVRKFLGPYTKDEHLKFLTLQNGKRQNRVFASLGSDIPVRVHPEIVPKLKKKKSVKPSSSDDDDDVEVEDIDEEIGEENAEEEEGEEGADEEENDSGDDSDSSSSSSDNSSDSSESDDSKTVPPPTVLADLKRKKTVSSPLSSGWDITLGEIPENCPSSLPPFVVSSDLVIPEDMVRPVRKFLGPYTKDEHLKFLTLQNEKRQNRVFASLGSDIPVRVHPEIVPKLKKKKSVKPSSSDDDDDVEVEDIDEEIGEENAEEEEGEEGADEEENDSGDDSDSSSSSSDNSSDLSESGDSKTVPPPTVLADLKRKKTASSPPPEPSSKRVQLVIDSDEELDEDDIRIDLSAIHVTPIRADASFALSAKEVASLYVVAPTTTVVEKDCSTQVGDTVETTNPLRADRDLVAKKAKTPVSAAEKSEAGKSAADGGVRTTGSSNPTPPPSPPFIATPSPELIQNVLGGFSERCAKDGHWLMGLPNFNELGESSHHGPNLCLNDLKYRHPLSSIGDELEKVLITPDLEKEFLEENDLMSSWTALDVSAAQTASLARLQRGVARKALRALCTQRKKSLDRIAKLEKDRDYLRCKLDRMADEKKITTDLVRKLSGEKKELSEEKKLLTEEKKKLLAHVKAFERKIIEYQDVARQRAESEDKMKEQVEVLEKKNKELELACKNQSEKISALELESESCRQLLLKSCETVRITLRSLGADISLLSEENTLAAVGKWFEEFSIGLKDSVTPFASRCSKTAVESLSACLLSNGCEHFTTLKTDIQGILNDEAKFAQLRDAAQPVVKAFQVLYWKKKGYEDTLRSLRASLASRSKSQPASSSQQDKDSSTPSSSAQV

SEQ ID NO: 166611 - protein, 71 aa, Oryza sativa
  Clone ID: PAT_MRT4530_65302C.1.pep
MGVEEYFAGKQGRGGEGDEGQGRGCGGAAKGRREAQIRGRMEVPPPRFPGRTYPPPLPLSSGYAHKEAAYR

SEQ ID NO: 166612 - protein, 130 aa, Oryza sativa
  Clone ID: PAT_MRT4530_65303C.1.pep
GKRYNFLFDDELPAEKEKLQKSIKKSKDPNAIEEMKSRITWIDKQLRSHPKKNVESEILREHIKKEREATKTGKRPYYLKKSEIRERKLMNKYNELKEAGKLDAFMEKRRRKNASKDHRYMPYRRNGDGA

SEQ ID NO: 166613 - protein, 36 aa, Oryza sativa
  Clone ID: PAT_MRT4530_65304C.1.pep
KVTNTRRDIARPKVRYMGNASALQLSLCCLLAPWGK

SEQ ID NO: 166614 - protein, 80 aa, Oryza sativa
  Clone ID: PAT_MRT4530_65305C.1.pep
ARPIPTTITTWQWPWMLQREIHPTCAAISVRRAPGFRDHSESLSAREERTPRKQKQQQDCTRDPRVSEPQRALRWVPPAG

SEQ ID NO: 166615 - protein, 66 aa, Oryza sativa
  Clone ID: PAT_MRT4530_65306C.1.pep
CHLGLVDVVNSLDLCGYFARVKVGETSYSCCRPQHMILKERVILSGVVHPVFQYPRFACWYFVVYS

SEQ ID NO: 166616 - protein, 97 aa, Oryza sativa
  Clone ID: PAT_MRT4530_65307C.1.pep
MAGAPDEGEEARIARKLKRIVNARRRNVHGLRKSTNANKRKTARPNSKWTGYMTPTLNEVKTMIVATATQHDKELGVIAEQRNLSLRHLGQLSPAIC

SEQ ID NO: 166617 - protein, 61 aa, Oryza sativa
  Clone ID: PAT_MRT4530_65308C.1.pep
DVNFPRSTICTILLRGVHYKLFPCVLCQQYLLGFSKQNNVLPSTTKNVFKLSACHREMRDI

SEQ ID NO: 166618 - protein, 527 aa, Oryza sativa
  Clone ID: PAT_MRT4530_65309C.1.pep
GHRGRLAPASGRVPETVAHSRRGGKAILLGCRVQITYKLCYESPAGHAAEMYDRWDKTIRHHIVYQVLPSLQDMQGEPLLKNFVHHWENHKVLMKWLKSVCMYLRLAFTNQRSLPPIMDIALNLFKNVVIKSIQEEEERIQNYLKPWTEARLSKTVLLELVSRQAEWLLDDDKSGFRGILAAENDLLDDGKSFLQDFWWFIVMAIAFQQHIRDILQQAVGAAHMEKGKEPSNSIVEALDENFRMICNRNIADFSDGEFFIIFLERLIEQRTCGKLDDDSVEDTLAKVVKLLPYLHSKDYLHLSLPPDMLNCAEAFEKFYQEFHGQATGNRRGRTLTWIYSLGNCNIVGNFEGKSVEMIVSPMQAALLLLFNEDDRLSYNDIVAKLEIMDNDAKVMLYSLSCGKYSILKKEPSNKTIAPDDIFEFNNNFSVKTGKIKVPLHHVDRGDFRASETMEDVRRYRKQNVDCAIVRIMKDRKTLDHEKLVEECKKLCDPYFKVDDDLIQMRIDHLVAENYLARKEGCTYEYLP

SEQ ID NO: 166619 - protein, 36 aa, Oryza sativa
  Clone ID: PAT_MRT4530_6530C.1.pep
ILKNILICWRYSGWSEAAKWLYQYHGQANAVLSKDC

SEQ ID NO: 166620 - protein, 185 aa, Oryza sativa
  unsure (1)..(185): unsure at all Xaa locations
  Clone ID: PAT_MRT4530_65310C.1.pep
MDRGWMYGTIVRHHSKEYRNGVLNFINTMXEDRKRRNNDYMCCPCADCKNEIMFDSRVDVHADMIKRGFMKGNTCXSEAREQESVGDVAAVDRSGGTQNQEDEDGYDIFVPSPLGSEMVDVDHDLLXDMLRDAEDLAYNERDSMKFSRMVCDXKMPLYAGCKAKHTKLSATLDLVKLKASSGCTD

SEQ ID NO: 166621 - protein, 647 aa, Oryza sativa
  unsure (1)..(647): unsure at all Xaa locations
  Clone ID: PAT_MRT4530_65311C.1.pep
MSGLLRWRRLAAVATRAASTLTAPECCSPAVVAPPHRRVQERRKWEGPTSSSSSSSDEHEPRRIRAEAHCPRCSKHMDILFSHRAPPSSSAAAGAGAGGGGYQALNLCPNCRSAYFFRPHLLAPLQGTFVEIGRVRADLLPHDAVRARGASFWEAIRGSSSSRDDGDGGGVAVHVPPGPPXPPQPQRRPRRRRRXGGGGGGGGGAGGGGGGEEGAGKDGWGGSNLGKDLPTPKEICQGLDKYVIGQDRAKKVLSVAVYNHYKRIYHKSLQKGSGADLGGFDGEADDDDGVELEKSNVLLMGPTGSGKHLPPNSKLNVDVMGTVNYFFYNTRSTITERALSTVFLDTLFVSQVADFNVQAAQQGMVYIDEVDKITKKAESLNISRDVSGEGVQQALLKMLEGTIVNVPEKGARKHPRGDNIQIDTKDILFICGGAFIDLEKTISERRQDSSIGFGAPVRANMRAGGISSAQVTSSLLESVESGDLIAYGLIPEFIGRFPILVSLAALNEDQLVQVLMEPKNALGKQFKKLFSMNNVKLHFTDAALRIIAKKAMSKNTGARGLRTILENILMDAMYEIPDAKSGEKRIDAVVVDEDAVGAVDQPGCGAKILYGDGAFERYLSQIKVAGDAAGSEADGEAELSSSRAMGM

SEQ ID NO: 166622 - protein, 68 aa, Oryza sativa
  Clone ID: PAT_MRT4530_65312C.1.pep
MTGERGGERPVEVAVLVAKVGRGERPQQWQSSISVVGKDRLEVPAGTYGDALGGRESELECLRRYNLT

SEQ ID NO: 166623 - protein, 176 aa, Oryza sativa
  unsure (1)..(176): unsure at all Xaa locations
  Clone ID: PAT_MRT4530_65313C.1.pep
KGSGADLGGFDGEADDDDGVELEKSNVLLMGPTGSGKTLLAKTLARFVNVPFVIADATTLAQAGYVGEDVESILYKLLAVADFNVQAAQQGMVYIDEVDKITKKAESLNISRDVSGEGVQQALLKMLEGTIVNVPEKGARKHPRGDNIQIDTKDILFICGGXFIDLEKTISERRQD

SEQ ID NO: 166624 - protein, 106 aa, Oryza sativa
  Clone ID: PAT_MRT4530_65314C.1.pep
MAAATMALSSPVMARAAPSTSSALFGEARITMRKTVAKPKPAAWSGSPWYGADRVLYLGPLSGEPPSYLTGESPVDYRLDRRGLSFTHRYGSRNPAKLTTTSTSLC

SEQ ID NO: 166625 - protein, 70 aa, Oryza sativa
  unsure (1)..(70): unsure at all Xaa locations
  Clone ID: PAT_MRT4530_65315C.1.pep
MEVAVREIATYWFEDQRTCRMISRTPMKVAVREIATYRFEDQRACRVLSNTNGGCGVRDXTCWLENQRAS

SEQ ID NO: 166626 - protein, 91 aa, Oryza sativa
  Clone ID: PAT_MRT4530_65316C.1.pep
YYKKLLQYIAERNGWNLFIYLFSYSLSGIGQLKEGIPGQQSIKTVLGVRPLVIGRGKVEIATRKLNSPFLVNWLGRPSWKPSFPSLEELAE

SEQ ID NO: 166627 - protein, 171 aa, Oryza sativa
  Clone ID: PAT_MRT4530_65317C.1.pep
MFRVWKVSPRNGLHKRVGSLPRLRDFLRGWLNPSNYVEVRKNRTALWIRHSDAVSCLSPTDSAQGLLYSGSWDRTFKVWWINDSKCLESVVAHDDNVNAIVAAFDGLVFTGSADGTVTVWKRELHGKGTKHAPVQTLLKQEHAVNALAVSAVAPELYCGSSDGLVNFWEGE

SEQ ID NO: 166628 - protein, 217 aa, Oryza sativa
  Clone ID: PAT_MRT4530_65318C.1.pep
MVILLQAFKLLNVKEIGYKLTHQIKCLELQATEYSLHHIKVTSVEVAANTSSHGSESSIPCPTTTRQQEKQPLNIEELSDSSEEGVRRAPRTNWKEEENLRFVSAWLNNSVDSVDGNDKKSEYYWKDVADEFNSNMPRNAHTRTVKQMKTHWDNVKRDIAKFCGAYAQVRNTCTSEYFEDMIMEKAHTWYKNQAQQKSFTLEYMWREQKDQPKGPPI

SEQ ID NO: 166629 - protein, 67 aa, Oryza sativa
  Clone ID: PAT_MRT4530_65319C.1.pep
CSLFWPPGFFLFFFRLVFFVELLGDNLFPQGTAFPLFPPSFYSPPFRESWYPSGARSGFSGGAPGCV

SEQ ID NO: 166630 - protein, 112 aa, Oryza sativa
  Clone ID: PAT_MRT4530_6531C.1.pep
MASSPSFSSSSSPSATSAAPASSYYWCYSCDPFVHAAPHEDSIVACPDYGGVILEEMAAASDRSPFNPVIVPHRSPAAVAAGDDDGAGSGLRPLPETMSDFLMGYAFERLLD

SEQ ID NO: 166631 - protein, 82 aa, Oryza sativa
  Clone ID: PAT_MRT4530_65320C.1.pep
MVPGHHGFKCTKLLKFFKIFKLVILKTTSTITIKILSDFGLGKASVRHSDLDLRFTAIGYHVSILRTGTIFFNSAASEDHQF

SEQ ID NO: 166632 - protein, 342 aa, Oryza sativa
  Clone ID: PAT_MRT4530_65321C.1.pep
MAAEVGIGRATCAAWARRRGGGGPARLLVVYGRASTASSPPRIDLHAFDAGASAVAADPLVSFVMGHEEDDAPRAIAVHPSGDEFVCATAKGCRLFKLVTEESSVHLISKDAPTLQSIGPQKCLSFSTDGAKFAVGGEDGHLRIFHWPDLNLLLGEPKAHKSFRDMDISLDSELLVSTSTDGSARIWNIDEGAPLVNLSRSSDEKIECCCFSRDGNKPFLFCTLVKGHNVVTVVLDISNWKRIGYKRLLEKHISTLSVSLDGKYLALGSHDSDFCVVDVKKMEVLHLSKKVHLGSPISSIEFCPTERFLKYCWIVTVAIVCLYCRVVISTSHKWGAECGKCG

SEQ ID NO: 166633 - protein, 605 aa, Oryza sativa
  unsure (1)..(605): unsure at all Xaa locations
  Clone ID: PAT_MRT4530_65322C.1.pep
MHEASEVKIPARPRSNTICNPRLDVIVAANHSVFIKGVLSLAICMQVSTAVGSCDYASTVPAAIVSSGSGVVNHTSYCTCRSIDIMLQLPLPWPLALHLNCXKWSGVVVLCSSNIQSIRKQQAKKQHHSLHELAKRIAMVEPGRARETKVTASASSSAGSDAAVMKKKKKKKKKLVVASRKVDEKDKKQVDYKCSRSSGRDECCKVESRHQQCTEPESPSYRNSSSSSHAGHHHHRAADGKKLGCNSASICKVKQDNPMQQHMRRAEDELKVKDKPPVAEPYCKRRASVSACNISSERSVKKSVKQQQQEASSSLQSSASISASSCSSTAGGGGSFRGMQQLSLRRLSGCYECHMVVDPISGVFRDSSSMRATICSCPDCGEIFVRPDSLHLHQSIRHAVSELGAEDTSRNIISIIFQSSWLKKQSPVCAIDRILKVHNAARTLARFDDYRAAVKAKAMAHRHPRCTADGNELLRFHCATLSCDLGLHGATHLCDHLSCAACAIIRHGFRPPAPGAGIRTMATSGRAHDAVVSSGSEGDRRAMLVCRVIAGRVRREEAAAAAAEEEEEEYDSVAGTTPGLYSNLDELDVFNPTAILPCFVVVYRA

SEQ ID NO: 166634 - protein, 205 aa, Oryza sativa
  unsure (1)..(205): unsure at all Xaa locations
  Clone ID: PAT_MRT4530_65323C.1.pep
HGRVGGRVGELAKRIAMVEPGRARETKVTASASSSAGSDAAVMKKKKKKKKKLVVASRKVDEKDKKQVDYKCSRSSGRDECCKVESRHQQCTEPESPSYRLALRSLFSCRNSSSSSHAGHHHHRAADGKKLGCNSASICKVKQDNPMQQHMRRAEDELKVKDKPPVAEPYCKRRASVSACXISSERXVKKSVKQQQQEASSSLQS

SEQ ID NO: 166635 - protein, 137 aa, Oryza sativa
  unsure (1)..(137): unsure at all Xaa locations
  Clone ID: PAT_MRT4530_65324C.1.pep
MAGKREREFRELGCGGGKGDRGGRFGEEKGYLVMVAAAWGSGRRRRLRSSIGRKGRRAHAAAVAALGGGGGGVRHDAPAXAKQLQRRQDRGDXRDAVGGGVPMAPVAAPTGEEERGGWXGPARLGFGSVGPAAQEGV

SEQ ID NO: 166636 - protein, 124 aa, Oryza sativa
  unsure (1)..(124): unsure at all Xaa locations
  Clone ID: PAT_MRT4530_65325C.1.pep
PPGPFFYPRIGSPMFPLPRFRAFVKHQLVGPGPPPPPQQVRXNFFRQLPPLYHNWFRFXAIPPLLGGLFRELGAPHFGPPLFEVFPASPKGDFEGAGATPPGFFKVGLPPGGGGVFFWLGKFGS

SEQ ID NO: 166637 - protein, 103 aa, Oryza sativa
  unsure (1)..(103): unsure at all Xaa locations
  Clone ID: PAT_MRT4530_65326C.1.pep
CGEVPCWAPPVFTFILPGRRFLGNFGGDPFFPGGGICPYFPPVLNGPHKGKRGSLSGPGLKFKGGPPGXKKKKKXXXXXXXXXXXFFFSKKKKKKKKKKKIFF

SEQ ID NO: 166638 - protein, 490 aa, Oryza sativa
  Clone ID: PAT_MRT4530_65327C.1.pep
MSQFHIFSVLSWVYLFLACDPLKMAMVSVENNLSPPKTLQKLSDSLTSMLPLLSELADIIPRDTLFWKLKLLKSGAAYANSRLHAVQAEVLLLASGNDNLLPSGEEADRLFKSLKNCRVRYFKDNGHTLLLILRKQNLQKYQRNLLMQALPNYFGQEDGVNLLSVIKGVNMYRRGRQRDPVTDYIPPPSSPFKKTFDEDHKLFHLALSPVMLSTLKNGKIVRGLTGVPDQGPVLFVGYHALMGIELSPLYEEFLREKRTSFRGMAHPILFGGKHESSRQELSRFDTISMYGGLPVTAINMYRLFERNQFVLLYPGGVREALHRKGEAYKLFWPDQPEFVRMAARFGVTIIPFGFVGEDDVLELVADYNDQKNIPYLREWIESINREAQRVRDSVKGEDGNQDVHIPALLPKVPGRFYYLFGKPIEMKGMDNVVRDRKSANEVYLHIKSEVESLMSYLKRKREEDPYRSIAQRAVYQASWGASAEVPTFEP

SEQ ID NO: 166639 - protein, 136 aa, Oryza sativa
  Clone ID: PAT_MRT4530_65328C.1.pep
MRKQRRALAPWPALLPRLLHIGGAKFSTLCMLQKHVGSADPTVLTWLHHYSSTSAVSSLYPLSGEPALEVDPRWPGGGKGGIDRRGEAVRTSRGGENRHAEQEADGVDDGVHEEARNESANGTVAGEDAGQNRNQN

SEQ ID NO: 166640 - protein, 218 aa, Oryza sativa
  unsure (1)..(218): unsure at all Xaa locations
  Clone ID: PAT_MRT4530_65329C.1.pep
IPLPSLFPSSHQSFRLPHPLPVLLLSTAPDDARXDAVLAHLADHGYSRNLHLVAELRIERADSAVAFSTPCAAAGGGKKRQCLLLPSSTGHRSTIAFLAFDVDSVDEQAASLAAAGAVGHGDVRGGERERHEEHGLHGDELALALQPQPGPVGHRAERWPWESVPSPSPPPFAAGRDPMFVTAYXMHPYSRGSDFLDSLLELMAAGKMETHMVNMPER

SEQ ID NO: 166641 - protein, 46 aa, Oryza sativa
  Clone ID: PAT_MRT4530_6532C.1.pep
MVVADQLSGALGAMPRVVAELSSEISYCSSTEVVVCGDDSVDAMIL

SEQ ID NO: 166642 - protein, 236 aa, Oryza sativa
  unsure (1)..(236): unsure at all Xaa locations
  Clone ID: PAT_MRT4530_65330C.1.pep
MPRSRRGPPKGANSSVAGAAPRGGRVSGLNQAYNRMAKASRVPNPLATPTTHQGELPGRRVEVKELKFYRGSYSLHSSEVQQPAEQLGHQVAGDGVDLPVAAQEQAPVMGQEGHVPAAPVHAPESDPPAAARSNGVFLGKSKSTGRCLVVSYIGRLRRPRGPPDLAVGGDIELNDLHRRQADPAVSSASSSFANDLHFCDLGGGCSFIPXRHCWIRGQQQRRPSAGHLLHLHPQQC

SEQ ID NO: 166643 - protein, 264 aa, Oryza sativa
  Clone ID: PAT_MRT4530_65331C.1.pep
MSRKEVVVAAAGGGAGAESGAEGSSSAGSSGGGGELAEALARRRLYREVTLALRTGLRDAKADFSFLRARGLRSLLGFLRSTASATDDSQLLLFRHSQSIPDLQVIPVLFQNSLHQPKEDPVVTLDHIFGVEPMKITSPPTDNEIALALRVLEGCCLLYSRCTALAHKYKAVKDFEEFSGLEKVAELLKDVQVEEHIRHIEMWGVPTIANWACLCERKLSHTRTNENFVRRAVRITDMGSKSVWLHSRRGAEADGLANTSKESC

SEQ ID NO: 166644 - protein, 637 aa, Oryza sativa
  Clone ID: PAT_MRT4530_65332C.1.pep
MPFSGGKHHVEPTQSGRPDSQLVKPYGNLPYPKEETLSRHSVLGPNGLHGKWTAPVTGIRIQYPSNAELTKSDVSSLVPSILNQDLLYGPSRSQDFMSMPSSRQAMGEINIEAMARPVSVDHRISIAYYFRIADNLLRQANIYREEKNLVDLYIILLRYSSLLCETIPKHRDYHAFKLREKEFLKKGPHNSDKLLNVVNELETLKPVVLRQIADLNRGVTQEPNSQSGTSAAISQMDHLTQSSCFTQPLVGSPTGLLKMPFSGGKHQVEPTQSGRPDSQLVKSLHIEAHRFKVSSAGWNVGYGNLPYPKEETLSRHSVLGPNGLHGKWTAPVTGIRIQYPSNAELTKSDVSSLVPSILNQDLLYGPSRSQDFPTNKNEDMQSVLSLDDGQLSLPVEEATSVSPGFEEEFSQLNIRQPSPPPVMAQVHPQHRAISTSTVADLGPGIASSSTGRYQNLHVPVTLMECFLRVAEANTANNLETCGILAGTLKKRTFYVTTLIIPKQRSTSDSHSTQKCQATNEEEIFEVQDKGSLFTLGWIHTHPTQTCFLSSIDLHNHYSYQVMLPEAIAIVMAPTDTTRKHGIFHLTDPGGMGVIHDCQESGFHPHEEPLDGTSIYEHCSHVYMNPNVKFDMVDLREL

SEQ ID NO: 166645 - protein, 276 aa, Oryza sativa
  Clone ID: PAT_MRT4530_65333C.1.pep
GKRRPWRAFLLYGPPGTGKSYLAKAVATEADSTFFSISSSDLVSKWMGESEKLVANLFQMARENAPSIIFIDEIDSLCGQRGEGNESEASRRIKTELLVQMQGVGHNDDKVLVLAATNTPYALDQAVRRRFDKRIYIPLPDLKARQHMFKVHLGDTPHNLNESDFENLARRTDGFSGSDIAVCVKDVLFEPVRKTQDAMFFFKADGDMWMPCGPKQSGAVQTTMQELASKGLAAKILPPPISRTDFEKVLARQRPTVSKKDLEVHERFTKEFGEEG

SEQ ID NO: 166646 - protein, 162 aa, Oryza sativa
  Clone ID: PAT_MRT4530_65334C.1.pep
MASLTTTTAAASSPAALPAASTTAPASSVSPAAAAAKRPHLAGDDAPWRAAATGAAGIRPVPRIHHAPVLRVAQDDYSAYALAVMKHPDPIGEGLAMEAMVEAAGPECIVPGQQAPLRLLGLKVWPLDIEMKFLEPFGRELHSMKKLKYKSCSVMDSSMSNK

SEQ ID NO: 166647 - protein, 201 aa, Oryza sativa
  Clone ID: PAT_MRT4530_65335C.1.pep
MMVDNIARREAEADGGASKIAAALGLFGVATASLIINLVAAFDPPQGFAESACYDLALVGSFLAGMGQVGAAIWVADDPRGHRAAVGKKIMIASIAPLVVAIGLTGEALLWSGGHGAFACPAHSMSLSRCCGAFSTPACPHLSVSIRACGGDTAREISLRLGHDLTSSAPAESSVFRGHPLAANLRREDLVGIAVGRRTSD

SEQ ID NO: 166648 - protein, 408 aa, Oryza sativa
  Clone ID: PAT_MRT4530_65336C.1.pep
MYSNFKEQAIEYVKQAVQEDNAGNYVKAFPLYMNALEYFKTHLKYEKNPKIKEAITAKFTEYLRRAEEIRAVLDEGGGGGGANGGDAAVATRPKTKGKDGEGGGDDSEQSKLRAGLNSAIITEKPNIKWNDVAGLESAKQALQEAVILPVKFPQFFTGKRRPWRAFLLYGPPGTGKSYLAKAVATEADSTFFSISSSDLVSKWMGESEKLVANLFQMARENAPSIIFIDEIDSLCGQRGEGNESEASRRIKTELLVQMQGVGHNDDKVLVLAATNTPYALDQAVRRRFDKRIYIPLPDLKARQHMFKVHLGDTPHNLNESDFENLARRTDGFSGSDIAVCVKDVLFEPVRKTQDAMFFFKADGDMWMPCGPKQSGAVQTTMQELASKGLAAKVRLIDISSTAHVRRGF

SEQ ID NO: 166649 - protein, 90 aa, Oryza sativa
  Clone ID: PAT_MRT4530_65337C.1.pep
SEISKGIAVQMGVQHQKVMFIAITGGLENINKLNTVYVTVSSYDKINYYPTCSSSLQSSDTDMVGRWLPEQIQIRMDKCRVRYERDILVQ

SEQ ID NO: 166650 - protein, 60 aa, Oryza sativa
  Clone ID: PAT_MRT4530_65338C.1.pep
QRNRPNLCIMDAYECTERKEMEGYVVVFYNLDVSIKVLEGARFTLSFAFLLLFKYAYLFY

SEQ ID NO: 166651 - protein, 62 aa, Oryza sativa
  Clone ID: PAT_MRT4530_65339C.1.pep
MQTETPVGGGEGRPAAETPVGGSEGMPAMKMWTPIKDGFDYDYKLKRRNMIELRGLFGIELA

SEQ ID NO: 166652 - protein, 187 aa, Oryza sativa
  unsure (1)..(187): unsure at all Xaa locations
  Clone ID: PAT_MRT4530_6533C.1.pep
MSPRVAVVAPATPEESEPVGACALGDDVVANAAPATVAHGEESDAAARLRTWLQSGIRKEKIYTDGTVKWGLLTSTGVSENLQDALKDKNWKLAMDAEYMALIKNNTSHLVPPQKGRNVIDCKWVYKIKRKEDGSLDRYKARLVAKGFKXRYXVDYEGTFSLVVKVCKLFTVITTLAPKTARVKFSS

SEQ ID NO: 166653 - protein, 56 aa, Oryza sativa
  Clone ID: PAT_MRT4530_65340C.1.pep
AYRKVNLYLVSVDWQCHSPTHREDCTFYLMLRVAYLLLRDDIYVQASDTFPIIRPQ

SEQ ID NO: 166654 - protein, 422 aa, Oryza sativa
  Clone ID: PAT_MRT4530_65341C.1.pep
MPLACFAARGGGGAGASSSSSPAPAASATSVYWTHLGTVTLTWSRGQLGLVLAAELHLAGEGAAPALRFLLRPLLPWRRRGCKRFAGGGHAVAFTWDMSRARLAGRRPEPVARNSLHVCVDGELVLAAGDLALLAPSAGFLLTRRENAVAAGGGEAYATTVAVAGGRHEVSIAVEDAVMWVAIDGEKALQVRRLRWKFRGSERLDLPRGRVRVSWDLHGWLFAADAVAVFVLRFETADVADTSKIDMERDAGMLALRQSSFNRKHHHHGGGGGAAAESWCSSDSDRRGWRRGPFRSGSDSSPAVSVASTSAASSAGSMATVADWATAEEAAMNDGGGFSLVVHLWKTKKRRWSETTTWTAPTAVVRRDARRAPPTACSSMSSRARAGDAHEAFDEMLASDNFMVMVKLHVAEAWGILRLNAE

SEQ ID NO: 166655 - protein, 57 aa, Oryza sativa
  unsure (1)..(57): unsure at all Xaa locations
  Clone ID: PAT_MRT4530_65342C.1.pep
VEQRNIRAGVFFRKVVFKDKKQVDYKCKKNSGRNYCCKVGSRNEQAQXPESPCYRLA

SEQ ID NO: 166656 - protein, 72 aa, Oryza sativa
  Clone ID: PAT_MRT4530_65343C.1.pep
CEQLILLARVPSPNKTVARPFEQKLSVTHISPRLTSDPAAKTRTAATSPRRYSTAVSPKLAASATSPRLEGH

SEQ ID NO: 166657 - protein, 94 aa, Oryza sativa
  unsure (1)..(94): unsure at all Xaa locations
  Clone ID: PAT_MRT4530_65344C.1.pep
KKIKPTNPLRIGGGISVQNEASGRKSPGKGGYQFVHKYGAKLGGYSPIYSREERFPPGCPXVGGPPGFLFWAVPLPGFLGGGALLVYNPRALAG

SEQ ID NO: 166658 - protein, 72 aa, Oryza sativa
  Clone ID: PAT_MRT4530_65345C.1.pep
NLLKVFKMHKMTAGDWRTAAARRIAEQGEGRARCPSFLRKARGGPRLTVSGQVPPPPAGSYKEPVVSGAPAG

SEQ ID NO: 166659 - protein, 131 aa, Oryza sativa
  unsure (1)..(131): unsure at all Xaa locations
  Clone ID: PAT_MRT4530_65346C.1.pep
GGEDXXXGATTXXTGLKNXXGXWPGNXTSXQIXRWKXXXXAXXTQXVXXLEKXGXLIRXXSAXTPNQHXXGGFXGGLIKXETXRXECSVVXDFTXXLAXXAGAXGAXXAXLFSTPGDFXEVVXSASXXTTP

SEQ ID NO: 166660 - protein, 164 aa, Oryza sativa
  Clone ID: PAT_MRT4530_65347C.1.pep
MHAIGVNVDAGVDENDRLAKIGPWGGSEGIVKDINVAVAPHHLESVTICSAVVIDSLAFSYSKSNGQKYDIGPWGGPGGMSHTVKFGSSEFLVRVFGTIGPFRASRCVSNGKIVGFFGHARSYVEALGRYSHVGLRTDPELTTALQKGSGSQVLDQTSQARLGN

SEQ ID NO: 166661 - protein, 79 aa, Oryza sativa
  Clone ID: PAT_MRT4530_65348C.1.pep
MAARCPGWVAARRRSALRGCGMKRRAKEEVERRLEGWPAALSAWLGRDGGDGGNEGRGGQHGGAGVQRLGHAQLGAGQE

SEQ ID NO: 166662 - protein, 148 aa, Oryza sativa
  Clone ID: PAT_MRT4530_65349C.1.pep
DRLAKIGPWGGSEGIVKDINVAVAPHHLESVTICSAVVIDSLAFSYSKSNGQKYDIGPWGGPGGMSHTVKFGSSEFLVRVFGTIGPFRASRCVVTSVTFVTNVRSYGPFGQGGGTPFDVPMQSNGKIVGFFGHARSYVEALGVYVRTY

SEQ ID NO: 166663 - protein, 65 aa, Oryza sativa
  Clone ID: PAT_MRT4530_6534C.1.pep
VNTRAASSSMAKHRPPWQSSSMASMGHGMFGWCQVQEVEGNAHDLDACWNSGLGFKLKCLPLGWL

SEQ ID NO: 166664 - protein, 117 aa, Oryza sativa
  Clone ID: PAT_MRT4530_65350C.1.pep
GGFTTRGFPLVPPMARAPEKPFACPGVPWPPSREIRDALSMLEKKRGRGFSGPPPPVYSRWGNRVPFVFPSPPLGGGPKPLIWARGSLFAWGGKKKKKKKKKKKKKKKKRKKKNHPK

SEQ ID NO: 166665 - protein, 96 aa, Oryza sativa
  Clone ID: PAT_MRT4530_65351C.1.pep
MVTTTTDRLIQETQHTVVLLDRLMAITLMLYCSPTNPVPPLVRPKLQIHTTLHLLPDRIWSAKDDSNNSPYRAIRPHGLHKKGRTSHARAQKDLPD

SEQ ID NO: 166666 - protein, 73 aa, Oryza sativa
  Clone ID: PAT_MRT4530_65352C.1.pep
QVFFKISTTFFWMILIWSPCLACNPSPRVVRKEEPKMCSGQVQQLCCSPLLSTIHIYQAIIRFTWEKIINPNI

SEQ ID NO: 166667 - protein, 76 aa, Oryza sativa
  Clone ID: PAT_MRT4530_65353C.1.pep
MARGRAALLIPPLVNSFPQAPLSQIYNIWIIPQVMWLVKKLGEEGPGQDLHASCLSMKIGAMFQEVIPKLQCLFQY

SEQ ID NO: 166668 - protein, 312 aa, Oryza sativa
  Clone ID: PAT_MRT4530_65354C.1.pep
METERIRHLLLLTLRAPHARLALMPDGCVVIRLPDPRVLRVIARSVLLAVALLSLAWLRDAEAPAGDALQVGLLLRDLRREGLLAPGARAVFLGAADGDCHHHPPALDGDDMRRITPRELLTTGDLSVDFVLDFGYFDKDGDRVGLVDRVLKDGGIFAAPIGSASEFRLPPNYRVVYIRRFTETFVGIKKIARVGGDNGIAGARTGMAATTPALKEGVLAFSAQTADTALAELKNFRRKLLLPHITGASAAHAHQAWLKLRHRPVIAVDFPAMWNVNKLQPAHPLVLQDKAVHGAQQQQLNRSVRLNPSTGY

SEQ ID NO: 166669 - protein, 81 aa, Oryza sativa
  Clone ID: PAT_MRT4530_65355C.1.pep
NGRSFFKQIDQDQLSHWKSKLQFYMGQSTWYKKVVQWRGYSIVNPGSIKGGRISIPWAIRAQRGTRFYRYSHFRTIKFIPK

SEQ ID NO: 166670 - protein, 737 aa, Oryza sativa
  Clone ID: PAT_MRT4530_65356C.1.pep
MATNKRVVELERCMLIGVCLLLLCLLHTAEAQLMQHPPADCPETCGNIAIPYPFGIGNNCSLLGPAGDDFTVVCNDSYNPPRPFRGDYEITGIVLEEGVLNASYTAVPYICYSSPNTSQQFTMSFDLAGSPFLISTTGNKFTAIGCNTLAMIIGKEDMTYFTGCISYCGGDVQKAAPDGSPCSGLGCCQTELTPELSFLNVTWGVDGHNDTTNSAWDYSPCSYAFIADKNWYSFKREDLVGNANYFDKKGIPLVLDWAIRSNGSSCPHESGKMANPVVPYGACVSSHSYCVNVTNNGHGYLCNCSDGYHGNPYLPEGCIDINECDPSTYKENPCPGGTCHNLEGGYKCKCNFGRRKDRKNNNSCQPVLSKSATALIATICAIAISSIVLIFLRMEYEKRKLRDHFNKNGGQLLKNIGIKIFTKEEVGKITNNYSIILGKGGFGEVYKGTTNDNQQVAVKRSIAVDDEARKKDFANEVTIQSQINHKNVVRLVGCCLETNVPMLVSAYIPKGSLHDVLHGNGNHVAKYNLTLQVRLEIAIESAEALAYMHSSASQKILHGDVKSSNILLDDDFKPKVSDFGISRLISIEKNHTNFVVGDINYIDPVYMKTGILTEKSDVYSFGVVLLELITRKKARYDGNNSLPINFVKSYMTDSQAREMLDDDITSPEVMDCLHMIGRIAVQSLKEDVDERPTMKHVLEHLHLARSMIPKSTSGQQSGRILIASGINQAIVRFLTSC

SEQ ID NO: 166671 - protein, 106 aa, Oryza sativa
  unsure (1)..(106): unsure at all Xaa locations
  Clone ID: PAT_MRT4530_65357C.1.pep
ADXXXNVWXXFXXXQANQSSSKYSYGIGIKQXRPLRHRARXPHRRGTAAGYGGYGXVGXYCRXGKAXSRNPVPSXRNYIARWCAVAGGRLDSGKQPPXQFLEPFFR

SEQ ID NO: 166672 - protein, 53 aa, Oryza sativa
  Clone ID: PAT_MRT4530_65358C.1.pep
GLLGLLTARFGTWRNPCLHAKAFASPSSPVRPFDEVRPNVPVVYLQQAPHRQG

SEQ ID NO: 166673 - protein, 35 aa, Oryza sativa
  Clone ID: PAT_MRT4530_65359C.1.pep
IRGHDTIKMLQCTEAVELDLMKKHKEDSHTYNTIF

SEQ ID NO: 166674 - protein, 234 aa, Oryza sativa
  Clone ID: PAT_MRT4530_6535C.1.pep
MSFNGKAFSIYLPPLQHVRLSGQAPPSSTACMLAAVDNSAADPVDVNYLTPPQKCIFWFLCKALVGDRCPQNVAVGKGIFSSHLGKSEMTSDTGGVTTFVGAQRAATTRVQSAAWHPSPAPNVQPLGSSRWCGALRQRPTCICRPRCFQGSSRQWLGTMPHHILIHTGSSSSTLSSRRRLSSEKTLLQLTSLPPDRSEPWSGPGEEFVGRGQGRSCPTRPPPRPVAKPNGHNIN

SEQ ID NO: 166675 - protein, 64 aa, Oryza sativa
  Clone ID: PAT_MRT4530_65360C.1.pep
MGSCHVTFKHLRIKGTTVSNLIKLTTAEGRIIMYAAPANYLFHRAFMHGVSFNLKLTKHEREGA

SEQ ID NO: 166676 - protein, 91 aa, Oryza sativa
  Clone ID: PAT_MRT4530_65361C.1.pep
SCGRTRGLCTMAIVGFDGPAAKLAKRKRKNQFRGIRQRPWGKWAAEIRDPRMGVRVWLGSFNSAVEAVRAYDAEALKICGKKAKVNFTEAS

SEQ ID NO: 166677 - protein, 101 aa, Oryza sativa
  Clone ID: PAT_MRT4530_65362C.1.pep
MNQIRWRRASEDIVVTDRARPFETMDYLYQSFEKWKMQSQRSRIFDSLIIKKGIDQGKGGQETPGLFMPRLPGGSKIEPRAPERASWRLGPNPGDSGPILT

SEQ ID NO: 166678 - protein, 93 aa, Oryza sativa
  unsure (1)..(93): unsure at all Xaa locations
  Clone ID: PAT_MRT4530_65363C.1.pep
FLQGANMSPVRGKKLEFGGRSIFFHDCVKRAINCLLRERKVGVCGXXFFFFFFFFFFFFXYIKIYSPYDKRPTYAEIDRLLNCYCKVYIGKSL

SEQ ID NO: 166679 - protein, 313 aa, Oryza sativa
  unsure (1)..(313): unsure at all Xaa locations
  Clone ID: PAT_MRT4530_65364C.1.pep
RKDICMRATCHRIKMFFYXPGLKRDADKMVREXVCQATKEEHXVHIPGLLNPFDIVDMAWSHITMNFIIGXPKSRGKDVISVVVNRLTKYAHFLALFHHYSVEQVVDIFIWIYNIHKLHGMPMGIIIDGDKIFTSCIFQEVXFKSMNMQLRFNTGHLHETNCXTERVNQCLXESYMRNMTFQEPQHWYLWSALAEWXYTTYHTTIEMTLFKALYRYTXQLGGFNIVVRYGAAVRVTGDEHAAEVSSLGEPAISIVQGVFPNPVEXNPSHRQLRIPNFAYLKLQPYRRTSFGIRGSLKLRLKFYGPFTITRKIG

SEQ ID NO: 166680 - protein, 115 aa, Oryza sativa
  Clone ID: PAT_MRT4530_65365C.1.pep
PTRPVASFFFDRAAEAGFVNPKAPFAKVKPSDFEEAARRVCKLNVKDAQATYPDVSEENVPYLCMDLVYQYTLLVDGFGVDPYQDITLVKKVPYSNSFVEAAWPLGSAIEVASSS

SEQ ID NO: 166681 - protein, 185 aa, Oryza sativa
  Clone ID: PAT_MRT4530_65366C.1.pep
MAKGGGALLPMSAEAGKGNGGGGGGGDDAALFKGSAMTRRGAVAALSYMACSDLRILLRTTPLSLAYLLYMLASMESVRGVNVPMYTTLRRTTAIEFPYLYSPGFQAVLLFSCMLAFLLNYTIFWNTILNSALTQSMCGNLKDFFTVGIGWVLFGGLPFDLLNVIGQGLGFLGSGLYAYCKIKGK

SEQ ID NO: 166682 - protein, 196 aa, Oryza sativa
  Clone ID: PAT_MRT4530_65367C.1.pep
MAKGGGALLPMSAEAGKGNGGGGGGGDDAALFKGSAMTRRGAVAALSYMACSVLLVMFNKAALSSYNFPCANVITLLQMVCSTGLLYVLRRLKIISFTNSEPSVPSDALFFVPFRILLRTTPLSLAYLLYMLASMESVRGVNVPMYTTLRRTTVVFTMTMEYFLAKQKHTPPIIGSVALIVFGAFIAGARDLSFDA

SEQ ID NO: 166683 - protein, 94 aa, Oryza sativa
  unsure (1)..(94): unsure at all Xaa locations
  Clone ID: PAT_MRT4530_65368C.1.pep
DAKVLGTDGLNAYLNKYRIELDPXLEALVGRHSXXPGQSLLTADNQHLVSPEAIDFLDKLXRYDHQDRLTAREAMVHPYFQQVXRAAENSRTRA

SEQ ID NO: 166684 - protein, 553 aa, Oryza sativa
  Clone ID: PAT_MRT4530_65369C.1.pep
MSALQSWRKAYGALKDTTTVSLANLNSDFKDLDVAIVKATNHVECPPKERHLRKIAAATSIGRPRADVAYCIHALARRLAKTRNWIVALKTLVVIHRLLRDGDPTFREEFLTFTQRVRILQLSNFKDDSTPVAWDYSSWVRTYGLFLEERLECFRVLKYDIEAERLSKQGQGPEKGHSRTRELDSPDLLEQLPALQQLLYRLIGCRPEGAANSNYLVQYALALVLKESFKIYCAINDGIINLVDKFFEMPRHEALKALEIYRRAGQQPPQSFLSTMEEYVREAPRMVPIKEPLEFPERLLLTYKPEESEEIPEPVSAEEEKPQIEEPAVAVPSTEVVPPPPPKPEVVDTGDLLGLSDPTPSVSAIEESNALALAIIPTGGETSTSGTATLQDKGFDPTGWELALVTTPSTNTNSMAMDSNLVGFLTLSLRIFMGGGFDKLILDSLYDEGTYRQQMQQQQLYGSAAPNPFMASDPFAMSNQVAPPPSVQMASMTQQPQQMPMMMQPNPFGPPLQPQHAGIAQAPNPFLDAGFGPFPASNGMHPQANPFGTAQLL

SEQ ID NO: 166685 - protein, 33 aa, Oryza sativa
  Clone ID: PAT_MRT4530_6536C.1.pep
IAPFPINVVQVADAAQQVIKASGPTSRPIQPTR

SEQ ID NO: 166686 - protein, 220 aa, Oryza sativa
  Clone ID: PAT_MRT4530_65370C.1.pep
MAARPATDGEGVDASVPWWRRKRPRLPPPPPEADAEEVKAEALALMAAHPVLPRLVVFDLDHTLWPFQCDRLPKDEPPYLYPQARGILKALKDRGIEMAIASRASRKKGVAKAFLEKLGIHFMFGAQEIFYTWSPKNEHFQSIHRKTGVPFKSMLFFDDEARNIIATRKLGVSCVLVDTGITLEKLRTGLSNYANRSASPNAEAAGRSAEITWDLDGATG

SEQ ID NO: 166687 - protein, 33 aa, Oryza sativa
  Clone ID: PAT_MRT4530_65371C.1.pep
KTQSLTQRNLAKLVELDVSINKFGYPVEASHVP

SEQ ID NO: 166688 - protein, 297 aa, Oryza sativa
  Clone ID: PAT_MRT4530_65372C.1.pep
MAARPATDGEGVDASVPWWRRKRPRLPPPPPEADAEEVKAEALALMAAHPVLPRLVVFDLDHTLWPFQCDATTSGIGSYMFCITTESLSMCIYKLHRDYGKCVWVLENFLASLLVFHIQQTGNGTVIRATGIISAAIEMIVKFLGDRLPKDEPPYLYPQARGILKALKDRGIEMAIASRASRKKGVAKAFLEKLGIHFMFGAQEIFYTWSPKNEHFQSIHRKTGVPFKSMLFFDDEARNIIATRKLGVSCVLVDTGITLEKLRTGLSNYANRSASPNAEPAGGRSAEITWYLDVATG

SEQ ID NO: 166689 - protein, 93 aa, Oryza sativa
  Clone ID: PAT_MRT4530_65373C.1.pep
LCMLVLLPSEASCLEGCVPSYASNRKTWNLPSRCRCISIVATEEGSAIEAGARHRDTRAVADVRVLHAVHDALLHLSLHHRADHHAAPIGRHG

SEQ ID NO: 166690 - protein, 44 aa, Oryza sativa
  Clone ID: PAT_MRT4530_65374C.1.pep
KNGQFIVGKQLVGIYGVSYFLFGRGIKRIVGDYKSFGRFCIGLE

SEQ ID NO: 166691 - protein, 127 aa, Oryza sativa
  Clone ID: PAT_MRT4530_65375C.1.pep
MHRSMASQAVAPLLLILMLAAAAGGASAAVQCGQVMQLMAPCMPYLAGAPGMTPYGICCDSLGVLNRMAPAPADRVAVCNCVKDAAAGFPAVDFSRASALPAACGLSISFTIAPNMDCNQVTEELRI

SEQ ID NO: 166692 - protein, 109 aa, Oryza sativa
  unsure (1)..(109): unsure at all Xaa locations
  Clone ID: PAT_MRT4530_65376C.1.pep
NHTTEKLHIDRELRXCRDECNLGPPSACSTLDKPAIPIRLPLRRLHKNGGLLLSHRFWIKHNRTQQEMSTEFVIKSEERELNPNNKPCMEQAGRKHIERRSPHLNPQTN

SEQ ID NO: 166693 - protein, 159 aa, Oryza sativa
  unsure (1)..(159): unsure at all Xaa locations
  Clone ID: PAT_MRT4530_65377C.1.pep
WSHQARRPSPRSAAVDLVGAARRSTAMVAWQGXGEEEQGGDAAGRGKEEQGGGGAGRCEEVHGDEVQGGAKRRRLGSGPRRWHRYAGGPRGRRGRGAQGGVAERRPRTAVRRGGPGRGEEARGAGAAGSGEEARGGGAAGHVDVVHGGATVAACSAGAV

SEQ ID NO: 166694 - protein, 110 aa, Oryza sativa
  Clone ID: PAT_MRT4530_65378C.1.pep
MSPREMMEEMSEDYTCVIARGANPRTTHIFDNRVVESSGDGEYFPPELWPPSAAGKGDDDGDGDFLRYCHGCSKDLGLGKDIFMYRGEKAFCSHECRYHEMLFDEGIEEL

SEQ ID NO: 166695 - protein, 79 aa, Oryza sativa
  Clone ID: PAT_MRT4530_65379C.1.pep
MVAILHPQGQKDHADTGIKIGWNWAGKEGGAPLPTPKLGFLETSVSWLTWLQNNNATGIINKRNARTRELEFTFRMQRS

SEQ ID NO: 166696 - protein, 615 aa, Oryza sativa
  unsure (1)..(615): unsure at all Xaa locations
  Clone ID: PAT_MRT4530_6537C.1.pep
MAKELELLKCVLPDKFVAGCIIVKLSPSWRCFSTALKHKRQEYSVEGLIASLDVEEKVREKDAASKGDGGQSSANVVHKGPKQVQREIQTSAEHQLQEKKTKNSSPNQDERTSFVCELHCHLEVSTTQGMMAPVGQSSKSANVTIDNTGDRSRYGANAHVCADISQFSSYQITQDSTVLMGNRSHASVHGVGMEDYSEAPQRSKRQRMTKSFGDYFTVYLVDDTLKSISEAYASPDPDYWKEAIRSEMDSILTNETWEVIKRPYRCKSVRCKWVFKKKIGTIEKYKARFVVKGYTQKEHKYFLDIYSHVARLTTVHVLLFLAASHSFLVHQMDVKTTFLNGELDEEIYMNQPDGFVVEGQEVXGFAVNEADKCVYYHHGVGFGXADVILNIKLIRGEDKITLLQSHYVEKILSLFGYIDSKASPTPYNPSLLLRKNKRISRNQLEYSQIIGSLMYLASATRPGISFVVSKLSRFISNTGYDHWRALDRVMRYLKGGGAISWRSCKQTILTRSTLEAELTALDTTTVEAEWLRDLLMDLSVVEKSVPTIVVNYDNQTVRRRRKKIDEDLVWNRVEFGVRLRIGWTPYRLYIEYELIKVDEADGRYYRYESNQLAHP

SEQ ID NO: 166697 - protein, 57 aa, Oryza sativa
  Clone ID: PAT_MRT4530_65380C.1.pep
MTEMPSSAAAEREAVWGCIWAVGLIRSVPIRVAGQHATSSALVSEREDGCAGEKIEG

SEQ ID NO: 166698 - protein, 37 aa, Oryza sativa
  Clone ID: PAT_MRT4530_65381C.1.pep
WEAFAAGEGTIDFPKVKVEHQQQQPEAAAAAAVSTRG

SEQ ID NO: 166699 - protein, 63 aa, Oryza sativa
  unsure (1)..(63): unsure at all Xaa locations
  Clone ID: PAT_MRT4530_65382C.1.pep
QLKKLECKLWDSGVXPWDTCVRAMLGVVMCXCYNQLLDKPHQKKMPGNVNAVQATGTVSAGFN

SEQ ID NO: 166700 - protein, 330 aa, Oryza sativa
  Clone ID: PAT_MRT4530_65383C.1.pep
MAKHGVASVLTLALVLGVAAIPTVVQSIGVCYGVIGNNLPSPSDVVQLYKSNGIDSMRIYFPRSDILQALSGSSIALTMDVGNDQLGSLASDPSAAAAFVQNNIQAFPGVNFRYITVGNEVSGGDTQNILPAMQNMNSALSAAGLGNIKVSTSVSQGVTAGFPPSAGTFSASHMGPIAQYLASTGAPLLANVYPYFAYVGNQAQIDINYALFTSPGTVVQDGGNAYQNLFDAIVDTFYSALESAGAGSVPIVVSESGWPSAGGTAASAGNAQTYNQNLINHVGQGTPKRPGSIETYIFAMFNENQKGGDETERHFGLFNPDQSPAYSINF

SEQ ID NO: 166701 - protein, 42 aa, Oryza sativa
  Clone ID: PAT_MRT4530_65384C.1.pep
MHKMLKGGFVTSAHRELTQTGGWFIFFKALKMGLSFIFSGFF

SEQ ID NO: 166702 - protein, 194 aa, Oryza sativa
  unsure (1)..(194): unsure at all Xaa locations
  Clone ID: PAT_MRT4530_65385C.1.pep
CPPSPSRSQHRSPPPRLPDAAHQTRCPPPPPPPEQEEVAEPPPPPPGALGGRTAVPNSKSVSHAAPPPPPPSPAFGXPGPLLPIERHGRGVNGVRRPRPEPXRRRRRPPPPHPRRHRGHPRCPPPNLPGEAETAPRPPLAVFPETPPPPRFSSPLSSGAATGGAPRVPLPSPPMSCRAAPWGRPSLPGGRPSPG

SEQ ID NO: 166703 - protein, 79 aa, Oryza sativa
  Clone ID: PAT_MRT4530_65386C.1.pep
EAGTPAGAGTLYSGRPTRSPTLPGSTNGSHLVGKIDYLCIDLIGQHTITYLTSDETDYVNASSMLTCASSDDPFGSRTV

SEQ ID NO: 166704 - protein, 82 aa, Oryza sativa
  unsure (1)..(82): unsure at all Xaa locations
  Clone ID: PAT_MRT4530_65387C.1.pep
VXSNXSRVEKERSGXXSAVXSSDPMALALYXXAAAAAXAAAXXLAXXXTTTXGYAASGHXSXNEANVSXEXKRRALRGLRRR

SEQ ID NO: 166705 - protein, 104 aa, Oryza sativa
  Clone ID: PAT_MRT4530_65388C.1.pep
TQKIRPGKNPHLREKGWEKRGGKTPKKGAKNPGGPGPGKSPGKPNPPLTAPRPRVGPQQGGFPHGPPLFFLKGGPGFPPLGGRPNPPGPPPGAIRDPTTGPPPP

SEQ ID NO: 166706 - protein, 93 aa, Oryza sativa
  Clone ID: PAT_MRT4530_65389C.1.pep
LLGFSRVSLRKSELIIDDEIYTSMIRIIYRIDKYVYVLKISDKLDCMIIMPFNHCFVQCSLYLPEINRFLLLYHVQCLLLNCSGSFYLIFWCF

SEQ ID NO: 166707 - protein, 91 aa, Oryza sativa
  Clone ID: PAT_MRT4530_6538C.1.pep
MAVVMVADGGGWRRWWLWQWRWRLSTMVPMAAMVEGHHPADGASSSTAGIAGESLAKPFGRLTTATPFGVVPLLGGVVLAYPFPFPTIFSG

SEQ ID NO: 166708 - protein, 78 aa, Oryza sativa
  Clone ID: PAT_MRT4530_65390C.1.pep
FLTKLNTQYIYLDPRKYEKKKGKKTYYLILAIFWGKKFAKYKAYCLVVASEVLEGGESLRLAASRGGFAAKRGRTSPS

SEQ ID NO: 166709 - protein, 218 aa, Oryza sativa
  Clone ID: PAT_MRT4530_65391C.1.pep
MALSDLRFTMGEFELGTPTGRAYSAFPSALMPLINQHGFELFVTINGQYNFYQTQLISQYGLSQQQIERCIHFLKQLNIAYGFVTTDQIAVSENNLMVHEALSPIKADYIVDAEHYRQHNVMQLLAFYPQERDHEIFNTGIFQQDLKVPRWHQNAVDILCKQHSKAQGIKDVIKHFNLNLANTLAFGDGFNDLEMLETVGVGVAMGNAEESCKQLADF

SEQ ID NO: 166710 - protein, 172 aa, Oryza sativa
  Clone ID: PAT_MRT4530_65392C.1.pep
MVFVVVCTSANPNRRLLPLAVADKELRAERRCDRPRRGCRGPRLPCGAKTSRGALILAEPSRAAQKVAIYNKAVLDKQEEQKKLDEALSAPEDPRTAQLELLPLLGKNLPDLNVTVYDRRSARIRNAYNGQRVAEAVQSSSGSDKCSRTTKRKTGHPRSFGGFDPGFGLRGG

SEQ ID NO: 166711 - protein, 109 aa, Oryza sativa
  Clone ID: PAT_MRT4530_65393C.1.pep
SSASAEHHAAAPAITVTGARSVTARGGRKRPPRRGWHRQILCSLATHHRRGVAARCRRGRRYTQVRRIHPPSPSRGRRRQIRRPPSPRHNRTRGRQIRHRCRGRVAASH

SEQ ID NO: 166712 - protein, 1155 aa, Oryza sativa
  Clone ID: PAT_MRT4530_65394C.1.pep
MSRHLLLLLALLLLLLLFPLATSAQPPPPSNTSASTSAAAVLLSFLDSLPPASQRLLLPSWRQSRSSSSSGNATAPPPHCAFLGVTCSDTGAVAALNLSGVGLTGALSASAPRLCALPASALPVLDLSGNGFTGAVPAALAACAGVATLLLGGNNLSGGVPPELLSSRQLVEVDLNGNALTGEIPAPAGSPVVLEYLDLSGNSLSGAVPPELAALPDLRYLDLSINRLTGPMPEFPVHCRLKFLGLYRNQIAGELPKSLGNCGNLTVLFLSYNNLTGEVPDFFASMPNLQKLYLDDNHFAGELPASIGELVSLEKLVVTANRFTGTIPETIGNCRCLIMLYLNSNNFTGSIPAFIGNLSRLEMFSMAENGITGSIPPEIGKCRQLVDLQLHKNSLTGTIPPEIGELSRLQKLYLYNNLLHGPVPQALWRLVDMVELFLNDNRLSGEVHEDITQMSNLREITLYNNNFTGELPQALGMNTTSGLLRVDFTRNRFRGAIPPGLCTRGQLAVLDLGNNQFDGGFSSGIAKCESLYRVNLNNNKLSGSLPADLSTNRGVTHLDISGNLLKGRIPGALGLWHNLTRLDVSGNKFSGPIPHELGALSILDTLLMSSNRLTGAIPHELGNCKRLAHLDLGNNLLNGSIPAEITTLSGLQNLLLGGNKLAGPIPDSFTATQSLLELQLGSNNLEGGIPQSVGNLQYISQGLNISNNRLSGPIPHSLGNLQKLEVLDLSNNSLSGPIPSQLSNMISLSVVNISFNELSGQLPDGWDKIATRLPQGFLGNPQLCVPSGNAPCTKYQSAKNKRRNTQIIVALLVSTLALMIASLVIIHFIVKRSQRLSANRVSMRNLDSTEELPEDLTYEDILRATDNWSEKYVIGRGRHGTVYRTELAVGKQWAVKTVDLSQCKFPIEMKILNTVKHRNIVRMAGYCIRSNIGLILYEYMPEGTLFELLHERTPQVSLDWNVRHQIALGVAESLSYLHHDCVPMIIHRDVKSSNILMDAELVPKLTDFGMGKIIDDDDADATVSVVVGTLGYIAPEHGYSTRLSEKSDVYSYGVVLLELLCRKMPVDPAFGDGVDIVTWMGSNLNQADHSNIMRFLDEEIIYWPEHEKAKVLDLLDLAMTCTQVSCQLRPSMREVVSILMRIERSNHVQFFEEAP

SEQ ID NO: 166713 - protein, 175 aa, Oryza sativa
  unsure (1)..(175): unsure at all Xaa locations
  Clone ID: PAT_MRT4530_65395C.1.pep
MDSSPACEENRAPVGFSGNQAAAEVAHAAAMLMAAAAWRSGGSSGCGARPEVAASGGASGEWRGGGARAGENGGEGGDVGTRSGGADVXKRAAWGGGGAGGCSSAPTGWRRKTGPTGGPHLSVTRREEGGRRGSGPTRRRAAREEWADGLKEEKKRGKEKDFPGIIYCGLMFLIG

SEQ ID NO: 166714 - protein, 51 aa, Oryza sativa
  Clone ID: PAT_MRT4530_65396C.1.pep
RGFSRTGRPPVGLCEPPVKAKRASGMKLNLAVDLSLILNKCGKICPSDFTC

SEQ ID NO: 166715 - protein, 94 aa, Oryza sativa
  Clone ID: PAT_MRT4530_65397C.1.pep
KNYFFKKGGGFLSTGQRGPWGQNKRDQDIKTLGGGGGEKRTRGMGGGDTHHHTGANNKTKTPKTKNKKPGKGKTPKKNRETNKSKPWGEGRALT

SEQ ID NO: 166716 - protein, 201 aa, Oryza sativa
  Clone ID: PAT_MRT4530_65398C.1.pep
MQNDIVSLAGLHAHETCQWAPYVCALALPRKQPARVENGRSDGHRRGAAISGQAEAMSPCPHACDMSPRPTSHPAEEETTRKRTTARQNSTPVTYTVRSALMHVIAPSQVQNHRQRYNWHTDITTRIDIAATPKDECGRRRIRRLRGACGDFVNLKGLPAQSSKMSIGCHTCHGTHAAASCRGVPAEEETTSRIPHPHAVQ

SEQ ID NO: 166717 - protein, 325 aa, Oryza sativa
  Clone ID: PAT_MRT4530_65399C.1.pep
MHTTELVGKREKEDRASAGDGGAATAEEDRADAGNGDAATADEDRKGDNELEYSEQVCALNFTVEHIEASQRVPLPQTNDSSVSASHTVQDGCPLPEDNDTHFHSYTFLAHPTGALEFPTYDGKGDSLPCRCDRLELNAGAPSWRRFVQLVHTRFGPTMIDGPLSELMALWRTGMVEDYINSFLALVYCDAMLSENQHVQLFTAGLVNPLKTDCRHGEWRPRDVARSVSAQRVKINNCPGCTFDIDFYVLPLGAMTTSWVRIDTLPPPVHSMAIDGTSGELMNKLLNDFINIFAEPQGLTSEQHMCHSIRLEHMEFAVVVHPVET

SEQ ID NO: 166718 - protein, 113 aa, Oryza sativa
  Clone ID: PAT_MRT4530_6539C.1.pep
SIPTLLHRKLRSLLLTVTIANKTYNWPTPKMLYLLPLNPDHHPPQIILLSITVNPYTYHSLLVILLSITSLLLRPLPPELVRPPRPPRVGALPPPLRSRTLQRTRDAMLGSTH

SEQ ID NO: 166719 - protein, 112 aa, Oryza sativa
  Clone ID: PAT_MRT4530_653C.1.pep
SRSNCHPKPSRCPLEFILHTDKGLLDKAFVLAQALRSVVSGVIISIKKDHGISRVCNCLVVGDGGNNHVSKSPKYAHRWKVVRSGLFCERMSSNPQHKIAVTLRPRQLCFHH

SEQ ID NO: 166720 - protein, 41 aa, Oryza sativa
  Clone ID: PAT_MRT4530_65400C.1.pep
RNLGQAQAQALLALNLPSRYGISPRDYSAPSSIPPLGGVLY

SEQ ID NO: 166721 - protein, 253 aa, Oryza sativa
  Clone ID: PAT_MRT4530_65401C.1.pep
MAGKKRQNKRNGKVSKPQAEPKKVTEKQEDLISKLPDDILLHILSMCPYHDAVRTAAVSRRWQHLHTRLPNVRFRMSVLGNLASLGESSEPRVQSMERMLRQRCHDDGGLHDTIETLHIGYRKDVPFECRYANEFVALANASRLELHVQCKRGLPDEDAGVWSLELPPATTELELGLYWYAVRPPRVRGPGVTSLRWLALDGLTVLRPSDFLSTVVFPSLEELHIVDCTLPASIDITSDTMPRLKRLRITDVT

SEQ ID NO: 166722 - protein, 256 aa, Oryza sativa
  Clone ID: PAT_MRT4530_65402C.1.pep
MAARPCRAAEGLGAAYTRVRTNYTKLTTLVLKELKRVATTQPASSSEITTIYEVVQNSENLRMSKGQMVHEIHSKNSWNKEMRLSTYSTALDSTLKTCSRFISLWLIGNNLHNLELWRLEVASHDLHVVKYLLDLLGLNYEDVLPIYIGDDTTDENAFKVLDSGPIYIGDDTTDENAFKEKLQQAHDIFYFYKVHEIHLKDSRNKGNVVKYMLDRLGLNSEDVLPIYIGDDTTDENAFKVMEFLCLLASWRELSQS

SEQ ID NO: 166723 - protein, 153 aa, Oryza sativa
  unsure (1)..(153): unsure at all Xaa locations
  Clone ID: PAT_MRT4530_65403C.1.pep
MDGHGKEGSSNGASGGGGGGWSDQCDVVARAFVEYYYQTFDTNRAALAALYGQTSMLSFEGHMVAGAEEIGRKLLGLPFEQCRHAVCTVDCQPTPSFPGGILVFVSGNLQLAGEEHQLRFSQFGNGLISCLCYDLIXMFQLVPNEQGSFFVQN

SEQ ID NO: 166724 - protein, 439 aa, Oryza sativa
  Clone ID: PAT_MRT4530_65404C.1.pep
MAASSLLRSLSRISRRGCVGGAGPSPFHHSRLPYSPFSTAAADAVERRGFAGLGPTAKGEKARVVVLGTGWAGSRLMKDIDTTGYEVVCVSPRNHMVFTPLLASTCVGTLEFRSVAEPLARIQPAVSKSPGSYFLLARCTAVDPDAHTIDCETVTEGEKDTLKPWKFKVAYDKLVFACGAEASTFGIRGVTDHAIFLREVHHAQEIRRKLLLNLMLSDVPGISEEEKRRLLHCVVVGGGPTGVEFSGELSDFIIRDVKQRYSHVKDYIHVTLIEANEILSSFDVRLRQYATNQLTKSGVRLVRGIVKDVQPNKLILDNGEEVPYGLLVWSTGVGPSSFVKSLPFPKSPGGRIGVDEWLRVPSARDVFAIGDCSGFLESTGKDVLPALAQESKGISLAGFVSWFIWRSAYLTRVVSWRNRFYVAINWLTTLLFGRDISRI

SEQ ID NO: 166725 - protein, 214 aa, Oryza sativa
  unsure (1)..(214): unsure at all Xaa locations
  Clone ID: PAT_MRT4530_65405C.1.pep
PRVRTKSGVRLVRGIVKDVQPNKLILDNGEEVPYGLLVWSTGVGPSSFVKSLPFPKSPGGRIGVDEWLRVPSARDVFAIGDCSGFLESTGKDVLPALAQVAERQGKYLAHLLNHVMKAGGGHANCEIDVDLGPAFVYKHLGSMATVGRYKALVDLRQSKAGYCXESKGISLAGFVSWFIWRSAYLTRVVSWRNRFYVAINWLTTLLFGRDISRI

SEQ ID NO: 166726 - protein, 91 aa, Oryza sativa
  Clone ID: PAT_MRT4530_65406C.1.pep
MGEEAVVMEAPRPKSPPRYPDLCGRRRMQLEVQILSREITFLKAEVNHGAINPRLARQAWPSLGVAPWLYYLCRCLVGLLVGEKKSVGMDN

SEQ ID NO: 166727 - protein, 103 aa, Oryza sativa
  Clone ID: PAT_MRT4530_65407C.1.pep
RFTIRRWTKKHKNNGTFFLKKKFFLKGNNPHLILLSPKNKGLTPLGYKNCTAKDICLSLQKPGGKTLFTSPSWEHFLSAPQDCDKSYWGDPCKDPPRWGFFPQ

SEQ ID NO: 166728 - protein, 84 aa, Oryza sativa
  Clone ID: PAT_MRT4530_65408C.1.pep
MEAHRRPNDGGATETGNGVTKASGGGSTAYGAAAIRVGGSALLRGAQYVDCACRARRCARAGVDAEIYALMQIVARTIFQHHII

SEQ ID NO: 166729 - protein, 181 aa, Oryza sativa
  unsure (1)..(181): unsure at all Xaa locations
  Clone ID: PAT_MRT4530_65409C.1.pep
RVASRGHRVSFVSTPRNIARLLPVSPAVAPRVDLVVLPLPHVDXLSFGAECTNDVPSDKFELLWKAFDALAPPFAEFLGAACXWEPEPFRQVVTFMKKRLVPLGLLLPSPDGGRRRTAEMVDDATMQWLDAQPPDSVVYVALGSEVPLRVKLVHELALRLELAGTRFLLALRKPCGVDDSD

SEQ ID NO: 166730 - protein, 82 aa, Oryza sativa
  Clone ID: PAT_MRT4530_6540C.1.pep
VQRSFIGIRVSPPADNAFECMDSINKKIYQRLERDVVTSFLPVYTWYGRPIKSCVGGISYIWRENLWQDFCQGSRWSANYEC

SEQ ID NO: 166731 - protein, 101 aa, Oryza sativa
  Clone ID: PAT_MRT4530_65410C.1.pep
SKIGLRLVTDQLKMPNHLRWGPRTLAYVITRSARHQHVPMSAQCTGWCSVMVRLGTWRNGAQRQRQLRTETDCMVGPPASLIRRAACCLINSGLQVADNLI

SEQ ID NO: 166732 - protein, 480 aa, Oryza sativa
  Clone ID: PAT_MRT4530_65411C.1.pep
MAAPQASPSPSAQVVGNAFVQQYYQILHQSPDLVYRFYQDASRLGRPPADRYGDMVSVTTMEAINEKIMAMDMSRAEIKTVDSQESLGGGVTVLVTGHLTVRDGVCREFSQSFFLAPQEKGYFVLNDMFRYVGDGPTPAAAAAAEVQPEADAVAPPLANGTATAPLQPAAPDYDAMPHEEPDVVENVAVPPEEEEEVYNPPLEEVEGGAVEEEQSVPEVINEVPNNVVPVVAPADAPVSHEEAPKKSYASIVKVMKEAPVPAPIPATRPAPAARPAPPKPEKQSPAPPAPAPVADATPFSSNAESSNTHEPEVDAHAIYVRSLPLNATTTQLEDEFKKFGTIKPDGIQVRSHKIQGFCYGFVEFEEATAVQSAIEASPVMIGGRQCFVEEKRTPGSRGSSRGGRFAPGRGNNNFRADGMRGRGNYSGGRSYGRGDFSYRSDYGGRGGGRGGSARGPDVGYQRVDGGRGGRTSAGPGAPAK

SEQ ID NO: 166733 - protein, 67 aa, Oryza sativa
  Clone ID: PAT_MRT4530_65412C.1.pep
GRFGRCLLKKWELENFPGIYRPGFPEPHYFIGPCSEDWRKKTFSQFLFGGTQTHQGLLAEPLKQLAS

SEQ ID NO: 166734 - protein, 51 aa, Oryza sativa
  unsure (1)..(51): unsure at all Xaa locations
  Clone ID: PAT_MRT4530_65413C.1.pep
MSGTTIAFVLDDLRRRREKEGDQHQQLEWGVMLAFGPXITIEAMVLRNPLS

SEQ ID NO: 166735 - protein, 171 aa, Oryza sativa
  Clone ID: PAT_MRT4530_65414C.1.pep
MAKDSDMGPTNAHAQLAASVHNAGNGRLCQVGADKFGNRYFTRVEEVDGVMEEKRWVEFKGSDQDQTTVQGMCVEWICWLNGQRKKAPTPEELAELEARRERVKQNIEYLDPDLSAKVDGAEVEHLSANRIGADAKDLGAEVVHLSASCSGADMYNLSAILFGAEIKQWLA

SEQ ID NO: 166736 - protein, 332 aa, Oryza sativa
  Clone ID: PAT_MRT4530_65415C.1.pep
MPLQGGWLSLALFAMVGAICFYTGNLIDRCMCADRCVRSYPDIGYLAFGAYGWTTIGLVMYVELYLVAISFLILEGDNLDKLLPSTVVEILGRAHLVSGADGVWAGVPDKGFHMAGNNLLNLSGLPTALTLYFVCFAGHGVFPTVYSSMKSKKDFPKVLLISSVLCSLNYAVTVVLRYLIYGEDVQSQVTQNLPTGKLYTRFAILTTLITPLANYTLVIQPVTTAIEEKLSATTDVENNWLTRVLTSIAVVISTVVLACTVPFFGYLMLFIGSSLNVTVAVLVPCLSYLKIYMSRGGVGCFERTMIVGILVIGVCVNVVGTYTSLHQIIGTF

SEQ ID NO: 166737 - protein, 109 aa, Oryza sativa
  unsure (1)..(109): unsure at all Xaa locations
  Clone ID: PAT_MRT4530_65416C.1.pep
NKILWPPNTASQDDLNKASRTATMKNHPDKGGKPHKPKELAQANDVSRDPNKPDSDDQYGKKALKARTGGRRTHVKPSDKPQXRLGPNLGGGGLSTSTRHRRGKGSDPS

SEQ ID NO: 166738 - protein, 476 aa, Oryza sativa
  Clone ID: PAT_MRT4530_65417C.1.pep
MATIEIMGRGSYRSMRAATWDWYLTHPLVFQGFPILYCNAPMFKLRFMPILFAATHHNFAASRNLRGRSIVIEQKLGKDLHSIFLEFDEHPIAAASIAQVHRGRLNNNQEVAVKVQYPGLERRMKIDIMTMSFLSKSVSWLIYMKTIFYPCNLLLSSIQYSERRAGNEHSSIILSTVSFFNIKIVTKILKINHSWSTSVSGKILVKKKIFPDYRFEKLLTEFERTMSMELDFTQEAKNSERTASCFRKNNVVKVPCVFWVDNLDSLRKADISPTKVAETLIELFGEMIFVHGFVHGDPHPGNILVSPQGQGKFSLVLLDHGIYKELDQKFRLDYCQLWKALILLDSQKILELGEQFGVGKYAKYFPVIFTGRTIESKSRLGRQMSIEEKTRLKQDLNSLGMDDISSFMESLPPDFLTILRTDGLLRSILGNLGAPRHVRLLTYAKCALYGLEEQPKSQSGVFQLTSFIENSLDLIS

SEQ ID NO: 166739 - protein, 295 aa, Oryza sativa
  Clone ID: PAT_MRT4530_65418C.1.pep
MGHLITKMLLLLVSLAPVAAGEHGVAAAEPRLVEIPFNFSVHSWNELISNRLKAELADNPCRQEIEGIPTMAGLHGDDEPPAKWITVRLFGGGDRDDDQAKLLVAEDDAYVAGFANRTGHWHTFRGGRCYPALPATACTELPFGGSYRDLIGGVANLRAVPVGRSSAVGAMEVLSRYDPAATTAAADAKMALAKFMVMVTEAARLKPVRRAVVERWEQVSYLSSDEVRDVPYYGKMSLMILEWKRTGRWGELGPWANIDRARCPRPTGCEDEDDADADAGAGELRGLRAIHAGTS

SEQ ID NO: 166740 - protein, 59 aa, Oryza sativa
  unsure (1)..(59): unsure at all Xaa locations
  Clone ID: PAT_MRT4530_65419C.1.pep
DSSIFXALPNDVLPNAYRISREEAQRLKHNRGDEFGAFTPIQYIIYQDGVMNPLRSNYR

SEQ ID NO: 166741 - protein, 86 aa, Oryza sativa
  Clone ID: PAT_MRT4530_6541C.1.pep
SPPATTSPRCTPAFTRYCRMEKLYWATTSHLALHALHRYIAHRQHSLPGHRHDPQPVTCHVNHLLKTFLCSNTQAPCSDMSSETRS

SEQ ID NO: 166742 - protein, 300 aa, Oryza sativa
  Clone ID: PAT_MRT4530_65420C.1.pep
NSNSKGISQYDLLKFGRGFMKLQRFEYEINRNYWSSAARDPAYVAHYPYRYDICCENMKELRLAHIVTKPEIGLRFLLGKCRALEKLWLEYVIGLTDNDVIALFQNCGNLRSLSLRLIPLLCHAIYFRTALTNDSLKALALYCPMLQVLELTFTFCSEDYPSEVGFSQEGIVNLVQSCPIRVLMLNGASNFDDEGMKGLSSSRSLETLELVDCMFIGDLGMRSIARTPNLRNLTLRKCVCVTDNGVSELVHAQNLESLTIIGCHRISLKAVQGAARSVYYSAESEKHESLKGMKMTRSSK

SEQ ID NO: 166743 - protein, 63 aa, Oryza sativa
  Clone ID: PAT_MRT4530_65421C.1.pep
MAHKPPQRKRTTGATLENLYSCTGPNEQTQRQAHSTRQGQDDVSSHGKGHASGKSRFHQRFPA

SEQ ID NO: 166744 - protein, 76 aa, Oryza sativa
  unsure (1)..(76): unsure at all Xaa locations
  Clone ID: PAT_MRT4530_65422C.1.pep
TDAMFHRKDRCTIGLQGQAYVLLSAKLSCRPQQAGXRTRRKGKRGGLSPPDPCLPPPASRRRCCFGGGGGGRIQDW

SEQ ID NO: 166745 - protein, 229 aa, Oryza sativa
  Clone ID: PAT_MRT4530_65423C.1.pep
CSREGLTTQQAQQRLEIFGPNKLEEKEESKFLKFLGFMWNPLSWVMEAAAIMAIALANGGGKPPDCQDFVGIITLLVINSTISFIEENNAGNAAAALMARLAPKAKVLRDGRWTEEEAAILVPGDIVSIKLGDIIPADARLLEGDPLKIDQSALTGESLPVTKGPGDGVYSGSTVKQGEIEAIVIATGVHTFFGKAAHLVDSTNQVGHFQEVLTAIGNFCICSIAVGMF

SEQ ID NO: 166746 - protein, 71 aa, Oryza sativa
  unsure (1)..(71): unsure at all Xaa locations
  Clone ID: PAT_MRT4530_65424C.1.pep
XVFDMQVCDYRLFFEVXNYXXKNVILQADGDFAHDVIGDNSIICSMVINDVSERYSLCRSLPPGIFFTNVN

SEQ ID NO: 166747 - protein, 121 aa, Oryza sativa
  unsure (1)..(121): unsure at all Xaa locations
  Clone ID: PAT_MRT4530_65425C.1.pep
KFSKLQANQSSSKYSYGIGIRQVRPLRHRXRRPHRRGRAXGLRRLRRRRPSXXXWGSRCPGTRXQXXREXXXAVXPXXRGXPWXXGKXPRGXXPXXXXXXXXXXXRYXSGXXALRXPRATT

SEQ ID NO: 166748 - protein, 317 aa, Oryza sativa
  Clone ID: PAT_MRT4530_65426C.1.pep
MIMLLQEMENHPVQCMAKTNYDFLARNNYPMKQLVQRNSDGDSSPTKSGESHQEASAVSDSSLNGQHTSPQSVFVPSDINNNDSCGERDHGTKSVLSLGNTEAAFPPSKFDYNQPFACVSYPYGTDPYYGGVLTGYTSHAFVHPQITGAANSRMPLPVDPSVEEPIFVNAKQYNAILRRRQTRAKLEAQNKAVKGRKPYLHESRHHHAMKRARGSGGRFLTKKELLEQQQQQQQQKPPPASAQSPTGRARTSGGAVVLGKNLCPENSTSCSPSTPTGSEISSISFGGGMLAHQEHISFASADRHPTMNQNHRVPVMR

SEQ ID NO: 166749 - protein, 108 aa, Oryza sativa
  Clone ID: PAT_MRT4530_65427C.1.pep
YFLSTRAIIHNIRNNFILVPRRKSKANLEWLQKRVQKYRSTKNDIGETIEDFDKVEKLGQGFTSADPLEEVDIGDGTKPRPTFVNKKMRADYKVKIIELLKEYVDCFA

SEQ ID NO: 166750 - protein, 292 aa, Oryza sativa
  unsure (1)..(292): unsure at all Xaa locations
  Clone ID: PAT_MRT4530_65428C.1.pep
MEGRATDDPPPRRSHASRRVLLPLHTRLLRQVEGQVRLQAGLPKYGFVKTIVTKFLGRWDQGMGSRNVIRYLREXLREVCCSSKTSRRXKALKDYLLFGKSSPHLQGGSTGSFANSHDIPRFKTFRKGSQSHGSTKSRQGVHHHRKCKKDRERFYNFFREEYYVHPDKIFEDMFGENHRFTWSHISWESFSFRDSSSRFRRTGESKRERVCSDSDDESEDETTNIGSHAHRAILGLPACGPLTLDAVKTAFRASALRWHPDKHPGSSQAVAEEKFKLCVNAYNSICNVLKAA

SEQ ID NO: 166751 - protein, 304 aa, Oryza sativa
  Clone ID: PAT_MRT4530_65429C.1.pep
MIMLLQEMENHPVQCMAKTNYDFLARNNYPMKQLVQRNSDGDSSPTKSGESHQEASAVSDSSLNGQHTSPQSELTKYDLTQIVFVPSDINNNDSCGERDHGTKSVLSLGNTEAAFPPSKFDYNQPFACVSYPYGTDPYYGGVLTGYTSHAFVHPQITGAANSRMPLPVDPSVEEPIFVNAKQYNAILRRRQTRAKLEAQNKAVKGLKPYLHESRHHHAMKRARGSGGRFLTKKELLEQQQQQQQQKPPPASAQSPTVLQVHMVIGNNRSNPQFVANPLRPIFDAKLVAASSEQMCKTGNPVPGF

SEQ ID NO: 166752 - protein, 83 aa, Oryza sativa
  Clone ID: PAT_MRT4530_6542C.1.pep
ATDWTFAQPVESRSSVCCLLNLRSKQSDILTCFPLGVGFLHFPCLCNKSPWWLLSNLSLVFPSLFLLVMILNTDQCVLGVWVS

SEQ ID NO: 166753 - protein, 89 aa, Oryza sativa
  unsure (1)..(89): unsure at all Xaa locations
  Clone ID: PAT_MRT4530_65430C.1.pep
MARRGGRWTAXAVAQGCGTPRWERQTIHRPQQLPQRRTLCRRHRGGGRPGAGGGVGVDDGDELRHAEALRDHLMHRPPCRWYEDEEQSR

SEQ ID NO: 166754 - protein, 730 aa, Oryza sativa
  Clone ID: PAT_MRT4530_65431C.1.pep
MKAGSDGELVMMNTNSDMELLMLVKMAVRHQRATSPADGISFGSYTNCTIVDTKANADTKSQIFQSSEDKTALRRMSMSADSWLNVERQQIQAAIEGGKIKFDDSKKPMKVDGNHFPVNMPCAAAVPVVVVARGGRHRGRQVAAVLVRRFAAAEDRQSTAVTVDPKTAAVSSSSPAPSVAPPPLLWSPDEDEEFEARQADVDNVEEASARLVYLKLLYINGGAAVKLMPYAIFRKLGRNSDDLIKTNMVLKDFGGNPLETKGVLNVELTVGSKTIPKIFFVIDGKGSYSLLLGRDWIHANCCILSTMHQCLIQWQGDKIEIVPADSRLKTESPNYYFEGIVEEIDIRPGDRPRPTFIIPVIKKNGKVRVCIDFWDLNKATQKDEYPMPVADQLVDAASGCPGAIRLFEWVVMTFGLKSVGATYQRAMNYIFHDLIGWLVEVYIDDVVVKSKEVENHITDLRKVFERTRKYGLKMNPTKCAFGVSAGQFLGFLVHERGTEVTQRSINAIKKIQPPEDKKKLQELIGKALECRNKLLAPILKGRVGKWIFALTEFDLRYESPKAVKGQAIADFIVDHRDDSIDSVDIPYATNNPAEYEAVLKGLQLLKEVEADAVKIMGDSLLVISQLVGEYQCKNDILMVYNEKCRELMDGFRLVTLKHVSREQNVEANDLAQGASGYKLMMKGIKDELTADEYYNLMADEKEDLVQSKLRALAKVIKDKERVALHYNKKG

SEQ ID NO: 166755 - protein, 138 aa, Oryza sativa
  Clone ID: PAT_MRT4530_65432C.1.pep
MGCTARLGCVAVDGDDAGVVAPPSDLTVVAPPPCVSSGYFWREGGTKTVEHMDIQAAAAQLGMGKVATRLGTGTGTAAAPTWLGQVGMFSYIDTDGVAGTTVIPAAPLSQAAFPTHSGVVPVPSRAGAEDPSPPRNSN

SEQ ID NO: 166756 - protein, 47 aa, Oryza sativa
  Clone ID: PAT_MRT4530_65433C.1.pep
PEFQKSFQGRRVCREGLPSESALKPLSSLHSGDRSFIISQPLGSSGL

SEQ ID NO: 166757 - protein, 26 aa, Oryza sativa
  Clone ID: PAT_MRT4530_65434C.1.pep
NYLFYVGFKQVLSLINALPLLWNAGI

SEQ ID NO: 166758 - protein, 169 aa, Oryza sativa
  Clone ID: PAT_MRT4530_65435C.1.pep
MVNLGKEMEFHRNGCIKRCRSVEVDVIKLPIQIFRDARVFRERALCGSFTERPSFAAYLEEKLDVCEYLREMEEGERERTKVYDNHLYRRSDAAFMRLWIVVFFAELQLRAQPDRQAHALVDAQPPQVSGGFHVSRPSITGRCYAHISWKKKTAKATHPGPYNLVRFIN

SEQ ID NO: 166759 - protein, 235 aa, Oryza sativa
  Clone ID: PAT_MRT4530_65436C.1.pep
RKRITVLKPTRSVELKGEKEIKRQQDQTVNGSRVERSNTHRRSHSGGGHAKAERLPQHTRIVVVKPSTALTSMEHFQKNGHDNLDDSEAPVISRHLSDEINWSAQGLRHPRADSCRPGMQSNMFIRDRVYYGYAEEEGSSFSDSEIGSPTSRHSWEYIYRFSNPYFGSTLSHASCSPDSLVTREAKKHTSDRWPTVSSNEISQEKVLVRRSLSTLGEMLAMSDMKKKGAAEQVVT

SEQ ID NO: 166760 - protein, 954 aa, Oryza sativa
  Clone ID: PAT_MRT4530_65437C.1.pep
MAAPVPGGCARMRRVVLGVVLLLSVCVRASHAVTDSQDTSVLRALMDQWQNAPPTWGQSDDPCSDSPWDGVVYVYPLLPDCFSKISTMGIKGVLAADIGQLTELQSLDMSFNKDLGGVLTPNIGNLKQLTTLILAGCSFHGNIPDELGSLPKLSYMALNSNQFSGKIPASMGNLSNLYWFDIADNQLSGPLPISTNGGMGLDKLFKTKHFHFNKNQLSGPIPDALFSPEMTLIHLLFDGNKFTGNIPDSLGLVTTLEVVRLDRNSLSGPVPENLNNLTKVNELDLSNNTFDPSPSPQWFWRLPQLSALIIQSGRLYGTVPMRLFSGPQLQQVILDGNAFNGTLDMGKYISSELSIVSLKDNQLSSVTVTASYNGTLSLAGNPVCDRLPNTQYCNVTQRAAAAPYSTSLVKCFSGTCNAVGESMSPQSCACAYPYQGVMYFRAPFFGDVTNGTAFQELESRLWTKLDLTPGSVFLQDPFFNADAYMQVQVKLFPSGSAYFNRSEVMRIGFDLSNQTFKPPKEFGPYYFIASPYPFPEERSSSRSKGAIIGIAAGCGVLVVALVGAAVYALVQRRRAQKAREELGGPFASWKRSEERGGAPRLKGARWFSYEELKRSTNNFAEANELGYGGYGKVYRGMLPTGTFIAIKRAQQGSMQGGHEFKTEIELLSRVHHKNLVGLVGFCFEQGEQMLVYEFMSAGTLRDSLSGKSGLHLDWKKRLRVALGAARGLAYLHELADPPIIHRDVKSSNILMDEHLTAKVADFGLSKLVSDTERGHVSTQVKGTLGYLDPEYYMSQQLTEKSDVYSFGVVMLELIIAKQPIEKGKYIVREVKRAFDAGDAEFCGIKDMIDARIMNTNHLAAFSKFVQLALRCVEEVAGARPSMSDVVKEIEMMLQSEGLSSASTSASTSATEFDVTKGAPRHPYNDPLPKKDKDMSTDSFDYSGGYSFQSKIEPK

SEQ ID NO: 166761 - protein, 42 aa, Oryza sativa
  Clone ID: PAT_MRT4530_65438C.1.pep
LLCIFQHYVLCAVNLDETGVAIIPERRVYLIRPSYKTEKGRV

SEQ ID NO: 166762 - protein, 555 aa, Oryza sativa
  Clone ID: PAT_MRT4530_65439C.1.pep
MGDAAVPAMVVEEEEQEHVFRSRFPPVAVPDGVTVPEFVLDGAEAYADRVALVEAAAGGRSYTYGEVARDTARFARALRSVGVRKGHVVVVALPNLAVYPVVSLGIMSAGAVFSGVNPRALAAEIKKQVEDSEAKLVVANEVAFDKVKDAGVPVIGVGDRERMPGAISWDGLLAAADRTGAGVVPVDAAQQSDLCALPYSSGTTGVSKGVMLSHRNLVSNLCSSMFAVAPETAGQVVTLGLMPFFHIYGITGICCATLRHKGTVVVMDRFDLRTFLRALVDHRVMFAPLVPPVMLAMVKSPVADEFDLSDLALKSVMTAAAPLAPDLLAAFQRKFPGVQVEEAYGLTEHSCITLTHAAGDGHGHVAKKSSVGFILPNLEVKFVDPDTGRSLPANTPGELCVRSQSVMQGYYKRKEETERTVDGKGWLHTGDVGYIDGDGDVFIVDRIKELIKYKGFQVAPAELEAVLLSHPSVEDAAVFGVPDEEAGEVPVACVVRRHGAEEGEEEIVAYVAERVASYKRVRVLHIVDAIPKSVSGKILRRQLRDEFIKRMKPSA

SEQ ID NO: 166763 - protein, 64 aa, Oryza sativa
  Clone ID: PAT_MRT4530_6543C.1.pep
PSIKVTCPITGKMASLSRFVIQQNIASYTRGIFFVGTKEYSLVETNKNKSGMELLEQHQRICCE

SEQ ID NO: 166764 - protein, 129 aa, Oryza sativa
  unsure (1)..(129): unsure at all Xaa locations
  Clone ID: PAT_MRT4530_65440C.1.pep
TNTTFIIYPGYIYYNVSLSGRCNGVGIMIVFTMTLCHHDDIKVVFGSLSVVFRLLDIIIWGYMLRKRGGPLMVIAQYGYSSARICSPKLISWGGYSSVFSPSXMVMTDCHKELGNQEWLLEAPGGYRKE

SEQ ID NO: 166765 - protein, 53 aa, Oryza sativa
  Clone ID: PAT_MRT4530_65441C.1.pep
PIECLLCCIANVETPFTAYTGGILYIFFLIEKDHCAKANTLHHHNDNLHASIF

SEQ ID NO: 166766 - protein, 188 aa, Oryza sativa
  Clone ID: PAT_MRT4530_65442C.1.pep
MALGGQRCGDGVRQPPRGRGQLRCHRRSREEGRRRPLAASEEELSDGGVASTTQQGGGADGEKPTGGGGGVSDMAGRITSEAGATGSLPLLSPLPRQPALELPIHRLGAAAADVELISVGRHSSTMPCCRRAGAELPLVFSPLKLSALPPPPAFLGATRRRPTAARVARPSLPFLPAHKNERKKREKK

SEQ ID NO: 166767 - protein, 439 aa, Oryza sativa
  Clone ID: PAT_MRT4530_65443C.1.pep
MAAASAATVEFGPQILWLDKELLQVLAAGNKVLLEELLRGEGGTHPPRTNGQVAISFHGTSEPAARRGTSRLLGVTSNGSTALHVVASHGHAELAALICERAPSLAATRNRSLGTPLHCASKAGHRDVAACLLRVMDQATPRSRNLTGATALHEAVRHGHVEVVDLLMTTDPWLASVTTNGGVSPLYMAFRSLNSVNFNCKPEIAQEILNWPEGPSLLTRADSSGRTPLHFAVIYGRLDTVKLFLGGDAASPRLTSISDSDGSYPVHAAAMFGRTKIIDELVKKCPNYYELVDDKGRNLLHIAVESEQEMVVRHICGNDMFAMLLNATDYDGNTPLHLAVKQGYPRIFGLLLGTRGVDMCIMNKDGHTARDISCCASTLEHGRLRYFLLFVGSRNQATRWELGAPVDTATAPTISPSTLDLVTGRRPTAVVRSLRRRGG

SEQ ID NO: 166768 - protein, 126 aa, Oryza sativa
  Clone ID: PAT_MRT4530_65444C.1.pep
MGRHLGFHPLHRREHTGCSWGGGGHTARSAASLGFPVKIHHSSLSLCNHSPRPTKNKHGDDATTHGRRQPREEEETAGRLVTLALMVASSSASSSFSAAAAAVGKGGSGREAARGGIYRCFGGSKP

SEQ ID NO: 166769 - protein, 64 aa, Oryza sativa
  Clone ID: PAT_MRT4530_65445C.1.pep
MAPKMPLFARDGPKDVAATRRWGGRRFPETSTGMPSPLHSGSTHRRRRRNNAAKYADGSPASKS

SEQ ID NO: 166770 - protein, 87 aa, Oryza sativa
  Clone ID: PAT_MRT4530_65446C.1.pep
MRAVRGEVVSSKPVALNKAARVFSLFAASDDSGLPSDGGALLLCAAEAAMELHVYRRDSFNYPNACKLRRRNLTLAASEPISSQFSR

SEQ ID NO: 166771 - protein, 70 aa, Oryza sativa
  Clone ID: PAT_MRT4530_65447C.1.pep
MVSLSTWFRYAAHKFEYSISLSWKKYNVGQINSTELTDAIWKNFFQGKLTFAHWTKGGEAMAPIESSTGG

SEQ ID NO: 166772 - protein, 833 aa, Oryza sativa
  Clone ID: PAT_MRT4530_65448C.1.pep
MEEGSEAQPPLQPEAVSAEASEPPPPVPMDQDEGQAAAAEAMEGEAEGAAAAAGTIEGEAGYAAADADPMEDEAADEAGAAEPMEDDPPTSSAPSATAAVDDSTIARKRRRRKKQFPGMIPTAGVRVLRAAASAPSAAHLNGVPRRRGRPPTSSSLRLARELDAEALIALAAGFPADSLSEDEVAAAVLPRIGGVDQTNYLVVRNHVLALWRSNPLSPVASNAALASIRAEHAHLVAAAHSFLSDHAYINFGLAPSVISLPPCPPPSLPPPSVLIVGAGFAGLAAARHLMSLGFKVAIVEGRLRPGGRVFTKSMRSTAAEYPDIAAAADLGGSVLTGINGNPLGVIARQLGFPLHKVRDKCPLYLPDGRPVDPDMDARVEAAFNQLLDKVCQLRQVVADSIPHGVDVSLGMALEAFRAAHGVAAEREERMLLDWHLANLEYANAAPLVDLSMAFWDQDDPYEMGGDHCFIPGGNSRFVRALADGIPIFYGQNVRRIQYGCDGAMVYTDKQTFRGDMVLCTVPLGVLKKGNIQFVPELPAQKREAIERLGFGLLNKVVLLFPYDFWDGRIDTFGHLTEDSGQRGEFFLFYSYSSVSGGPLLIALVAGESAIEFEKTSPAENVEKAICTRWGTDKFTYGSYSYVAIGSSGDDYDILAESVCDRVFFAGEATNRRYPATMHGALLSGYREAANIVRAARRRAKKVDSPKKMDVNNEVKYEVKVDNIDLDDLFRTPDAAFGGFSVLHDPSTSEPDSISLLRVGIASMGALLYRRIEVRARAFSPESWRAAVSTDIFAVQPSLAVPPLAFAYIACLFQPTLRFAEDREEGCQQWLVVG

SEQ ID NO: 166773 - protein, 83 aa, Oryza sativa
  Clone ID: PAT_MRT4530_65449C.1.pep
SSIAIQQQNRSIGKPKIGMQRVMIPGMKYLTYSDHGHARLLAPSSFHSWGLCPCPFLFSSHGLYFYFGFGAAFFHDCLYLWSC

SEQ ID NO: 166774 - protein, 502 aa, Oryza sativa
  Clone ID: PAT_MRT4530_6544C.1.pep
MGIVRAAEDVEGAVVAGAAGGGGGGGGGEVTAPLLLRQHKQGRGDEEKIQNDAGRRLRGSARRKRRRVGYSAPTQSGIVDEVGLSISQFALFGSVLTIGAMIGAVTSGRLADFLGRKMVCHIFRLSQTMRISATICIFGWLSLHLAKGVIMLYFGRILLGFSTGILSYVVPVFIAEIAPKNLRGGLATSNQLLICSGSSATYIIGALVAWRNLVLVGIVPCVLLLTGLLFIPESPRWLANVGREKEFHASLQMLRGEDADVSEEAVEIKEYIESLHRFPKARVQDLFLRKNIYAVTVGVGLMIFQQLGGINGVGFYASSIFTSAGFSGKLGTILIGIIQIPITLFGAILMDKSGRRVLLMVSASGTFLGCFLTGISFYLKAQGLFSEWVPELALTGILVYIGAYSIGMGPVPWVVMSEIFSIDMKAIGGSLVTLVSWLGSFAISYSFSFLMDWSSAGTFFMFSAASLITILFVVMVVPETKGRTLEEIQDSLIDSRSRLRDP

SEQ ID NO: 166775 - protein, 989 aa, Oryza sativa
  unsure (1)..(989): unsure at all Xaa locations
  Clone ID: PAT_MRT4530_65450C.1.pep
MALLIPGPISRGRTHCEVFLQHLIEGLLCHWSVLNTINALTGKDFKFRAAVLWCIHYYLPQSTVSVVIFCARRMSIALFSKAKRSETEILALLCWLENLVPPVFFDVMVNLAVHFRDEATVRGPLQLXWEYFGELRLYXLRLXIMSTGRPECSISASYVADXARTSSCGSMDDVEAWFSPATINLGCSDLSTINNDNFGHGVNLIGACDYGYSEDFDQMEAGVQAADIDRRTRLGFATWFRNHMWRLNNSDIVDDDLFALACGPDLRVRSYSSCVVNGVRFCTAERDINKKTQNSGVACAGIHNGRVIDYFGKLTDIIELQYNSKDDGNTRTVVLFRCEWYKLDGKKTALKDDDNKHGENWQLVQMFKHRHLYNVDEQNAPSASPYQQTQCIEEDGRRPEVDENLSDLPLNRDDEARQVVDASEVARLMKQNRPAEDGESSGDEIEDDTAVEYWSEGEVAPVEDAIHMPPKAQRRCTTAVDIDRNTTLMAPKKKGQAKRPRSAPKITVAQRDREKNKDNDDPDFDANAEDDDLSEGYVSNDSLVPETEDLQNMKSGHDCLKHKPATKKSKKNTENVTSVTHHAIGGKRVVAPLQPGKVTRSKKHVAPDVLATREVLVADTQAEIPIQATSEVLAADTQAEIPIQALSEVNAAHTEEGVGWNDDCQMDTTPHLDEHTLDDTNVNENAEGDSEDAEAYEERWIRGPNVGRGLERMSRSKKGKLPVVIEPGKMRPNSVKIAAKFATECNIAVRNHVPIFPKWKDYKDNKKLLRFYINKVGSKFDMDTTAGPVRKACVAMMKRAVCQQRHKLKKKYFDPYPLHLGDKYKDAPPNGLDLFKELHCSKKKAFAPAVQSAIAEMEMKIAEPVEDGCEPKSVNDAVSEVLAGKTKKNKFLVNVGINSLPVDSSAGSRRELQAALVEEKQTSADLRELVNIQRQQLDEMVKKMQAAEEERAKNDEEMKQRQAETDTLLRRLMAMIPSIDSFYGELEPV

SEQ ID NO: 166776 - protein, 157 aa, Oryza sativa
  unsure (1)..(157): unsure at all Xaa locations
  Clone ID: PAT_MRT4530_65451C.1.pep
CHGSMAQLFNPSTNPWHSPREGSFRECRFDRLHSFEPFGKXGAEAAVSDYSDEKNELFQCTVTFAIRPAIQAQGLLVPGYTHIPGVVXYIIQGRGSMXLTFRGCPATYQQHLQQFXFHGHSQSPMFRDEHQKIHHFRQGDIVELPGGVAHWFYTDGD

SEQ ID NO: 166777 - protein, 46 aa, Oryza sativa
  Clone ID: PAT_MRT4530_65452C.1.pep
KANGAFCFKSRTLGNLVGQPCLIRCIKQLLADYIIVKCCVLLYCYR

SEQ ID NO: 166778 - protein, 65 aa, Oryza sativa
  Clone ID: PAT_MRT4530_65453C.1.pep
LPELSLFMLHTNNLAGAPVPLNNTLFLLCCWCLWNHRNEVVFQNELPSISRLLRCCCQDAKLWVH

SEQ ID NO: 166779 - protein, 263 aa, Oryza sativa
  Clone ID: PAT_MRT4530_65454C.1.pep
GWKYILQLHYHITAVIALGMCEMAFWYFEYANFNSTGSRPMAITLWAVTFTAVKKTISRLLLLVVSMGYGVVRPTLGGVTSKVGALGVVYFIASEGLELVENLGNINDFSGKTRLFLVLPVAILDATFIIWIFSSLSRTLEKLQLRRSMAKLELYRKFTNSLALSVLISIAWIGYELYFNATDPLSELWRRAWIIPAFWNVLSYVLLAIICILWSPSRNPTGFAYSEDTADEADEEGLSLVGSAVKGTGDIVNMHVFPEDKRA

SEQ ID NO: 166780 - protein, 123 aa, Oryza sativa
  unsure (1)..(123): unsure at all Xaa locations
  Clone ID: PAT_MRT4530_65455C.1.pep
GTVVETIIKYKKAAXLNDVHAAIVHMXIDTPIARVAVVGQQQAYEKLIXVTDLVSHDAYECLLSWKPLSGVHESQHXYVVRQSASSGYASLLKCXARGLDISTXMVVTRSQLSYKLSDEIASE

SEQ ID NO: 166781 - protein, 299 aa, Oryza sativa
  unsure (1)..(299): unsure at all Xaa locations
  Clone ID: PAT_MRT4530_65456C.1.pep
ASRCSTYAGGSHRRECESLLHLCGWISPARMTGNRYFVLIVDDFTWWMWVFVIKSKGQALETFTKFKPLAENVVGRRIKTLRSDHGGEFLSGEFAQQCESAGIQRHLTVPYSPQQNGVXERRNRSMMVMARSLLKGRSVSGWLWGEAVRHTVYLQXLNWPPTKAMGNRTPYEAWMVKKPHLAHLRAHLRXVEEGSKVHRLFDPRRGRIHVSHGVIFEENVVXPWYRATGEXVSAEFDVEETVEQPAGSTTSVVGFVPRYQAPSPGRCPCKEPVVVERGNSSLAYKAQCEICIIDIPLCL

SEQ ID NO: 166782 - protein, 131 aa, Oryza sativa
  unsure (1)..(131): unsure at all Xaa locations
  Clone ID: PAT_MRT4530_65457C.1.pep
MWNEGNLPFPSWRMTYSMALPPYPADRRSGQGASGCHVVPLGPSPVLPRGLGVSRRXLGPSPIRHLAGGASGEGAQAEPPLMNAAPQLPPAAFNALCPHVTSASGRVEVGMTRPIGRVIRGVSPVSGKGRR

SEQ ID NO: 166783 - protein, 202 aa, Oryza sativa
  Clone ID: PAT_MRT4530_65458C.1.pep
MVGLGAMPGYGIQSMLKEGHKHLSGLDEAVLKNIDACRELSAITRTSLGPNGMNKMVINHLDKLFVTNDAATIVNELEVQHPAAKILVLAGRAQQEEIGDGANLTISFAGELLEKAEELIRMGLHPSEIIIGYTKAINKTVEILEDLVEKGSENMDVRNKEEVVVLMRSAVASKAFGQEDILCPLVADACMQVCPKILLTSR

SEQ ID NO: 166784 - protein, 417 aa, Oryza sativa
  Clone ID: PAT_MRT4530_65459C.1.pep
MEMRWAAPAPAARGRGRARRRAPDQPSFSSTLLDAICDSMDEGGEDGRTRNAASAAAKKRQEAANSYHYYYCYKPSLAASYRAAPALGSTADCPGRGYFSSSEVEYSLRRLRPIRTSAAGGAGDGAAVARKQRHEQPDVEKTAKTKPGSASARACRRPASPGARLASLLNSIFSGKRPSAQRPACSPDYPEPACSTAPPSSSSSYARRPCHAKTPRTPPTTTTTARARPSRSRTVRFLDIDGKVAVAAAVAGCRRIPVMEVEADTDDGGEESSDASSDLFELDSLAAIAPAGGRDGSYGDELPVYGTTGVGIRRDIGRRRPYGHAPCRSWSFEETCGGRPLVGRTSNDPSDGTGHTYLHSAGGRYDVGARPSIQSDVTGDRLVTDRSFLTVACQSSTPHVCPYCVECGRGQLGHCAH

SEQ ID NO: 166785 - protein, 168 aa, Oryza sativa
  unsure (1)..(168): unsure at all Xaa locations
  Clone ID: PAT_MRT4530_6545C.1.pep
FFFFFFWPETFFIHSFLHLAFRKKTVVRGXTSQTRPKTIHQPRRRHSQPRHVRYSHLATSTTSSQTAGQTGPIIFGQPLSQLRAVPASAMSFVFGSSNHSIATISFQPAAPFAIPCSSADDDLSFECPRGVPTHXVVLRGSXQIVQPLQIHHRFDVALESVPVSQTRD

SEQ ID NO: 166786 - protein, 42 aa, Oryza sativa
  Clone ID: PAT_MRT4530_65460C.1.pep
MTHDFYKNAGKSFHIWTLNITKLYLLKHTLLNSTKLLHYYLA

SEQ ID NO: 166787 - protein, 151 aa, Oryza sativa
  unsure (1)..(151): unsure at all Xaa locations
  Clone ID: PAT_MRT4530_65461C.1.pep
GNRWVSPKYKFFAWIVLQNRAWIVDRLXRRDWANQQICPLCHTTHETTVHLLVHCRFSRRIWSDLXRWIGLHLNLQNWDRXPSEPAKPTKALKSLVILISSELWCERNARIYQNSGMAXTTMTAKIKEKVITWVQAGSGEASGMARYGISH

SEQ ID NO: 166788 - protein, 50 aa, Oryza sativa
  Clone ID: PAT_MRT4530_65462C.1.pep
RRAGSDGEGEGEQARRARSISSAGTVARREDGPPGGPAGEAWLVLEDRRS

SEQ ID NO: 166789 - protein, 97 aa, Oryza sativa
  Clone ID: PAT_MRT4530_65463C.1.pep
SGKNHHGFLFRKSRFRDLGKTVQFTRHDWDPQIASDSKVIPRLRRTPIENPDKSLIYRTLCQNSASLHFAPQLSIDSGVLFYKLINSPVIILPKTQK

SEQ ID NO: 166790 - protein, 258 aa, Oryza sativa
  unsure (1)..(258): unsure at all Xaa locations
  Clone ID: PAT_MRT4530_65464C.1.pep
KGSDYLPDLKSQSSPELFGKRHHHTFTSSXSCRVPCARVVLEHPSTIPCRRREASAWRRPSRLXSMPLGARRCLRAHLARPPTPWHGFVPPSGAPHSRQSRSCSAVITARVHXACQTAIAAFAIVPLAYRRREIGSGXERDLGARVLPLSPGWHFIRQEDDRSRPIDRTAQICLASGRRRSNRLRCAQWAVEVHRTXPHMCRGQLLDLQAVELTRLAEDXPAQVWVVLGGPGPKVFKVSHYQTVFFPLQRTGTIASTT

SEQ ID NO: 166791 - protein, 127 aa, Oryza sativa
  unsure (1)..(127): unsure at all Xaa locations
  Clone ID: PAT_MRT4530_65465C.1.pep
VPCKTLNPSXSNTKHQSKSPILLPINSINRRSEIGVSVHRPDFKIRATDIDYEWGQDGVERVFASSSTVSVADKAIESVEETERLKRSLADSLYGTDRGLSASSDTRAEISELITQVESKNPTPAPN

SEQ ID NO: 166792 - protein, 201 aa, Oryza sativa
  unsure (1)..(201): unsure at all Xaa locations
  Clone ID: PAT_MRT4530_65466C.1.pep
TNDKYXTNRTTRTFKPQPHACTQSCSMXLSPXRQPHTRALLNQLRDAPPCTTLPTNHQHSLDTHIAQQTPRANTIIQATTPPDHNKPTQTTINKRSPPQHHIPTHTTXTSTHVQAHVTRRHARXLPHSRTTSPHIYAPHTTRTHRSRXTVLTTPQTITLPPAYTSISADXXTHAVQPHTTVSXTQTNHTDXLICXLTHASS

SEQ ID NO: 166793 - protein, 78 aa, Oryza sativa
  Clone ID: PAT_MRT4530_65467C.1.pep
LGRLAGPARTCRAAALEVSFWRTPACDDRAIIERHLHSINGTSNNIVTPAIYVALPSEMCSEPIFVYSAEDIQIWIRS

SEQ ID NO: 166794 - protein, 712 aa, Oryza sativa
  Clone ID: PAT_MRT4530_65468C.1.pep
MASAAANNSSSAAYDAAETGGLLRRRNTTAAARGNAGEEEEEAEAVAPSVEQAFADKPVPSWREQLTVRAFVVGFLLSIMFNIIVMKLSLTTGVIPSLNVSASLLGFFLVRLWTAAIERVGFLKQPFTRQENTVIQTCVVSAYGVAFSGGFGSYLFGMSETIAKQATEANDPMNIKNPHLGWIIGFMFLVSFVGLFALVPMRKVMIVDYKLTYPSGTATAYLINGFHTPEGADLAKKQVRTLGKYFSISFLWAFFQWFYTAGDNCGFSSFPTFGLEAFKNRFYFDFSPTYVGVGMICPYIVNVSLLIGGIISWGIMWPLISKKKGSWYPETLPESSLLGLQAYKVFITIAVILGDGLYNFVKVFGYTIKGFIVMYKNKNSNTLPISDNGTPANATEEESFDDKRRNELFLKDQIPKTVAIGGYVVLAVITSGCLPLIIPQLKWYYILIAYIFAPIMAFCNAYGSGLTDWSLATTYGKLAIFVFGAWAGASHGGVLVGLAACGVMMNIVGTASDLMQDFKTGYMTLASPRSMFVSQVIGTAMGCVIAPCVFWLFYKSFNIGASDGAYPAPYTIMYRNMAILGVNGLSSLPKYCLTLCYIAFVAAFIINLIKDLVPERVAKYIPIPMAAAIPFYLGPYFAIDMFMGSVILYFWEWRNKDEAQSFGPAVASGLMCGDGLWALPQAVLSLVNVNPPLCMKFLSRAANAKVDTFLGN

SEQ ID NO: 166795 - protein, 204 aa, Oryza sativa
  unsure (1)..(204): unsure at all Xaa locations
  Clone ID: PAT_MRT4530_65469C.1.pep
GRRRRRRGGEAAAVAVVVYVREAARRARQGGRGARGVGGGGAAAVPRPEEVASMGPDEPSTIAAIGTIVDSRYDEYFTSSDTHVASHVSMIVLSPSPVRSPGKALTTNGXSVFMPTLIWVILDLMKKLSRYLXQTYPVSYPNSFLGSSTVRHSWYDIICGVVIARRPGLVLLVGSHIANVALDQSESYPLTRKSGHEIDRHHDI

SEQ ID NO: 166796 - protein, 476 aa, Oryza sativa
  unsure (1)..(476): unsure at all Xaa locations
  Clone ID: PAT_MRT4530_6546C.1.pep
MQQPPPPTMNGGHHAAPPPPQVSGAPPPPHGHYQQQPPPQPYYQQQQPLPPHYYQAGPPHAPPPQQPPAMWGQPPPPPPQYAPPPPQQFQLPHQQYAPPPQHYAPPPPQQQYGAQMAGGPAPGGDEIRSLWIGDLQYWMDESYLSNAFAPMGQQVTSVKVIRNKQSGHSEGYGFIEFQSHAAAEYALANFNGRMMLNVDQLFKLNWASSGAGERRAADDGPEHTIFVGDLASDVRDFMLEXSFKTSYPSVRGAKVVFDKVTGRSKGYGFVRFGDENEQTRAMTEMNGATLSTRQMRLGPAANKKNMGTQQTYSTNGYQSSQGNSLENDPNNTTIFVGGLDSNVNEDHLKQVFTPYGEIGYVKIPLGKRCGFVQFTSRSSAEEAIRVLNGSQIGGQQVRLSWGRTPQNKQAPQQDANQWNGNYYGYQQGYDSSYYGAPNAQDPSAQNYYGYSGYGNYEQQQEPPQQQQQPPQQPPQQ

SEQ ID NO: 166797 - protein, 117 aa, Oryza sativa
  Clone ID: PAT_MRT4530_65470C.1.pep
QPPSKSFPFLSKSLCPLIKFSISIAKDDQGATVVANEVAPEGPILLVHPRRKQLDGLHCQPLTHFRRGRGRRGTSPEDSSGGGDPRPRGTTRPWSADGGARPLRRSPERRGERGGRR

SEQ ID NO: 166798 - protein, 299 aa, Oryza sativa
  unsure (1)..(299): unsure at all Xaa locations
  Clone ID: PAT_MRT4530_65471C.1.pep
MNNLDPLALPLNGTLXXXXXXXXXXXFTMANLYLRLLVGLGCQPLTVEKNLVGTFTKAATEELRDRIRRNIKACRRIFWDYEPNQIDQNKYNFYSQLYERVDNLDEAKLRLRIAEREIDLASIFTIHSFCQKILSQFAFDSGIRFDNDWQTDESHLLQQLSEEIWREQFYPLSLQECEIIYNELEEPLKALKMVQSFIGIELPALSAEQKRIFTPELSTRYLIEYKNFLQQIKQYWQINGNEIVTIINAELKKIYKTGEKKALNRTSYQPRYLATYQSELDNWANSMDLTLPKNFERFC

SEQ ID NO: 166799 - protein, 138 aa, Oryza sativa
  unsure (1)..(138): unsure at all Xaa locations
  Clone ID: PAT_MRT4530_65472C.1.pep
DAAPLQPAADARAPQLLSLPPVGRLALPPLPPAAPTSSPPPSRRWTTHGRRRARRLGRRRPSLSCARSPSSPPPXPRWAPAGEEGSKPRASPRPSAAAALLPSSSPSTAPSRSPPPAPPPLLPRRRGRGRPRRCPPLV

SEQ ID NO: 166800 - protein, 52 aa, Oryza sativa
  unsure (1)..(52): unsure at all Xaa locations
  Clone ID: PAT_MRT4530_65473C.1.pep
PPKPVFRSPAGKNFGVKGVLSGVPXASFNATPEMEKLFRSKRFASEFFFAPG

SEQ ID NO: 166801 - protein, 81 aa, Oryza sativa
  Clone ID: PAT_MRT4530_65474C.1.pep
MSSLLEVSRKLKNELETLTDNPELIASMGALYTFYVQNTPQARRNLKSYVEQRGLTINRHFLDAFLPDHKALDRVRGRCTR

SEQ ID NO: 166802 - protein, 1058 aa, Oryza sativa
  Clone ID: PAT_MRT4530_65475C.1.pep
MEQQLAELVEVMSAIQKQNSAIQTSVGSLEEIKPLVVELASWKPAMDKAVTELHEEMGDLRQQVERIARNPVLSVKPSELPALLPTPTRPRDTAPKEEEVSPSVGGEGHGPLGHRVASIPRGKACGKESSPSSLPAKEGSNRGFTAGFHGGNARVDCPQFDGENPRAWKMKCETYFRVSGICSEVWEAMTSYRATARSATPSFASKTFGGGRADERTLPVEDKVAALRAYRKAKGLCHTCGERWSRDHKCGPTVQLHIVEELLELLADSAADGMPEIIEPTTDIGSESEPQGEVCQISRDAMIAQKDEIERQVKDMLQQGVIQPSSSPFSSPVLLVQKKDLTWQFCVDCRHLNAVTVKNRYPLPIIDELLDELSGASLFTSLDLRAGYHQIRMRAEDEYKTAFKTHNGHYEFRVMSYGLTGAPATFQGLMNMIFAPLLRKGVLVFIDDILVYSRNLQDHVMLLRQVVFVWTSEHQAAFEALKAALVSAPVLALPDFSGTFVIETEASDLGVGAVLMQDGHPLAFLSKSLGPRNRGLSTYEKECLAILLAVDHWRSYLQFGEFIIRTDQRSLIHLDDQRLVTSWQQRALTKLLGLSYRLVYKKGLENKAADVLSRCRSNEVYQLSTVSSCVPSWLEEVQKGYDSDICTSQLLAKVLLSPSQFPSYSLKNGILYYMRLIWLGANSELQLKILSAFHCSAVGGHSGIQVTYSRVRRLFAWPGLKQAVRQFVSNCSICKQAKAERVRYPGLLQPLPVPEHAWVTVSLDFIEGLPSSAGFDCILVVVDKFSKYAHFLALVHPFTAFDVALAYLNNVYKLYGLPHHIISDRVRIFTSALWTELFQLTDTRLKLSTAYHLQTDGQTERVNQCLETFLRCFVHACPKKWFRWWALAEFWYNTAYHSALERSPFEVLNKVGAVAYRLRLPDDCSIHPVVHVSQLRQAVAPTTATDVRALPTMAPEEVVPVQVLARRVSKKGAGAVEQVLVRWTGQSSSEATWEDAAALRLRFPDAPAWGQAAFEGGRNVTGAATVSEPVRENNPVKSGKRPQRERRPNVRVSGPEWS

SEQ ID NO: 166803 - protein, 77 aa, Oryza sativa
  Clone ID: PAT_MRT4530_65476C.1.pep
INGMKSNRSSVRLPSVLNKRYQVVEEILLFYLPLIGYLLMLLLFNQTGGGAKVTVILLKVVRTYRTSIFIGTCESEL

SEQ ID NO: 166804 - protein, 234 aa, Oryza sativa
  Clone ID: PAT_MRT4530_65477C.1.pep
MALVDPKAGESSSSTVTAHHLFVVVIDGVETSIHEGSLQASLGGTVTITSAGNLSASGVRSVVVRGGGGGSVSFTLCGDAVADGVDSASFVRCGAARAEGARAVSVTRCRAADLEQAGRVSLERCREARVRGGGALRAARCRRADVESFGEVHLARCKGARVDWCGSVEVEMCRAVDVSRCGAVTGGRCRVVSAVGCGSVEVAHAVVNILEEEQPQAAQHPVSPSHSSRSSDSE

SEQ ID NO: 166805 - protein, 81 aa, Oryza sativa
  Clone ID: PAT_MRT4530_65478C.1.pep
GKKKKKLFSPPPLLYWSYLTGFNLAPSPLGGFYFRVGFFFFFFGGFFGGHLPFGFDPFPLGKKPFWVPPQLWAKLNWFKFV

SEQ ID NO: 166806 - protein, 257 aa, Oryza sativa
  Clone ID: PAT_MRT4530_65479C.1.pep
MLVRCLLVVALAAVVAAAAGRLALAKENNGGRGRWQVYSPAPSPQKHPCLENPPNMTENTGGEAGDVVHGYGGLECYATGSRSSGGRAVILVSTYYGFRAPKLRKIADKVAYQLGCYVVVPDLLFGDPYTDDPARPFEEWIKTHSPVEAAEKTKPLIAALKKDGTSTVGVGGYCWGGKVAVELSKTEETKAVVISHPALVVVDDMKEVHHLVKIFPDAPHGFACRYNATDPFAVKTAEEARADMVKWFDKYLEIMKR

SEQ ID NO: 166807 - protein, 51 aa, Oryza sativa
  Clone ID: PAT_MRT4530_6547C.1.pep
MAHATPAWMTATRGWGWAHTSARRGGLTPLWEQSAQSFSIREASDRPQLSC

SEQ ID NO: 166808 - protein, 182 aa, Oryza sativa
  unsure (1)..(182): unsure at all Xaa locations
  Clone ID: PAT_MRT4530_65480C.1.pep
RARYLRMEDVANADELPSLLKKRKYRSHNNHAERQKGKGSMNMPTRKSERLAKRMKLMTSVLLTQRKKIGVGEHFQAEVPDWTEPPSDELARYKNDPNISKMLGTRIWPPEGQVLQTDKKIAGQGRMESCNCSYPGSFCCRQHHTDAARDQLRCELGRXFTEWRFDSXGEECSKMLTREEHL

SEQ ID NO: 166809 - protein, 284 aa, Oryza sativa
  Clone ID: PAT_MRT4530_65481C.1.pep
MAECANGSYSCRCLENDGERRRRLGPQEARIHPCRPWEGRICIHQRSGGKEQRQLLHSYNDHDDNGGLRGRRSTRTILGRGRSTSTGKVVGRDSDNYYAATVTMMTMEASGGANPPVPLGATPVMEWRGVAAVVSRAVLIDSIKDLFGNIFIIDRLDCDGDQVPDSRDACCPKTGCIRRRTGGRLLQVVAGISAGLAAALEVEKKRELEAADETASWSGGFEHINATSEKTLTTAAAQPDPASMTRSAPECPLLSPESLSSSAANLVALCHRELDAGDLFTTTS

SEQ ID NO: 166810 - protein, 82 aa, Oryza sativa
  Clone ID: PAT_MRT4530_65482C.1.pep
HKERKAPQPVGKVKPRLGQTVHNKITWVPHPPAVKVEYNRQSEKVLPDSEGIFDRTFFPARANSADGLLGSRSRMHIQDRRW

SEQ ID NO: 166811 - protein, 457 aa, Oryza sativa
  Clone ID: PAT_MRT4530_65483C.1.pep
MAAAVAAAACHSPARLVVTCSSSATPAPPRRPLRVAVVGGGPAGASAAEALASAGAQAFLLERNPSGAKPCGGAIPLCMLDEFAIPRDLVDRRVTRMRVLSPSNLAADFSRALPPGAHIPMLRREVLDSFLRRRAADAGATLVPGLVTSLSLPADPATDPYLVHYISSDSGGPSSSRCVLEVDAVIGADGANSRVAREVGAGDYSTAIAFQERIRLPDEAMAYYDDLAEMYVGGDVSPDFYGWVFPKCDHVAVGTGTVAAKPEIKRLQSGIRARAAGKVAGGRVVRVEAHPIPEHPRPRRVVGRVALVGDAAGYVTRCSGEGIYFAARSGRLCGRAMADEWRLTGAVTEAGIRAGYLRRWDDEFRPTFRFLDLLQRVFYGGNAGREALVEMCADEHVQRRTFDSYLHKRMAPAEPWGDLRLLWRTAAAMVRCGVLGREVERLRRLEQQAADQVLLRH

SEQ ID NO: 166812 - protein, 271 aa, Oryza sativa
  Clone ID: PAT_MRT4530_65484C.1.pep
MVNRKKKKTKLGITSLLFSSSSSSGRDTSTTTSGLPYSYSSCSNMSSSSSAAAAAWQWPSCKQPRTLSFRQQQQTMMKTMNSAYLSAGFSFASRDSHSSTCSCCRSRTASDASASADAVTRALRSDRLFFDPDASPAAAADLKLNKAKANKTKKKVEAFGGATAMTIESSNPYRDFRESMEAMVTSGGGGGGADDWRWLEEMLGWYLRANVKSTHGLIVGAFLDLLVSAAASPAASSSSSSPAAKGKYSSCCSACSSSSIKLEEEHQLRHY

SEQ ID NO: 166813 - protein, 52 aa, Oryza sativa
  Clone ID: PAT_MRT4530_65485C.1.pep
MAMVATARDDDLEDDPDDDDGAPTTLRGVQLLRAERLVERLLEMLLMNNLCF

SEQ ID NO: 166814 - protein, 69 aa, Oryza sativa
  Clone ID: PAT_MRT4530_65486C.1.pep
MAASHARPGRVSDSVRCGRYALSRQNDEGHSDLQPFRAGLTDLDTPGTAFLAHSHPKSSPCQPASTGMI

SEQ ID NO: 166815 - protein, 268 aa, Oryza sativa
  Clone ID: PAT_MRT4530_65487C.1.pep
MALMENRKIDQACRFALSLAADKMSRRCLSKCHKEEIGLVFGSLEPRGMTRPIQLGALSSCISIFPVDVVIRFFSSHLASPASLPLAHIAPAPTPPSRFLRRREKPNLHAPGVSHVPGALPPALAYSLPHPTSHSLCLAQTTAVRVHSSSRQPPHASHLRPGCPVCPAATGVLLVQSSPSDGWPPPMQPSGGQTGVGAGSGCVRHGQEGSSEYGCRPPPAGPPPAAGRLPSYTGSRSSPPATRQGELNDGEHTVSPTSLQKRHLADAR

SEQ ID NO: 166816 - protein, 53 aa, Oryza sativa
  Clone ID: PAT_MRT4530_65488C.1.pep
ETCIMFHIFIVNSKTNDPLNTMAHSWSIPLPSFDVESYVDEANLHSPQQTTLY

SEQ ID NO: 166817 - protein, 160 aa, Oryza sativa
  Clone ID: PAT_MRT4530_65489C.1.pep
MAHAARAGADAGLPAGGLHRRRPPVWPTALVIRDLEQPKCHLGSPNGLLCGYDTLSCIGFDLQQEDQINWHANTPEGELWTCTGVKQISQASCFLSTRFWHAQWNLSASYQEHSSGCRADRATRTEMGGVGRLPARRVHSHRRGLGKAQAVGGRMRERIG

SEQ ID NO: 166818 - protein, 507 aa, Oryza sativa
  unsure (1)..(507): unsure at all Xaa locations
  Clone ID: PAT_MRT4530_6548C.1.pep
MFPGISRSSEELPSFHTGQPWXVTVPGNPALIAVAATTMSSNQGLTVGGSASGRSVPNGGFDENIVLEDRNYASPTQPAYSSEDHVEGMHDSTIEGEEAAVDVSESHTTDHDIHVEAIEDLTAGVSEVKLPEDNATEEPTEEREHQNLSTEEIDSLLDKCLLQALHTSVKDKDLPIPGSTLWSNHILPCRPTGVTLDIKKSSHKKLSKWLQSKSSAGLISSKEDKHKKEVMLLRINRGHPDYMAFKPEKRVQEPVVQHDNVVAEGSSTKQLEVAETYKPSSHVNPIFMAVGADTSKYYSASEASDIVFRYVEKENLVKQTDKAKVVLDVALCDALYKGAIKKGSAYPTEIHKRDLGSTFLNRMQIHHRVARGNEVVIRKGAIRTIQIMTERRQGNKKMTRLSGLECFLMDPDSLASELQKKFACSTTTAELPGCNLSLVFISXNKQNKGRTLWMIKNIYNLAYFFQXKKGQHEVLVQGGVIDDLAKHLVDHYGVPKRFIEVLDKTKR

SEQ ID NO: 166819 - protein, 153 aa, Oryza sativa
  unsure (1)..(153): unsure at all Xaa locations
  Clone ID: PAT_MRT4530_65490C.1.pep
PRAAPSPRRRPREEGSRFAPPPPLGPEERRAGAGGARRGESAPLGPEDAATVGPATSPRAQPSRRRGRRRQAPTRRGXGRAVRRRAPPWSRXGRASSSSTCSAPRCRPRESAEKERSSRLRPRPSSPASVPSCPPSSPLAACRPGQWHARRMD

SEQ ID NO: 166820 - protein, 80 aa, Oryza sativa
  unsure (1)..(80): unsure at all Xaa locations
  Clone ID: PAT_MRT4530_65491C.1.pep
VWRGLRRTKASRRGXVQWSHTSAEVELWWSIGASAVDLQVWRLVTLSDGLSGASLLPDPCVGAVGVWVVVYFFXFSWLIL

SEQ ID NO: 166821 - protein, 70 aa, Oryza sativa
  Clone ID: PAT_MRT4530_65492C.1.pep
LRSRPRWLSMSPPCVQSILGISAIHAKVPLVIPAVGSVCHYIDTVVLVQCQHHSVCHVFVSGIVIGCSYI

SEQ ID NO: 166822 - protein, 87 aa, Oryza sativa
  unsure (1)..(87): unsure at all Xaa locations
  Clone ID: PAT_MRT4530_65493C.1.pep
RAGRRRRRGRARRPGRAVRRGRRRXREPAGAGVPPEGVARSSAHEGXSRRGRGAVVPHIGRGXAVVEHRCWAFSSVFLCWPSGGKFC

SEQ ID NO: 166823 - protein, 58 aa, Oryza sativa
  Clone ID: PAT_MRT4530_65494C.1.pep
TTEALYIYILAFYNIRYITHKLVPQLPKTLLLPKINLQKLGWLMVFQPKINTTFVYVF

SEQ ID NO: 166824 - protein, 64 aa, Oryza sativa
  Clone ID: PAT_MRT4530_65495C.1.pep
HIQIWRPGVLKTYHESFAGDLELVPCKPEFVRGLRYDSLLLAGHDRIATMIWLYQGQGFRNFLA

SEQ ID NO: 166825 - protein, 154 aa, Oryza sativa
  Clone ID: PAT_MRT4530_65496C.1.pep
MRIGRRPGRPQGVRVGRFINAAGTTGFPTGKRAFLICRFIESKYGTKITPLFITIDPQRDSPAQLKAYLSEFDPRIIGLTGSINAVRQIAQEYRVFFKKVDDIGQDYLVESSHNMYLLDPCLETARCFGAEYEASDLAEAITLEIQKASKSSTN

SEQ ID NO: 166826 - protein, 75 aa, Oryza sativa
  Clone ID: PAT_MRT4530_65497C.1.pep
RENNWSQTTFLHHISSVRHELTLDGQHLQISEIFKTKMKVPILDFPKLLPFSSTKIRGVKGQVERITPSCRFLQP

SEQ ID NO: 166827 - protein, 81 aa, Oryza sativa
  Clone ID: PAT_MRT4530_65498C.1.pep
DDICLFNLLSYRSSIVHLLLDDAGSVRCWLPTVTFPPISSTHLPVVCTLAYYGSLMACAGTFLHPFSSSWNIGSKKNKIPD

SEQ ID NO: 166828 - protein, 195 aa, Oryza sativa
  Clone ID: PAT_MRT4530_65499C.1.pep
MEKNLEKRSRKRSRYLSPPYTFPFTTVTVQDDVSVSDSDQSEDLTNVAVADMLSALHAAALLDMDAANVHLLRRFFTLHKTTSPSSSSTRINAQAEFNPSSSRQKEEETTSKTKKKKKKEAAAAASTPTTTIRLPLTDVRNNLQKMISSLLGRSPTATATASHDHGAKLALAGEMRGLLAKVDKMLSATTPANRH

SEQ ID NO: 166829 - protein, 50 aa, Oryza sativa
  unsure (1)..(50): unsure at all Xaa locations
  Clone ID: PAT_MRT4530_6549C.1.pep
MNPSMDKPATTILXMKFFVLXTKKKKKKKKKKKKKKKKKKTKKKKKKKKK

SEQ ID NO: 166830 - protein, 151 aa, Oryza sativa
  Clone ID: PAT_MRT4530_654C.1.pep
MGNRRAAWSWSTGIDRPGGDGVAAEDGQRLVAASNRPMQCDREGGEATPPLRCCACAEADSAAHGDWTVVSGHSNEINGDETPNNTVCHLNPQPQPLPLQSDRAEADEAHGHGDATAKKHKATTSFSMDLPLRLQYPHELAIGASPKTRSV

SEQ ID NO: 166831 - protein, 550 aa, Oryza sativa
  unsure (1)..(550): unsure at all Xaa locations
  Clone ID: PAT_MRT4530_65500C.1.pep
TLGWIGSIDFFPSPTHIDNLVKNLPTNRAPGQMVLMIFFIKKCRPIICHDYYKLCADFHLGSLNXILSITLIPKKLNPMYINDYRPIALMGIALKIQTKLLADRLQKVILSLISXNQYGFIQELKNHSGLNFEFLHQCHQSKKEIVLLKLDFEKTFDTIEHEAMLQVMKAMGFTDVCLNWVSKLFSSSXLLLNGIPGKNSCKRCVRXGDPLSPLLFVLGVELLQAVSNKSHQVGLLSRPIPLVDDHNFPIVQYDDDTLLYVKESGRELFVLKALLQTFAQGTSLNVNYHKSCLIPINVDKDKAQMLAGVLHTXCSQIGSLTFTYLGLLLGTTRPRVVDFAPLIDITERRLSVNSSFLSYGDRLILVNFIFFSLPTYYXCTFKLPKLVIENIDRAWRNCLWRGSDINSNRKSLIAWDVVCKPKVKGGLGVINLMVQNQALLIKYMDKIYNKMDLPWVRLIWSSNYMNCVPHLVRVSFWWRHICKSMVIFRGISTCSLGNGATCSCWEXPLFWFRMPRLFSFAADKLVSVQNFRGTNLEDNFLLPLSQQAYS

SEQ ID NO: 166832 - protein, 137 aa, Oryza sativa
  Clone ID: PAT_MRT4530_65501C.1.pep
MSLSSAGARLYTVVEGEEEDWPIFFLPLPPGELVGGLELWYASLSLAKESKHAAGLGGLGANAIFFKLGLGVGFAHLSRSACSTGVRLSIKGDIISGVFYVTAATGHAVDQSSIDAVRQRVGMACLVAKEEHRRHLY

SEQ ID NO: 166833 - protein, 860 aa, Oryza sativa
  unsure (1)..(860): unsure at all Xaa locations
  Clone ID: PAT_MRT4530_65502C.1.pep
LPSLGARSNRRIKLRRFIISPYDRRYRIWETFLIVLVVYSAWVSPFEFGFIPKPTGALATADNVVNAFFAVDIILTFFVAYLDKMSYMLEDDPKKIAWRYSTTWLVLDVASTIPSEFARRILPSKLRSYGFFNMLRLWRLRRVSSLFSRLEKDRHFNYFWVRCAKLICVTLFAVHCAACFYYLLADRYPVPTSTWIGNYMADFHERSLWIRYVTSVYWSITTLTTVGYGDLHAENTREMIFNIFYMLFNLGLTAYLIGNMTNLVVHGTSRTRNYRDTIQAATSFGVRNQLPPRLQDQMISHISLKYRTDSEGLQQQEILDSLPKAIKSSISQYLFFHLVQNVYLFQGVSNDLIFQLVSETNAXYFPPREDVILQNEAPTDFYILVSGSVELVEQQNGADQVIQVATSGEVVGEIGVLCYRPQLFTVRTRSLCQLLRLNRTAFLSIVQSNVGDGTIIMNNLIQFLKEQKENSVMAGVVKEIESMLARGNLDLPITLCFAVTRGDDFLLHQLLKRGMDPNESDNDGHTALHIAASKGNEQCVRLLLEYGADPNARDSEGKVPLWEALCEKHAAVVQLLVEGGADLSSGDTGLYACIAVEESDTELLNDIIHYGGDVNRARRDGTTALHRAVCDGNVQMAELLLEHGADIDKQDGNGWTPRALAEQQGHDDIQLLFRSRKAATASGHHHVPSSTTTRVAPAAAAASLIGRFNSEPMMKNMIHEDADLPSRVLPEKLRRKRVTFQNSLFGVISSSQAQRETDHPLSRGGLAATGSPNPSSGSRNAVIRVTISCPEKGNTAGKLVLLPQTLDMLLELGAKKFDFAPTKVLTVEGAEVDEVELIRDGDHLVLVSNEWDAEKMKGKS

SEQ ID NO: 166834 - protein, 943 aa, Oryza sativa
  Clone ID: PAT_MRT4530_65503C.1.pep
MARWGAARMAACGPWGRNRRVGAGDAFEASEVRRDGRSRMMPACGPWGAGHGGGDPALERELSRDGSHYSISSAILPSLGARSNRRIKLRRFIISPYDRRYRIWETFLIVLVVYSAWVSPFEFGFIPKPTGALATADNVVNAFFAVDIILTFFVAYLDKMSYMLEDDPKKIAWRYSTTWLVLDVASTIPSEFARRILPSKLRSYGFFNMLRLWRLRRVSSLFSRLEKDRHFNYFWVRCAKLICVTLFAVHCAACFYYLLADRYPVPTSTWIGNYMADFHERSLWIRYVTSVYWSITTLTTVGYGDLHAENTREMIFNIFYMLFNLGLTAYLIGNMTNLVVHGTSRTRNYRDTIQAATSFGVRNQLPPRLQDQMISHISLKYRTDSEGLQQQEILDSLPKAIKSSISQYLFFHLVQNVYLFQGVSNDLIFQLLRTVTEYAYLVLLLDFVFEVSEMKAEYFPPREDVILQNEAPTDFYILVSGSVVIQVATSGEVVGEIGVLCYRPQLFTVRTRSLCQLLRLNRTAFLSIVQSNVGDGTIIMNNLIQFLKEQKENSVMAGVVKEIESMLARGNLDLPITLCFAVTRGDDFLLHQLLKRGMDPNESDNDGHTALHIAASKGNEQCVRLLLEYGADPNARDSEGKVPLWEALCEKHAAVVQLLVEGGADLSSGDTGLYACIAVEESDTELLNDIIHYGGDVNRARRDGTTALHRAVCDGNVQMAELLLEHGADIDKQDGNGWTPRALAEQQGHDDIQLLFRSRKAATASGHHHVPSSTTTRVAPAAAAASLIGRFNSEPMMKNMIHEDADLPSRVLPEKLRRKRVTFQNSLFGVISSSQAQRETDHPLSRGGLAATGSPNPSSGSRNAVIRVTISCPEKGNTAGKLVLLPQTLDMLLELGAKKFDFAPTKVLTVEGAEVDEVELIRDGDHLVLVSNEWDAEKMKGKS

SEQ ID NO: 166835 - protein, 128 aa, Oryza sativa
  unsure (1)..(128): unsure at all Xaa locations
  Clone ID: PAT_MRT4530_65504C.1.pep
TGPPLGXFFKPFXTGKXRSXGVXKXKTXFGKXSFFGPSXQTRGRXGIWXCCLWKTLXGXXLGRTHXRXRNXXEEXWGFGGXGFSPMFWXXKRHFGFXLVDPXFXGXFLXRXNXPXRMHLDIPQXXQXX

SEQ ID NO: 166836 - protein, 135 aa, Oryza sativa
  unsure (1)..(135): unsure at all Xaa locations
  Clone ID: PAT_MRT4530_65505C.1.pep
HPVTSVFTVEANLLLSLPGDFSDARGDPQAISSPVRPPPVAMLSSASPSTAPSAEYXPEKSWTIWYQRVSASKKVHWDEIGIGQALALTIANSANDEPLMAAATYFDDLLVLDPSIEQALDEEDIEDDVDQVEPK

SEQ ID NO: 166837 - protein, 88 aa, Oryza sativa
  Clone ID: PAT_MRT4530_65506C.1.pep
ANKLPGFFCLTMAAHRRSLLGHFNEPPEVFDDLGPYGPNISNWVIKKGIGKHFFPKKSISLKKLVKIGNQMANFLDCWTVKNWGKQNL

SEQ ID NO: 166838 - protein, 99 aa, Oryza sativa
  Clone ID: PAT_MRT4530_65507C.1.pep
DSYWTSLGRERDIYTKPSPKNFNYFFSEEMRKAYTCKLTALTTLAKVTCDGPKPSSLTASRMVSDQWSLVTPISDGQVTRRPSEVLVSASLGRVRTRHR

SEQ ID NO: 166839 - protein, 75 aa, Oryza sativa
  Clone ID: PAT_MRT4530_65508C.1.pep
CITLELTSSQFFPLTGTPFSGPGARSRASDRAESPSARAGRTEDPQGQSCQSRPRPCGEWVDRNPAAAGPALYMY

SEQ ID NO: 166840 - protein, 45 aa, Oryza sativa
  Clone ID: PAT_MRT4530_65509C.1.pep
IPDHQIIGRNGNCLPNLIPASPKCGVQHPTLLNHVPKIVSHSNRS

SEQ ID NO: 166841 - protein, 171 aa, Oryza sativa
  Clone ID: PAT_MRT4530_6550C.1.pep
KVTTKNNEYYPRTRINITDNELTTTNNEKSGSTITHVAVCQIRQGRGRRRHSCRIGSRRRQPPDPPAGETAATARHRRTWKSPPPPVVIAHGRSHRHPSSPHDGKSHRHRRPWSSHAGDATAARRRRTMGEVTAITTIRHEEDGGKAGEASGGEGRSERGEKRWGREVPGR

SEQ ID NO: 166842 - protein, 79 aa, Oryza sativa
  Clone ID: PAT_MRT4530_65510C.1.pep
MFFYFWSSYQIRSDYRSLQLITLHKNQLLHTDTSNKKKVNSSTICPYKELDFSFSNTPQIQNHGHILTPARSWNPIRLS

SEQ ID NO: 166843 - protein, 75 aa, Oryza sativa
  Clone ID: PAT_MRT4530_65511C.1.pep
MTSIEEGRIWLRVRERSGIQFDPIDSCCDEAEGVGRGHSQPNLEQWFLLPSPLARSGRRRPEDNKYGRGMVAGDE

SEQ ID NO: 166844 - protein, 53 aa, Oryza sativa
  unsure (1)..(53): unsure at all Xaa locations
  Clone ID: PAT_MRT4530_65512C.1.pep
LRIKRLIPSFXALIKVDSCHSLSLLQNKKEKGKKKQDPGQRKMLPGRTRPWAV

SEQ ID NO: 166845 - protein, 583 aa, Oryza sativa
  Clone ID: PAT_MRT4530_65513C.1.pep
MREESAKKSKLSWSKSLVRKWFNIRTKAQDFHADSETTTQGRDGGGGAGGRASFSASSASTSSAKKSRTDRSSSKRSADRVRRGRNDFDLARLTEVQDYRIFAATWNVGGKSPPRGLNLDEWLHSSPPADIYVLGFQEIVPLNAGNVLGTEDNIPAKKWVSLIRRTLNKNPGASGSGVYHTPSPVLNPVVELEADFEASARRQENYSFFHRRSFHNLSRSLRMDADYMFPQPKLDRRFSVCDPVSLGGRPSDFDGNLRWLGSPDEENIDEELSNAAQCSPLPYSCNTTAPTEANDEQPNGSRYCLVASKQMVGIFLTVWVRNEIRDDVRNLKVSCVGRGLMGYLGNKGSISISMSLHQTSFCFICCHLTSGEKEGDELRRNSDVMEILRKTRFPRVRGANDVKSPETILEHDRIIWLGDLNYRIALSYCSARALVEMHNWKQLLEKDQLRIQQRYGRVFQGWKEGRIYFPPTYKYSFNSDRYAGEGMHPKEKRRTPAWCDRILWYGNGLNQLCYVRGESRFSDHRPVYSIFMAEVEIVHHRRKNMGYFSSRIEIRVLAKNTNMQGSRVSSLGDQIYSSKMCKY

SEQ ID NO: 166846 - protein, 135 aa, Oryza sativa
  unsure (1)..(135): unsure at all Xaa locations
  Clone ID: PAT_MRT4530_65514C.1.pep
MEFFHFLAGDGVEKQGMAAAGAGRLRERRQRRRXREEWQLRDEPLHVRRVLHQRGTHHDGKHRRSRGRRRRRGGEGRRAPGGGVAAHVADEVVDGDGRHHLVPCPPPPSSATIGTLLSGDGGGITAEDDINSSGS

SEQ ID NO: 166847 - protein, 308 aa, Oryza sativa
  Clone ID: PAT_MRT4530_65515C.1.pep
MAAEPPADGRDPPADDGAAGDGAVESAAAEALLSAASEQLTLVYQGEVYVFDPVPPQKVAPFFTPSKIFFHRVRLVLPFRPFGSSVPIFGEFENRVQAVLLVLGGSDMPPGLVSMAVPTTFDEKSTTVAARRVASLMRFREKRKERCFDKKIRYSVRKEVAQKMKRRKGQFAGRADFGDGSCSSAPCGSTANGEDDHIRETHCQNCGISSRLTPAMRRGPAGPRSLCNACGLMWANKGTLRSPLNAPKMTVQHPADLSKTGDTDDSKANLCAEHNQTTMKTDTEMVPEQEQKADVLPPTKEEDSMATS

SEQ ID NO: 166848 - protein, 76 aa, Oryza sativa
  Clone ID: PAT_MRT4530_65516C.1.pep
MGKRLEKIQSAAREQKAKLYIIVACIALLVCGCTTAAHHHQRKGYRQCKSARCIWLSTAILGGSRLISSGLSSKAN

SEQ ID NO: 166849 - protein, 88 aa, Oryza sativa
  unsure (1)..(88): unsure at all Xaa locations
  Clone ID: PAT_MRT4530_65517C.1.pep
PPSSRAWGFXAPPPGAGASAFRSFPALPKDLVANMFFFFGHPFFAWPGGPPLFLVSPLLGGVPGHNPLSPNPPGCLSFAFFFPGRRSW

SEQ ID NO: 166850 - protein, 75 aa, Oryza sativa
  Clone ID: PAT_MRT4530_65518C.1.pep
ICGFRNYITSPELIKRFEHFVRMQVVEEFHQRRSRALSASTAAPPPPTRTGVLSGSSEGGQVIGLVFIFSFWIGF

SEQ ID NO: 166851 - protein, 514 aa, Oryza sativa
  Clone ID: PAT_MRT4530_65519C.1.pep
MGRSMLPEQQEDVSRKSKKAKKSKKDKKRKLEAEAEVVVVEAAAATSTDEATKSSKKKRAKGDLGQGEEAENGGGKVVAVTGKGSADAKYAPLSSFAATALPPQVLDCCKGFERPSPIQAYAWPYLLDGRDFIGIAATGSGKTIAFGVPALMHVRRKMGEKSAKKGVPRVLVLSPTRELAQQIADVLCEAGAPCGISSVCLYGGTSKGPQISALKSGVDIVIGTPGRMKDLIEMGICRLNDVSFVVKYILIKSQVQTQLRLGVTKKTNFSVLDEADRMLDMGFEPEVRAILSQTASVRQTVMFSATWPPAVHQLAQEFMDPNPIKVVIGSEDLAANHDVMQIVEVLDDRSRDSRLVALLDKYHKAQRGWSAVSVHGDKAQHDRTKALSLFKEGSCPLMIATDVASRGLDIPDVEVVINYSYPLTTEDYVHRIGRTGRAGKKGVAHTFFTQENKGLAGELVNVLREAGQVVPPALTKFGTHVKKKESQIYGSHFKEIKADAPKSTKITFGDSDED

SEQ ID NO: 166852 - protein, 114 aa, Oryza sativa
  Clone ID: PAT_MRT4530_6551C.1.pep
DHRPTPRAVRPSAAALHQPHPPPIPKYTSRSRGPEIPKSPTPPLLFASPPPPPPLLPLHPTARSAPSGELHGPRLPPPPPSRPHPSRKRPLTPFKPCSDMGMELDLEGVELFPL

SEQ ID NO: 166853 - protein, 112 aa, Oryza sativa
  Clone ID: PAT_MRT4530_65520C.1.pep
GCRRDSRPSKLSTTGYFASHRLTPPPPPPPPPSPSRGPVAPLPAGHAAAARSPPSPRPSSAGTRRSLRPRAPPPDLLPLVAGDDGRSGAQVSPRRRCSLSSLLFSSVLNFST

SEQ ID NO: 166854 - protein, 517 aa, Oryza sativa
  Clone ID: PAT_MRT4530_65521C.1.pep
MADMVKFTMEWLQDPLSLAIVVTVAVLIMRMQRRRAAPFPPGPKPLPIVGNMAMMDQLTHRGLAALAKEYGGLMHLRLGRLHAFAVSTPEYAREVLQAQDGAFSNRPATTAIAYLTYDRADMAFAHYGPFWRQMRKLCVVKLFSRRRAETWLAVRDESAALVRAVAASRGEAAVNLGELIFNLTKNVIFRAAFGTRDGEGHDEFIAILQEFSKLFGAFNIGDFIPWLSWADTNGINARLVAARTALDRFIDKIIDEHMERGKNPDDADADMVDDMLAFLAEASAGDGADDLQNTLRLTRDNIKAIIMDVMFGGTETVASAIEWAMAEMMHSPDDLRRVQEELAAVVGLGRDVAESDLDKLPFLRCVIKETLRLHPPIPILLHETAADCLVAGYSVPRGSRVMVNVWAIARDRAAWGPDADAFRPSRFAAGAAAEGLDFRGGCFEFLPFGSGRRSCPGMALGLYALELAVARLAHGFNWSLPDGMKPSELDMSDIFGLTAPRATRLSAVATPRLTCPL

SEQ ID NO: 166855 - protein, 96 aa, Oryza sativa
  Clone ID: PAT_MRT4530_65522C.1.pep
MGRWVRPEVYPLMAAMMLASGMVVFQLGRNVCTNPEVKISKRNRRNAVPDSAAEAERYSMHGFRRFFGRRRPEVMPSINRFFSNSDRPNHDENNDD

SEQ ID NO: 166856 - protein, 201 aa, Oryza sativa
  Clone ID: PAT_MRT4530_65523C.1.pep
TRGPQDVRTLQVRAAHTARAVRRQDVVCTAWLWGNKGHIVTNNHCFFNQTMVDAAQFDFGVESPSCTTKCKPGSCKITRAVKGKGNVQFIASDPDLDIALLQIKAPLADEIVSSFGYLRILFGMPAVGDEIYIPQHPGGAARQIAKTDDDSNKSIATIKSVNSAVVVDSTTYQGLIGYSADTESGSSGSPVISRSGNVVVG

SEQ ID NO: 166857 - protein, 112 aa, Oryza sativa
  unsure (1)..(112): unsure at all Xaa locations
  Clone ID: PAT_MRT4530_65524C.1.pep
SLRARHPPPLPPLPSPIRPPPTAGFASAPAXPRPRRPPPASAPRLSPXPPPPVARRPPLASPPRPXPWPRRPPTASPPLPPPPAASGPRPPPAAGXPPPPAALSRCSRPAPV

SEQ ID NO: 166858 - protein, 78 aa, Oryza sativa
  Clone ID: PAT_MRT4530_65525C.1.pep
TRPQLQFSKSDPPILFLVKFCFPPPFWAPPRVFNLNFFWQNFFFHPTGGFFFFFFNPFRVFFPPFLKKNWQFSPPFFF

SEQ ID NO: 166859 - protein, 181 aa, Oryza sativa
  unsure (1)..(181): unsure at all Xaa locations
  Clone ID: PAT_MRT4530_65526C.1.pep
MADSTAMTVDFLRARLLSERSVSRAAKERADQLAKRVAELEEQVQAVTAQRRQAERAATEVLGILESHGFGGNLSDVLDSGSDRDGEEDDDPRDARSDGDTAGSRGEEQPPAQXEAAEDALSGTAEPGGGLSWKGRSXYEKDGEMERVLERQAELIGQYEAEEEAQRQWENQFNENRSSAK

SEQ ID NO: 166860 - protein, 714 aa, Oryza sativa
  Clone ID: PAT_MRT4530_65527C.1.pep
MADSTAMTVDFLRARLLSERSVSRAAKERADQLAKRVAELEEQVQAVTAQRRQAERAATEVLGILESHGFGGNLSDVLDSGSDRDGEEDDDPRDARSDGDTAGSRGEEQPPAQCEAAEDALSGTAEPGGGLSWKGRSVSPRKARQLKQKHRRSYFYLLSSDPSPKYRMGQSCRKNKRKELSNGKSTAPEEQRGDVEEIAWSQKGQQDGSDCTDDGQADMDGEVAGGQYVIRYEKDGEMERVLERQAELIGQYEAEEEAQRQWEKQFNENRSSAKVHVEAENKACQIENGWEQSKEHSRLADQAVHCNEEAKPGVKNHPSASNNRSAGLLLNGSLPESPQDTSGQEAAADQRDSHEELHGHCHAQSQGNSNVAGTMTGKNQEQGNENPDGCSSYCDIKAPSDGSPSMSDATLNSKVSDWSSSRFHDHGDNQVDAGPDQQPTSNMDIECVLQALQLARISLSQKLSKPVPPSQVTLALPAPGDHEHSEDDGYSPVDDEFNSARDELCSSSQSPDQEILALPAPEDYHDRENLPANDDATISLTEEQTSSSPHRQEILALPAPVDDYHREIVDDIKIPICIAGLFRLPTDSFPKDEMVSTCNKYGGSELNLRPTAAAPQNAFVSNTADRVTVAPSEIRDDHGFSTRPCYDPHSSGLLSVPTSGRCSTPSSDFTIRGASFLSGIPGLAEDFRKGRPLADADLFMQRGCDYTISNKWML

SEQ ID NO: 166861 - protein, 195 aa, Oryza sativa
  Clone ID: PAT_MRT4530_65528C.1.pep
MYCTYRLAAARRRERRNTTTSTHACRAVHCADDQSKSRHRADEEPARSQDAAQESRPPTAVQTAKSAPAQEEEEINSWNMTNLIKDQQGEPYVKSFSKDRISSKQRGSRLGCMRRLSWALREDVVSAQSLGPSRAGAQQACRSWPMRQLDRSIAGRVLSGMWIGLRFGGREFNLDIVIGMEYEGFGENKSSAPTP

SEQ ID NO: 166862 - protein, 524 aa, Oryza sativa
  Clone ID: PAT_MRT4530_65529C.1.pep
MAETEDTQLQKAIFAQYIMMKKLFMELEEEREASATSASAALSMIRKLQKEKEEQRMEAWQYKRIAEEKISHSDKALEILQEVLQQKELENFYLRNQLLVYKHKLLDVGIDECDIADETITNNIPLFESKTVENLCRSIKRNFSLPTLQMKKLFAEKDTDRNVESTKSRLGGFVCNLSEDELKHISGNASDFKALEVQKSLLTDGDATEEHGEEPNPPSSDLSQQPHLLEESSCSSSLLSNHRDTSSERAIQVGENAEDTRHGDQLKQSHSGIGKEEVQSHPLEESSSCSSFSTSSNHRDICSEREIQVGRNAEDAPHGDQTKESHSGIEAEEVAVHPISDIVDTIKIQERSQGVEESSCTANEIITKESELSPKDVPKERRPQALSKLSATRKVGSMNNLYRNVHVITDKSSTPRGKNSTPRAGTERTRSRLKRVQSEKMVEMNDTRKNKEQIIMLKEVYEQLNMIESHMRPSTSQETPRNDQSLESVLESSNMSNHANFPTGGSVLLLIARPLWPLLYHLNF

SEQ ID NO: 166863 - protein, 44 aa, Oryza sativa
  Clone ID: PAT_MRT4530_6552C.1.pep
MAARKLGGVQYLRPIQYGAVLTFEKAHNPEEQIDGPPNKKSAQI

SEQ ID NO: 166864 - protein, 174 aa, Oryza sativa
  unsure (1)..(174): unsure at all Xaa locations
  Clone ID: PAT_MRT4530_65530C.1.pep
LIRHPAYTLCFRLVCCVNCERIQFHTEQLCQETGPRGPSAEPLARAGSVQEVGLAWWRPRYNTNAYKYTHTYNYKHIFYLEISIYXKLEQYILRLARRSGAEQLPKESVARKGDSRVAPPEQGRRLGDLSHHPRHTWMLCIYGLSYQSKHISQIGSAXLCFIFFEKARVXEHLF

SEQ ID NO: 166865 - protein, 75 aa, Oryza sativa
  Clone ID: PAT_MRT4530_65531C.1.pep
CIYLLGMVGMCDLKGTLKVSGLEPSPSVGSSCIWRLRRWNFMICPVSICHYHKNLTTGYSNTLIRIARTAADLVL

SEQ ID NO: 166866 - protein, 476 aa, Oryza sativa
  Clone ID: PAT_MRT4530_65532C.1.pep
MSRPRTTRCPKRPAPQLAVAPCAATAKRRRLAPPESPWASLNPDLLRLVAERALASDLLDYVRLRAVCAAWRSATPCPRGRGITDPRFHPRRWMMFPEGHGLHPGHAKLRGFVRFFNLSTGALARAKLLLFQDHMVLDSVDGLLLLQRDHDTAIRLLHPFTGDIADLPPLETLRPQMGNTTNSVLWNYNEEKHRIGFLRDVCASVSVNDTGSITVMLAFHLFNRVAFAASGDLQWTLSKCYFGRPCWRTLSYQGKLFMVKAKHDITGNSDILQIDPPNDQDAEGSPLPEKELAPKLVATIPKDKLFGPCFLAECDSEILIIGHDSRPTSLDSQTMLLPFAYNDIGNYTHTSVYRISDLTSGRFSPVASIGDHALFIGPRTICVSSKALPTIFCGDTGGYIFHTPPTELFFTQYHLSSRTWSPLIDGSIGNSPPPRPYSLIHHILTCCYRKYWNKGLIFYRETTPSWRVKRNCRVGG

SEQ ID NO: 166867 - protein, 36 aa, Oryza sativa
  Clone ID: PAT_MRT4530_65533C.1.pep
LRSEECTKTGTMAVPWVTKFPFLYSHRENIIGSEDM

SEQ ID NO: 166868 - protein, 113 aa, Oryza sativa
  unsure (1)..(113): unsure at all Xaa locations
  Clone ID: PAT_MRT4530_65534C.1.pep
KSIGSVLIQEVAGKERIIFYLSYRLLDAETRYSPVEKLCLCLXKLRHYLLSNECTIVYKADVIKYMLSAPVLKGRVGKWIYALIIYDLRYESPKAVKGQAIADFIVEHRDDSI

SEQ ID NO: 166869 - protein, 92 aa, Oryza sativa
  Clone ID: PAT_MRT4530_65535C.1.pep
PLPSRNLTPSSSVFTTETNFALSLFGDLPDAQGDPQAISFPTKSPPATMSSSTSPSTAPSAEYAEHLSNLVAIPSLSHKNYYFLGPIGNLDL

SEQ ID NO: 166870 - protein, 235 aa, Oryza sativa
  Clone ID: PAT_MRT4530_65536C.1.pep
MASGGGDARRRKEEGEEDGFSSDGGDTTDAESSDERAGAGAGRRAVPGANPILSRLAVSRNPSPLAAATAAPGVCLLRFAWESAAGSLVGAVVGYGKGLVTTKGFKGSFADAASSAKIFAVLAGVQSLVACTLRQLRGKDDVLNAGIAGCCTGLALSFPGAPQTMIQSCLTFGTFSYIIEMLNKQEPALARPSITGTKDLKAGHRVLPPFTLPLPQEAMEGFSSFQNFLSKFQGK

SEQ ID NO: 166871 - protein, 563 aa, Oryza sativa
  Clone ID: PAT_MRT4530_65537C.1.pep
MARQAVATFGRSTRPACHADTSRLDERTNDHGETGRRHASADALEHRDAAATSPPPPPPLALPPRSPLHPLASSAAASPCRHSLASLAAVLASPPPRLLRRRFASPPPPRLPCRCARLSTPSPPPLPPPPPRLASPRSCLCRRRLKEKRERESNPYLQDCKLTSIGLFGPPDDSGLQLDENKIDDIPQVSQLENEALTQEFTEDEIKKAIFQMEHNKAPGPDGFPAEFYQVFWNVIKSDLLDLFIEFHNGTLPLFSLNFGPIILLPKCMEAMKIQQYRPICLLNVSFKIFTKVATNRIIGVAQKVISPTQTAFIPGRNIMEGVVILHETIYELHRKNKSGVIFKIDFKKAFDKVKWSFVQQTLRMKGFSPKRCQWIASFIQGGHVGIKVNDQVGNNFQTYKGLRQGDPLSPILFNIVADMLALLIKRAKDDGMLSEVIPHLMDDGLSILQYADDTIIFLEHDLQEAKNLKLILTVFEKLSGLKINFHKKSLAIKIGRLSNKELRRNLVVGKVVFRATHWLRSWAQLQKCEEDSELLKAACRILETTVMQLFVNFGWRFTNRIQ

SEQ ID NO: 166872 - protein, 439 aa, Oryza sativa
  Clone ID: PAT_MRT4530_65538C.1.pep
MKNGLLLTESRRMLDALKLLDDQRVSVVEEVKPLRRAAGVGEHGHKAMYLTAVFLNAATCSGLIFMLLVVGLGRSSGEEDDGGVEKDNDSARTLPQIEASPRAVVEVSVSGGCKGIEGWRPAAVMACEHEARWGGMDARLSALGGLECDRRQWVRRGAGRTWGGVRPVAWVNRRFGPRRSWGCARALVRQWSAATASGIGGGALADRQRRGRVSVAAPAEQIVAMSEGQGRTGGGSGDLGGAAERGGVRRRRDSSGGVIARAESAVERNQVKLQILYPSRSAPATNHHPSQSAGSGSPGATRAAVRQSTGSPGAARAAFCQPPPTPFTTPSWLTGARTVKYFHCGDGDANMTPDGEFTVAISVVPVPMLARLQLTWWGRGEEGRRGGCSQWPTGKECGEGSLPLNLQRHRSLGHLAPLLRHDTRQQAKAKAKAKPKHPS

SEQ ID NO: 166873 - protein, 259 aa, Oryza sativa
  Clone ID: PAT_MRT4530_65539C.1.pep
MPVSRGGKAASSKADPFDSDSDSDLVPKKKPGAYTAPSGAAKARYKDDFRDSGGLEQQSVQELENYAAYKAEETTDALGGCLRIAENIREDAANTLVTLNKQGQQISRTHEKAVEIDQDLSKGESLLGSLGGFFSKPWKPKKTRQIKGPAHVSDDSFKKKASHIEQREKLGLSPSGKSANRSYAEPTTAMEKVQVEKQKQDDALDDLSGVLGQLKGMACDMGSELDRQNKALDDLQGDVDELNSRVKGANQRARKLIEK

SEQ ID NO: 166874 - protein, 83 aa, Oryza sativa
  unsure (1)..(83): unsure at all Xaa locations
  Clone ID: PAT_MRT4530_6553C.1.pep
DQISTTSMTKSHYANKSLNREVKTLTTHHRATKXYTNNVTQRNAFPSLGTGLERITSSKAYLNRKRITHQKLAQLKMGRDVTF

SEQ ID NO: 166875 - protein, 433 aa, Oryza sativa
  Clone ID: PAT_MRT4530_65540C.1.pep
MAPLYGSSSSAAATKALLLNPAAAHAFVPSSPGPRALRRGGASLRCYAAAAAAVAEQHRIKVHNPIVEMDGDEMTRVIWKMIKDKLIFPYLELDVKYFDLGLLNRDATDDKVTVESAEATLDLYSNSFFMTLTDETRVKEFKLKSMWRSPNGTIRNILNGTVFREPILCKNVPRILSVPDGAEPVELNVYNFKGPGVALSMYNVDESIRAFAESSMAMALSKKWPLYLSTKNTILKKYDGRFKDIFQEVYEEKWKEKFEENSIWYEHRLIDDMVAYAVKSEGGYVWACKNYDGDVQSDFLAQGFGSLGLMSSVLLSSDGKTLEAEAAHGTVTRHFRLHQKGQETSTNSIASIFAWTRGLEHRAKLDKNDRLLDFTKKLESACIETVESGKMTKDLALLIHGPKVTREFYLNTEEFIDAVAQQLREKIQIPAVV

SEQ ID NO: 166876 - protein, 264 aa, Oryza sativa
  unsure (1)..(264): unsure at all Xaa locations
  Clone ID: PAT_MRT4530_65541C.1.pep
TRPLVCALLGDEMTRVIWKMIKDKLIFPYLELDVKYFDLGLLNRDATDDKVTVESAEATLEYNVAVKCATITPDETRVKEFKLKSMWRSPNGTIRNILNGTVFREPILCKNVPRILSGWKKPICIGRHAFGDQYRATDTIINGPGKLKMVFVPDGAEPVELNVYNFKGXGVALSMYNVDESIRAFAESSMAMALSKKWPLYLSTKNTILKKYXGRFKDIFQEVYEEKWREKFEENSIWYEHRLIDDMVAYAVKXGGGYVWACKT

SEQ ID NO: 166877 - protein, 70 aa, Oryza sativa
  Clone ID: PAT_MRT4530_65542C.1.pep
LVGPHLFVGGSFYGASMNPAVSFGPALVNCCFASQRFCWVGPLIRGGLSVVIYQVLFISPTLDHLSSPAF

SEQ ID NO: 166878 - protein, 68 aa, Oryza sativa
  Clone ID: PAT_MRT4530_65543C.1.pep
KKRAMPQASAPLAKKLFKDNSPSKGDIKLIKYKVCYNFCFPLQYRFHQRMYSYSSQAFCSRPLPYQFA

SEQ ID NO: 166879 - protein, 57 aa, Oryza sativa
  Clone ID: PAT_MRT4530_65544C.1.pep
GCFFILGGFYFFFLDTEHCFLYHRGGLSKYGWALRLILYNYSLKHPMHSTEGSTDPH

SEQ ID NO: 166880 - protein, 237 aa, Oryza sativa
  Clone ID: PAT_MRT4530_65545C.1.pep
RHRNCHMGFGLPTSGDLRNCGWTNAIGESCCVEAIESDDLIAYGLIPEFIGRLPITVGLNDLSEAQLVQVLMEPKNAIGKQYKKLFKMNDVKLHFTENALRLIAKKAASRETGARELRSIMEDILTEAMFEIPDAREGKEKIIAVLVDKESVGSVHSQGCGAKIFRDDGALELYVYQNNIRLPGLIPGNPKRTRIVSFCLLVALSATKLWVYHTFHCFSSIYEWVVSILCKANIFTQ

SEQ ID NO: 166881 - protein, 57 aa, Oryza sativa
  Clone ID: PAT_MRT4530_65546C.1.pep
MDSESGRSKHGGGGGDKGHVDTSHPRSDAAPMTGGKAGSNTGARAELDIHHSGGEAA

SEQ ID NO: 166882 - protein, 89 aa, Oryza sativa
  Clone ID: PAT_MRT4530_65547C.1.pep
MDPVMAEIIGCISCGDEQRQQGSSDDRRKKHAPTVAGVIVGQYLTITCRIAFELTELDDVNSVRDDYENDAANIQHNSLAFDQCLFSWL

SEQ ID NO: 166883 - protein, 348 aa, Oryza sativa
  Clone ID: PAT_MRT4530_65548C.1.pep
MGDSGGSVVSIDVERISFGGKEHHIHTNHGPVSVAVYGDHDKPALVTYPDIALNHMSCFQGLLFCPEAASLLLHNFCIYHISPPGHELGAAPISPNAPIPSVDDLADQVADVLDFFGLGSVMCLGVSAGAYILTLFAAKYRDRVLGLILVSPLCKPPTWTEWFYNKVASNLLYYYGMCGLVKEGLLQRYFSKEVRGCSDLPESDIVQACRSLLDQRQSMNVWRFVQTMNMRYDLTEDLKQLQCRTLIFVGEYSQFHTEAVHMTSKLDRRYCALVEVQACGSLITEEQPHAMLIPMEYFFMGYGLYRPSQLDCSPRSPLSPFCISPDLLSPESMGVKLKPIKTRVRLEV

SEQ ID NO: 166884 - protein, 82 aa, Oryza sativa
  Clone ID: PAT_MRT4530_65549C.1.pep
MWAEVTVCARARCECAKLTDQSSKPLVSRSRSRGQWNGKIIVHRSSNQQLATGVSVSGLNHQCSETMVIGGEPPAAASALPA

SEQ ID NO: 166885 - protein, 56 aa, Oryza sativa
  Clone ID: PAT_MRT4530_6554C.1.pep
MARYKLSSRTSLAVLVVTKAPSCLSSYFTLAPLIRRLLRLRRCQFASNWYLSVSCS

SEQ ID NO: 166886 - protein, 105 aa, Oryza sativa
  unsure (1)..(105): unsure at all Xaa locations
  Clone ID: PAT_MRT4530_65550C.1.pep
KLXFSLNYKQIXSSFEVLAYGSWHHDNRSSSPPSWLAVLTARGSXRAGYXRLTATSASTAGVGEGGVXGTPVPLVPELHRAXGAPVAGGPPWTPASSRRGSSWSR

SEQ ID NO: 166887 - protein, 553 aa, Oryza sativa
  unsure (1)..(553): unsure at all Xaa locations
  Clone ID: PAT_MRT4530_65551C.1.pep
MDSPATPVGLSPPLLSLEKGIIASSAQVYGGTGAQRRSTERTAEIDPSKTDGQDPSVHDRTTANGNDDVITGDGSASRARRRTTARRRKRRTPTRRGRRGELTEHLDDGKRRQTTMAARXSGGGLRVDGDGGAPAVFGGGLTMPMVATATEGGDCNGGAARLNRQQRRRRLRLHGGGAARDGGLRQRWRRREEVPGIFLXGLGGSDEGPRRPATGWKVRVRRERDRSESTSNPTETETETEREKIEEIEKIISPLLISSETERIDRIGKRRRLGFRPAAAREEREPRCLALQKGRHSLGNERGSGPPKPVKPLIRWAICAVMESSLLSGSVCIDAPVDGEDGETERWRRSGAMAGELVACTLEERHLSIRATWSSSAKTPPIRAAWSSLAARHSIRAGXELVGHTAPRFALPVARRPHRPLICVGRCSAATPPPEARGVRWWWLLASLSSYSSSTRARRLGLEERTPTPTPRTVSPPSCRKPVLGVVSDTWALFFSCSDRLANGTACTRTYNYKQVHKCFAAIYTEISRLSNRDYESGTKDRSLVPDRVTNRD

SEQ ID NO: 166888 - protein, 98 aa, Oryza sativa
  Clone ID: PAT_MRT4530_65552C.1.pep
FYPAESQPHMMRSFIVCTQILLRHMSILWVRTAQQRGLGTQSGMLSMGCMLVNRRSPTCGILFFAVNFFPVFLLFHVYIFDFDLQVWRYNGQSVMIVS

SEQ ID NO: 166889 - protein, 118 aa, Oryza sativa
  unsure (1)..(118): unsure at all Xaa locations
  Clone ID: PAT_MRT4530_65553C.1.pep
LTTKFGNPRIGDXKESGRSSRWRSSRNQSKDQLEXNRLRPGSIEFELDRVNRLSRIRQYDLLGQKSAAKTYGILEFVRDKSRVRYGHILIKSTGMLTHPKASFXTCTGVKQISQASCF

SEQ ID NO: 166890 - protein, 90 aa, Oryza sativa
  Clone ID: PAT_MRT4530_65554C.1.pep
LTNKGSVIMLGTPPNEFLVIQGHYGSTTWGDRPFASVIQHHRVRRPNPYTARSCKPETVALATLNTIMTLHTNPLYRREPLYPLPLECDK

SEQ ID NO: 166891 - protein, 163 aa, Oryza sativa
  Clone ID: PAT_MRT4530_65555C.1.pep
MGRKKLKAKQDIAPLMITHAGMADADVDWTSPDSGPVQAVGIKTWRSREAIYLAPCSREAIYLAHQSIWHVGQRKTASPPAEGLQRRRCVAEGLYLEHGRPGAAYKHSAEHAWQVGRSRVMPLGSRANCTIGQACQGVKNPVLHVHCEPKKLQVGHAETGPET

SEQ ID NO: 166892 - protein, 79 aa, Oryza sativa
  unsure (1)..(79): unsure at all Xaa locations
  Clone ID: PAT_MRT4530_65556C.1.pep
ESNDDDDGSVSQVRVTWSLNCSTYRARETPLLVSFNQRSGLSFEILERILRSSREXELGSDGPKTKTCHSCRQIXRRRG

SEQ ID NO: 166893 - protein, 120 aa, Oryza sativa
  Clone ID: PAT_MRT4530_65557C.1.pep
MARPHSSSSPCPCQGTAPRCGKNEGGVEESTRWQEQQQLEEELVSVAEAAGEGRRGGEEEQKGVEFGRLFVTFALRLYQKFRIQKLPTGSFFSFLFSTTAFDFESISVFKSFSRIKVKEI

SEQ ID NO: 166894 - protein, 64 aa, Oryza sativa
  Clone ID: PAT_MRT4530_65558C.1.pep
ASEEQRNSGFLHSSLFTSSIYPLRPNSDDTAKFGFMFDLKCNGFYTSTDAGHQIVLQTEFDRTI

SEQ ID NO: 166895 - protein, 1862 aa, Oryza sativa
  Clone ID: PAT_MRT4530_65559C.1.pep
MAYLAVAHSLSPNASGDDGEQNPRRRARTPPSPSRRNLGRGEALGEVEGSATSPPAGDGGGRRDGARRRLVYGDGGTPQGALQAAGALLRHPPVVPDPETPARRWLDDVADLRRRDARRATHATEGASSSGAPLRSGHGGRPPVSPVGGAGCRAFVASLRNVRWPPRFRPTITEKYDGSVNPAEFLQIYTTGIEAAGGDDRVMANFFPMALKGQARGWLMNLPPASVHSWEDLCQQFTTNFQGIYPRPGEEADLHAVQQRDDESLRSYIQRFCQVRNTIPCIPAHAVIYAFRGGVRHNRMLEKIASKEPQTTAQLFELADRVARKEEAWTWNSSGSGVAAPAAPGSAARSGRRDRRRKKGSARSDDEGHVLAVEGASRAPRKGRPASDKKKEAGAPSRERPTGKWCTVHNTSLHDLADCRAVKSLAERTRKWEEEKRQERREGKTPAAPAGNRRGEAKQKATAEDIDDGDDDLGFQEPEATVATVDGGACAHASRRSLKAMKRELLAAAPTHEATRRARWSEVALTFDQTDHPPCVARGGQIAMVVSPTVCNVKLGRVLIDGAFDAIKAPGMVFRPSQPIIGVTPGHTWPLGHIDLPVTFGGSANFRTERVDFDVADLSLPYNAVLGRPALVKFMAAVHYAYLQMKMPGPGGPIIVHGDLKVALACMEQRADHLAAASKPAGGDERLSTSVPAAPRQRMVTCDEVPEDALVSFLRANADVFAWRPADMPGVPREVIEHRLAVRPGARPVRQKVRRQAPERQAFIREEVARLLEAGFIREVIHPEWLANPVVVPKANGKLRMCIDYTDLNKACPKDPYPLPRIDQIVVSTAGCDLLCFLDAYSGYHQIRVAREDEEKTAFITPIGTYCYTTMPFGLKNAGPTFQRTTRISLGSQIGRNVEAYVDDLVVKTRNQETLLSDLAETFESLRSARIKLNPDKCVFDVPAGKLLGFLVSARGIEANPEKIRAIEQMRPPSKLRDVQCVTGCMAALSRFISRLGEKALPLFKLLKRSGPFTWTEEAERAFTQLKAYLSSPPVLVAPEPDEPLLLYLAATPQVVSAALVVERDEDNPHSARPHPVSTRPGREQGGEAPEPNGGPRPPTAGAGPPPACPTVPGAPDPQDGSGATAGRPRLSPSDPEVVGTEAECAPRGLSDEERPGDAAPGEEDRPRRKVQRPVYFISEALRDAKTRYPQAQKMLYAILMASRKLRHYFQAHRVTVVTSYPLGQILHNREGTGRVVRWAIELSEFDLRFEPRHAIKSQALADFVAEWTPAPEPVSAPEASSGPSQLPHTAYWVMQFDGSLSLQGAGVGVTLTSPSGDVLRYLVRLDFRATNNMAEYEGLLAGLRVAAGLGIRRLLMDAYVRQVRRMERHFDGIKLRHVPRRDNAVADELSRLASSRAQTPPDAFEERLAQPSARPDPLGETDAPERPPRPVGVQASGPEGSAPSSPRLIAWITEIQAYLADKTLPEDREGSERVRRISKRYVLVEGTLYRRAANRVLLKCIPREQGVKLLVDVHEGECGAHSASRTLVGKAFRQGFYWPTALNDAVDLVRRCRACQFHARQTHQPAQALQTIPLSWPFAVWGLDILGPFRRAPGGFEYLYVAVDKFTKWPEAYPVIKIDKHSALKFIRGITAWFGVPNRIITDNGTQFTSELFGDYCEDMGIKLCFASPAHPRSNGQVERANAEILKGLKTKTFNILKKHGDSWIEELPAVLWANLTTPSRATGETPFFLVYGAEAVLPSELTLRSPRVTMYCEADQDQLRRDDLDYLEERRRRAALRATRYQQSLRRYHQRHIRARSLCVDDLVLRRVQTRAGLSKLSPMWEGPYRVIGVPRPGSVRLATGDGTELPNPWNIEHLRRFYP

SEQ ID NO: 166896 - protein, 144 aa, Oryza sativa
  Clone ID: PAT_MRT4530_6555C.1.pep
MAAAAASSSTPAAVRKQYTIQVGENELVLKACPARRALLLPLYELELVNDEANVYKLIGPVLVKQDLAEAKANVKKRIEYISAELKRMDRALKDLEEKQNSKKESPHVERPERGGAISGHLLLKPCDVEAGERIDDRWWLTVFW

SEQ ID NO: 166897 - protein, 180 aa, Oryza sativa
  Clone ID: PAT_MRT4530_65560C.1.pep
MPSELLDGIDGRVTACRTGVASRWPRNAATPDAKAGSLVKLGAWGGDHGGKEYDVTVAPQRLEGFWLRYGKVIDCISSPTSTRTRTSTPSAPGAAKAASPNHVRAIGVREGGARLVGPIGDYTHVVTSLKLVTSQRTIGPFGNGAGTPFAVPVLNNGSVVGFFARAGPYLESIGIYVHPF

SEQ ID NO: 166898 - protein, 51 aa, Oryza sativa
  Clone ID: PAT_MRT4530_65561C.1.pep
MIPTSSQVSELYFQLLVQLSMNWQLCLLALPVPFLAEQMAVLYVTFLRLID

SEQ ID NO: 166899 - protein, 1743 aa, Oryza sativa
  Clone ID: PAT_MRT4530_65562C.1.pep
MAEQAVAHNLSPSASGDDGEQNPRRRARTPPSPSRRSLGREEAFEEVERSATSPPTGDGEGRRDGERRLLVYGDGSTPQGALQAAGALLRPPPVVPDPETPARRWLDDVANLVMTAQQRLGAGGRSSATKASGAATAGSVSSRRRARRAAAVTRRSSAIPSSTPPTQEDVRGGPDAHLNIERRRNGRRAAHATEGASSSGAPLRSGHGGQAPVSPVGGAGCRAFVASLRNVRWPLRFRPTITEKYDGSVNPAEFLQIYTTGIEAAGGDDRVMANFFPMALKGQARGWLMNLPPASVHSWEDLCQQFTMNSRAHIRAQVKKRTCMRDSEGTMSLFARRRDRRRKKRSAHSDDEGHVLAVEGASRATRKGRPASDKKKEAGAPSRERPTGKWCTVHNTSLHDLADCRAVKSLAERMRKWEEERRQERREGKAPAAPAGNRRGEAKQKATAGDVDDGDDDLGFQEPEATVATVDGGACAHASRRSLKAKKRELLAAAPTHEATRRAWWSEVALTFDQTDHPPWGVSSYTGGAALNILSPAAFDAIKALGMVLRPSQPIIDVTPGHTWPLGHIDLPVTFGGSANFRTERVNFDVADLSLPYNAVLGRPALVKFMAAVHYAYLQMKMPGPGGPISVHGDHKVALACMEQRADHLAAASKPEGGDERLSTSVPAAPRQRMITCDEVPEDALVSFLRANADVFAWRPADMPGVPREVIEHRLAVRPGARPVRQKVRRQAPKRQAFIREEVARLLEAGFIREVIHPKWLANPVVVPKANGKLRMCIDYTDLNKACPKDPYPLPRIDQIVDSTAGCDLLCFLDAYSGYHQIRMAREDEENTAFITPIGTYCYMTMPFGLKNAGPTFQRTTRISLGNQIERNVEAYVDDLVVKTRNQETLLSDLAETFESLRSARIKLNRDKCVFGVPASKLLGFLVVSAALVVECDEDNPHSAHPHPVSTRPGREQGGEAPEPNSGPRPPTAGAGPPPACPTVPGAPDPQDGLGATAGRPRLSPSDPEVVGPKVECAPGGLSDEERPGDVAPGEEDRPRRKVQRPVYFISEALRDAKTRYPQAQKMLYAILMASRKLRHYFQAHRVTVVTSYPLGQILHNREGTGRVVKWAIELSEFDLHFEPHHAIKSQALADFVAEWTPAPEPVSVPEASSDPSQLPHTAYWVMQSDGSLSLQGAGAGVTLTSPSGDVLRYMVRLDFRATNNMAEYEGLLAGLRVAAGLGIRRLLVLGDSQLVVNQVCKEYRCSDPQMDAYVRQVRRMKRHFDGIELRHVPRRDNAVADELSRLASSRAQTPPGAFEERLAQPSARPDPLGETDAPERPPWPVGVQASGPEGSAPSSLRLIAWIAEIQAYLADKTLPEDREGSERVQRISKRYVLVEGTLYRRAANGVLLKCIPREQGVELLADVHEGERAPGGFEYLYVAVDKFTKWPEAYPVVKIDKHSALKFIRGITARFGVPNHIITDNGTQFTSELFGDYCEDMGIKLCFASPAHPRSNGQVERANAEILKGLKTKTFNILKKHGESWIEELSAVLWANRTTPSRATGETPFFLVYGAEAVLPSELTLRSPRVTMYCEADQDQLRRDDLDYLEERRRRAALRAARYQQSLRRYHQRHVRARSLCVDDLILRRVQTRAGLSKLSPMWEGPYRVIGVPRSGSVRLGTGDGIELPNPWNIEHLRRFYPYALSGPGRLKSPNGAQNRAVPRGVVNSGGELAKAHNRVIHNPRSPRSRPGQSRHEDLPRH

SEQ ID NO: 166900 - protein, 811 aa, Oryza sativa
  Clone ID: PAT_MRT4530_65563C.1.pep
MDHDSLQNTMEHPVPGEEHEEDNSMKVDVAFDGVHSPFRYRHKKRSKVWEEYKPIFLNGKVQFAECLYCHNRLSCKDSNGTSHLWRHQKICPGKEEAAQRRQKDSYFPCVLVNENDPVSPHDPVNDVITETLSDINSVTPSGNRFTSKVWKEFTPVYIEGKLQAADCIHCQKRLSANKFGGRSHLSRHLITCAGRRGRGGGQIHQKGLFYPSSVPSLKSRVQDELSPALTNGKVQIAEYSSKLLRASSSGDSTPKPIRVVPAEHSVPTPDYTSLMKQRTSFVTTPAGQETSDPDLVGMIALHGYPLSIVEHEEMMRFVKKLNPVVNLVSRNAMEEHCLTLFQKEKENIKGKIAHFSRRVSLSASIWTPDGPETTVNYLCLTAHYIDEDWKVHRIIIKFGMFWSAPADLERMIHCMEACVPESESGSYNVILDAIRDWNLDQKLLSLTSVGEVRGDTNTSLLKEMLIEKKCLPIGGTLFNVACVDYVLNSIVFKVQADILRLVGDIVMDFLVSLTQQQLLEVISQTGLKCPQEDAKWWHKLYFRLEVLLHFKKSFPSEERVSPEDTKTAESVCKILRTIYRVIEVISSPSSPTANIYFNEIWKVRTVLQEEALNDHREIATVAMVMQEAFNEYWQNSYLWLAIPVVLDPRFKFSFIEFRLKRAFGTDSASYLSVIRETVRELFNEYCHSLNQASDVVSNSEALCADDNDSLEDWDQHLHEQASRQLSSELDDYLEDGLVPRKDDFDILNWWMTHSTKYPTLATIARDILAMPASAVQSEAAFSSSGPVIPKHQSTLNIRTIEALVCTRDWMR

SEQ ID NO: 166901 - protein, 83 aa, Oryza sativa
  unsure (1)..(83): unsure at all Xaa locations
  Clone ID: PAT_MRT4530_65564C.1.pep
DEIINYIQALQRQVEFLSMKLEAVNAHVNNGIEAFPPXDFGAQVYNTAPGLTFDPQTPREYAQGSTPSEWLHMQIGGTYERVT

SEQ ID NO: 166902 - protein, 1669 aa, Oryza sativa
  Clone ID: PAT_MRT4530_65565C.1.pep
MTAQQRLGAGGRSSATEASSAAAASSKSSRRRARRTAAVTRRSSAIPSSTPPTQEDVRGGPDARLDIERRRDDRRAAHATEGASSSGVPLRSGHGGRPPVSPVGGAGCRAFVASLRNVRWPPRFRPTITEKYDGSVNPAEFLQIYTTGIEAAGGDDRVMANFFPMALKGQARGWLMNLPPASVHSWEDLCQQFTTNFQGTYPRPGEEADLHAVQRRDDESLRSYIQRFCQVRNTIPCIPAHAVIYAFRGGVRHNRMLEKIASKEPQTTAQLFELADRVARKEEAWTWNSSGSGVAAPAAPGSAAQSGRRDRRRKKGSARSDVEGHVLAVEGASRAPRKGRPASDKKKEAGAPSRERPTGKWCTVHNTSLHDLADCRAVKSLAERTRKWEEEKRQERREGKTPAAPAGNRRGEAKQKATAENIDDGDDDLGFQEPEATVATVDGGACAHASRRSLKAMKRELLAAAPTHEATRRTRWSEVALTFDQTDHPPCVARGGQIAMVVSPTVCNVKLGRVLIDGGAALNILSPAAFDAIKAPGMMKMLGPGGPITVHGDLKVALACMEQRADHLAAASKPAGGDERLSTSVPAAPRRRMVTCDEVPIKEEDALVSFLRANADVFAWRPADMPGVLREVIEHRLTVRPGARPVRQKVQRQAPERQAFIREEVARLLEAGFIREVIHPEWLANPVVVPKANGKLRMCIDYTDLNKACPKDPYPLPRIDQIVDSTAGCDLLCFLDAYSGYHQIRMAREDEEKTAFITPIGTYFYTTMPFGLKNAGPTFQRTTRISLGSQIGRNVEAYVDDLVVKTRNQETLLSDLAETFESLRSARIKLNPDKCVFGVPAGKLLGFLVSARGIEANPEKIRAIERMRPPSKLRDVQCVTGCMAALSRFISRLGEKALPLFKLLKRSGPFTWTEEAERAFTQLKAYLSSPPVLVAPEPDEPLLLYLAATPQVVSAALVVERDEDNPHPAHPHPVSTRPGREQGGEAPEPNGGPRPPTAGAGPPPACPTVPGAPDPQDSPGATAGRPRLSPSDPEVVGTEAECAPRGLSDEERPGDAAPGEEDRPRRKVQRPVYFVSEALWDAKTRYPQAQKMLYAILMASRKLRHYFQAHRVTVVTSYPLGQILHNREGTGRVVRWAIELSEFDLRFEPRHAIKSQALADFVAEWTPAPELVSAPEASSGPSQLPHTAYWVMQFDGSLSLQGAGAGVTLTSPSGDFLRYLVRLDFRATNNMAEYEGILAGLRVAAGLGIRRLLVLGDSQLVVNQAYLADKTLPEDREGSERVRRISKRYVLVEGTLYRRAANGVLLKCIPREQGVELLADIHEGECGAHSASRTLVGKAFRQGFYWPTALNDAVDLVRRCRACQFHARQTHQPAQALQTIPLSWPFAVWGLDILGPFRRAPGGFEYLYVAVDKFTKWPEAYPVIKIDKHSALKFIRGTTARFGMPNRIITDNGTQFTSELFGDYCEDMGIKLYFASPAHPRSNGQVERANAEILKGLKTKTFNILKKHGDSWIEELPAVLWANRTTPSRATGETPFFHVYGAEAVLPSELTLRSPRVTMYCEADQDQLRRDDLDYLEERRRHAALRAARYQQSLRRYHQRHVRARSLCVDDLVLRRVQTRAGLSKLSPMWEGPYRVIGVPRPGSVRLATGDGTELPNPWNIEHIRRFYP

SEQ ID NO: 166903 - protein, 119 aa, Oryza sativa
  unsure (1)..(119): unsure at all Xaa locations
  Clone ID: PAT_MRT4530_65566C.1.pep
YVRQVRRMERHFDGIELRHVPRRDNAVADELSRLASSRAQTPPGAFEERLAQPSARPDPRTXPEDREGSERVQRISKRYVLVEGTLYRRAANGVLLKCIPREQGVELLADIHEGECGAH

SEQ ID NO: 166904 - protein, 655 aa, Oryza sativa
  Clone ID: PAT_MRT4530_65567C.1.pep
MGDKIDLPENILRDYIPDVDKVKWIPDNNHNITYFTEDDIKRITNNYSTKLGKGAYGEVYKGVIGDNRFVAVKKFIRVDKLDEFAKEVIVHTQVNHKNVVRLVGCCKDNNAPMIVFEYAANGNLSDLLYCGDTPISLGTRLSIVIQCAEALGCMHSMYNPIVHYDFKLSNILVDENFHAKISDFGISRILSTDNTNSDFGISRILSTDNTNLTVNPTNMEKNVTRRFIQAPQKRKGAKELFDVDIAKESNMKILEGIWKIAKDCIKEDIDKRPEMNDVAARLRELRKTLELGGKRQNFSTALSKSSSSDVYLGDIDDNTRVAVKVFTNVSESREEFVLQLIIQSQVQHQNIVKLFGCCLEMDHPISVCEYVPNGALCNYLVVEKGEETGERSLLDMNTRHFIALGVANAIACLHEKWLDTLNGSITPWDILLDGNFCSKLSKPTPIIINESTIMTTEVVPGNYMYMAPERLFFSRGFITAKADVYSFGQLLLDIVFGIRDTMFWEELVGRKSFDFVNIVYQEVYLKQRIVDCLDPCIIQAEAYDSARSMATAEHMVKTALWCMQFSADHRPSMQKVVEMLQGTIDIDEPPNPSSSNLYDSASYSSCEPVMKMSFNYRHNLPYPSSDEGEFKLLRRMSDAKGLGAGARTELTFICI

SEQ ID NO: 166905 - protein, 460 aa, Oryza sativa
  unsure (1)..(460): unsure at all Xaa locations
  Clone ID: PAT_MRT4530_65568C.1.pep
RYWGLCEFLDSLCARVLKAKYYPHGSLTDTAFGVNASSGWRGIEYGLKLLKHGIIRRIGNGXSVRVWQDPRLPRDYTRRSITLKRNCXIKWVSKLITNVGTWDATKVNQNFQQIDTYIFLKIRLSXRNEDDFVAWHPGKXRAAVRLRNIEGGSCSSTSSAKKSWDLISKSQVPQKVKLFAWRVASNNLATQENKKKRNIMTNDACTICGREKEDVLQALCRCPCANHLWQAMYKAGNVSVDIKVVQNGTPLLFDTLEQISEPEQSMFLTILWRNWHVXHEITHDKPAPPISSLGCEIDIYIXLKYCWSKQRMESWPNRDLERLXDALRDETGKVIFASCRSIGRCSGALESELLACVEGIAHAIQRTLLPIILETDCMXASVIQLLQSKDRGLSQLAHLVNEANXLITGDVVVTRKIHRCQNRLNHVLTNKSRSEHLTKFWLESNCNFISQLVCKDSLIK

SEQ ID NO: 166906 - protein, 1838 aa, Oryza sativa
  unsure (1)..(1838): unsure at all Xaa locations
  Clone ID: PAT_MRT4530_65569C.1.pep
MAERAVAHSLSPNASGDDGEQNPRRRARTPPFPSRRNLGRGEALGEVERSATSPSAGDGGGRRDGARRRLVYGDGGTPQGTLQAAGALLRHPPVVPDPETPARRWLDDVADLVMTAQQRLGAGGRSSATEASGAAAAGSMSSRRRARRAAAVTRRSSAIPSSTPTTQEDVRGGPDARLDIERRRDVRRAAHATEGASSSGAPLRSGHGGRPPVSPVGGTGCRTFVASLRNVRWPPRFRPTITEKYDGSVNPAEFLQIYTTGIEAAGGDDRVMANFFPMALKGQARGWLMNLPPASVHSWEDLCQQFTTNFQGIYPRPGEEADLHAVQRRDDESLRSYIQRFCQVRNTIPCIPAHAVIYAFRGGVRHNRMVEKIASKEPQTTAQLFELADRVARKEEAWTWNSSGSGVAAPAAPGSAARSGRQDRRRKKGSARSDDEGHVLAVEGASRAPRKGRPASDKKKEAGAPSRERPTGKWCTVHNTSLHDLADCRAVKSLAERTRKWEEEKRQERREAKQKATAEDIDDGDDDLGFQEPEATVATVDGGACAHASRRSLKAMKRELLAAAPTHEATRRARWSEVALTFDQTDHPPCVARGGQIAMVVSPTVCNVKLGRVLIDGGAALNILSPAAFDAIKATGMVLRPSQPIIGVTPGHTWPLGHIDLPVTFGGSANFRTERVDFDVADLSLPYNAVLGRPALVKFMAAVHYAYLQMKMPGPAGPITVHGDLKVALACMEQRADHLAAASKPAGGDKRLATSVPAAPRQRMVTCDEVSXQGGCPGPRPVQDHTNRWPVRQKVRRQAPERQAFIREEVARLLEAGFXIHPERLANLAVVPKANGKLRMCIDYTDLNKACPKDPYPLPRIDQIVDSTAGCDLLCFLDAYSGYHQIRMAREDEEKTAFITPIGTYCYTTMPFGLKNAGPTFQRTTRISLGSQIGRNVEAYVDDLVMKTRNQETLLSDLAETFESLRSARIKLNPDKCVFGVPAGKLLGFLVSARGIEANPEKIRAIERMRPPSKLRDVQCVTGCMAALSRFISRLGEKALPLFKLLKRSGTFTWTEEAERAFTQLKAYLSSPPVLVVSAALVVERDEDNPHSAHPHPASTRPGREQGGEAPEPNGGPRPPTAGAGPPPACPTVPGAPDPQDGPGATAGRPRLSPSDPEVVGTEAECAPRSLSDEERPGDAAPGEEDRPAERKLRHYFQVHRVTVVTSYPLGQILHNREGTGRVVRWAIELSEFDLRFEPRHAIKSQALADFVAEWTPAPEPVSAPEASSGPSQLPHTAYWVMQFDGSLSLQGAGAGVTLTSPSGDVLRYLVRLDFRATNNMAEYEGLLAGLRVAAGLGIRRLLVLGDSQLVVNQLCKEYRCSDPQMDAYVRQVRRIERHFDGIELRHVPRRDNAVADELSRLASSRAQTPPGAFEERLAQPSARPDPLGETDAPERPPRPVGVQASGPEGSAPSSPRLIAWITEIQAYLADKTLPEDHEGSERVRRISKRYVLVEGTLYRRAANGVLLKCIPREQGVELLTDVHEGECGAHSASRTLVGKAFRQGFYWPTALNDAVDLGLNILGPFRRAPGGFEYLYVAVDKFTKWPEAYPVIKIDKHSALKFIRGITARFGVPNRIITDNGTQFTSELFGDYCEDMGIKLCFASPAHPRSNGQVERTNAEILKGLKTKTFNILKKHGDSWIEELPAVLWANRTTPSRATGETPFFLVYGAEAVLPSELTLRSPRVTMYCEADQDQLRRDDLDYLEERRRRAALRAARYQQSLRRYHQRHVRARSLCVDDLVLRRVQTRSGLSKLSPMWEGPYRVIGVPLPGSVRLATSDGTELPNPWNIEHLRRFYP

SEQ ID NO: 166907 - protein, 197 aa, Oryza sativa
  unsure (1)..(197): unsure at all Xaa locations
  Clone ID: PAT_MRT4530_6556C.1.pep
MGPTCRATISLISSPLCSHHNLYDYVIVFADSTSPVVFINLPLXLVHIDGHLARFIDDIDCILYDGNDRVTNEGIDHIIYNDQPKWWPHRQRRPLTYARRSXWHPLTSTRCKMLLIVVXVFTPWRXFFSPSAICGYTYNHGYFMIGYIDEHLQQESSVATPVKXVCVIAIVHETPTMTAGGNRGESRDNIEGGVGTR

SEQ ID NO: 166908 - protein, 113 aa, Oryza sativa
  Clone ID: PAT_MRT4530_65570C.1.pep
MANMRSSSRTSSSSPAAALLRWGALTSAPRCMACGGTRREECRLCTRFSVHGRPNSWPMKLAQLAKKLQQRMVSVSASGQKAVTADDCCSAAAVEAGSRRDGREVREGVGRGE

SEQ ID NO: 166909 - protein, 1616 aa, Oryza sativa
  unsure (1)..(1616): unsure at all Xaa locations
  Clone ID: PAT_MRT4530_65571C.1.pep
MAERAVAHSLSPNASGDDGEQNPRRRARTPPPPSRRNLGRGEALGEVEGSATSPPAGDGGGRRDGVRRRLVYGDGVTPQGALQAAGALLRHPPVVPDPETLARRWLDDVADLVMTAQQRLGAGGRSSATKASGAAAAGSMSSRRRAWRAAAVTRRSSAIPSSTPPTQEDVRGGPDARLDIERRRDARRAAHATEGASSSGAPLRSGHGGRPPVSPVGGASCRAFVASLRNVRWPPWFRPTITEKYDGSVNPAEFLQIYTTGIEAAGGDDRVMANFFPMALKGQARGWLMNLPPASVHSWEDLCQQFTTNFQGTYPRPGEEADLHARFCQVRNTIPCIPAHAVIYAFRGGVRHNRMLEKIASKEPQITAQLFELADRVARKEEAWTWNSSGSGVAAPAAPGSAARSGRRDRRRKKGSARSDDEGHVLAVEGASRAPRKGRPVSDKKKEAGAPSRERPTGKWCTVHNTSLHDLADCRAVKSLAERTRKWEEEKRQERREGKTPAAPAGNRRDGGAALNILSPAAFDAIKAPGMVLRPSQPIIGVTPGHTWPLGHIDLPVTFGGSANFRTERVDFDVADLSLPYNAVLGRPALVKFMATEDALVSFLRANADVFAWRPADMPGVPREXPVRQKVRRQXPERQAFIREEVARLLEAGFIREVIHPEWLANPVVVPKANGKLRMCIDYTDLNKACPKDPYPLPRIDQIVDSTAGCDLLCFLDAYSGYHQIRMAREDEEKTAFITPIGTYCYTTMPFGLKNAGPTFQHTTRISLGSQIGRNVEAYVDDLVVKTRNQEALLSDLAETFESLRSARIKLNPDKCVFGVPAGKLLRFLVSARGIEANPEKIRAIERMRPPSKLRDVQCVTGCLAALSRFISRLGEKALPLFKLLKRSGPFTWTEEAERAFTQLKAYLSSSPVLVAPEPDELLLLYLAATPQVVSAALVVERDEDNPHSAHPHPVSTRPGREQGGEXPEPNGGPRPPTAGAGPPPACPTVPGAPDPQDGPGATAGRPRLSPSDPEVVGTEAECAPRGLSDEERPGNAAPGEEDRPXERKLRHYFQAHRVTVVTSYPLGQILHNREGTGRVVRWAIELSEFDLRFEPRHAIKSQALADFVAEWTPAPEPVSAPEASSGPPQLPHTAYWVMQFDGSLSLQGAGAGVTLTSPSGDVLRYLVRLDFRATNNMAEYEGLLVGLRVAAGLGIRRLLVLGDSQLVVNQAYLANKTLPEDREGSERVRRISKRYVLVEGTLYRRAANGVLLKCIPREQGVELLADVHEGECRAHSASRTLVGKAFRQGFYWPTALNDAVDLVRRCRACQFHARQTNQPAQALQTIPLSWPFAVWGLDILGPFRRAPGRFEYLYVAVDKFTKWPEAYPVIKIDKHSALKFIRGITARFGVPNRIITDNGTQFTSELFGDYCEDMGIKLCFASPAHPRSNGQVERANAEILKGLKTKTFNILKKHGDSWIEELPAVLWANRTTPSRATGETPFFLVYGAEAVLPSELTLRSPWVTMYCEADQDQLRRDDLDYLEERRRRAALRATRYQQSLRRYHQRHVRARSLYVDDLVLRRVQTRAGLSKLSPMWEGPYRVIGVPRPGSVRLATGDGTELPNPWNIEHLRRFYP

SEQ ID NO: 166910 - protein, 110 aa, Oryza sativa
  Clone ID: PAT_MRT4530_65572C.1.pep
ELQLCCPFGPQLRCFCHIHHRSRIDNLVVRTGHHQPLRVFFIYFEPRRRISRLNISTPDFNNINHGYSTHGFIDHSFLAPFALATSTMAQRDIIHIEYSCRFLLQSKCPH

SEQ ID NO: 166911 - protein, 722 aa, Oryza sativa
  Clone ID: PAT_MRT4530_65573C.1.pep
MEEGEKQSSGGRWRCRWLVDVGRWRPSPAEFQAAAAVLPPHDRPAIHRFVREEDRKRALVSRLLKYSLVHHALGMPFHQIRINRTLEGKPYLQNKNVNLPGFNFNTSHQGEYVGIASEPLCLVGLDIVCISKPQRETALEFINNFTSYLTDHEWNCIVTADSHDGMLTEFYRYWCLKEAFVKATGAGVGFGLQRTRASPDAMGQCCTGGGKAVAGDEAEPGTSKAAPPSRGTSSKNGSAKQQPCSPAAKAAATEAAAAASSSKKPAGPIGEVLERPMEEVRTTYSIGKELGRGQFGVTHLCTHKATGEKLACKTIAKRKLANKEDVDDVRREVQIMHHLSGQPNIVDLRGAYEDKHNVHLVMELCAGGELFDRIIARGHYTERAAAALLRAIVGIVHTCHSMGVIHRDLKPENFLLLSKGDDAPLKATDFGLSVFFKEGEVFRDIVGSAYYIAPEVLKRKYGPEADIWSIGVMLYIFLAGVPPFWAESENAIFAAILRGQIDLASEPWPKISSGAKDLVRKMLNFNPKERLTAFQVLNHPWIKEDGDAPDVPLDNVVLNRLKQFRAMNQFKKAALRIIAGCLSEEEIKGLKEMFKNIDKDNSGTITLEELKNGLAKQGTKFSDNEIEQLMEAADADGNGIIDYEEFVTATVHMNKMDREEHLYTAFQYFDKDNSGYITKEELEQALKEQGLYDANEIKDVITDADSNNVGLRFMFGLAHCPG

SEQ ID NO: 166912 - protein, 1916 aa, Oryza sativa
  unsure (1)..(1916): unsure at all Xaa locations
  Clone ID: PAT_MRT4530_65574C.1.pep
MAERAVAHSLSPNASGDDGEQNPRRRARTPPSPSRRNLGRGEALGEVEGSATSPPAGDGGGRRDGARRRLVYGDGGTPQGALQAAGALLRHPPVVPDPETPARRWLDDVADLVMMAQQRLGAGGRSSATEASGAAAAGSTSSRRRARRAAAVTCRSSAIPSSTPPTQEDVRGGPDARLDIERRRDARRATHATEGASSSGAPLRSGHGGRPPVSPVGGAGCRAFVASLRNVRWPPRFRPTITEKYDGSVNPAEFLQIYTTGIEAAGGDDRVMANFFPMALKGQARGWLMNLPPASVHSWEDLCQQFTTNFQGIYPRPGEEADLHAVQQRDDESLRSYIQRFCQVRNTIPCIPAHAVIYAFRGGVRHNRMLEKIASKEPQTTAQLFELADRVARKEEAWTWNSSGSGVAAPAAPGSAARSGRRDRRRKKGSARSDDEGHVLAVEGASRAPRKGRPASDKKKEAGAPSRERPTGKWCTVHNTSLHDLADCRAVKSLAERTRKWEEEKRQERREGKTPAAPAGNRRGEAKQKATAEDIDDGDDDLGFQEPEATVATVDGGACAHASRRSLKAMKRELLAAAPTHEATRRARWSEVALTFDQTDHPPCVARGGQIAMVVSPTVCNVKLGQVLIDGGEAXTSFPPPPAAFDAIKAPGMVFRPSQPIIGVTPGHTWPLGHIDLPVTFGGSANFRTERVDFDVADLSLPYNAVLGRPALVKFMAAVHYAYLQMKMPGPGGPIIVHGDLKVALACMEQRADHLAAASKPAGGDERLSTSVPAAPRQRMVTCDEVPEDALVSFLRANADVFAWRPADMPGVPREVIEHRLAVRPGARPVRQKVRRQAPERQAFIREEVARLLEAGFIREVIHPEWLANPVVVPKANGKLRMCIDYTDLNKACPKDPYPLPRIDQIVVSTAGCDLLCFLDAYSGYHQIRVAREDEEKTAFITPIGTYCYTTMPFGLKNAGPTFQRTTRISLGSQIGRNVEAYVDDLVVKTRNQETLLSDLAETFESLRSARIKLNPDKCVFDVPAGKLLGFLVSARGIEANPEKIRAIEQMRPPSKLRDVQCVTGCMAALSRFISRLGEKALPLFKLLKRSGPFTWTEEAERAFTQLKAYLSSPPVLVAPEPDEPLLLYLAATPQVVSAALVVERDEDNPHSARPHPVSTRPGREQGGEAPEPNGGPRPPTAGAGPPPACPTVPGAPDPQDGSGATAGRPRLSPSDPEDRPRRKVQRPVYFISEALRDAKTRYPQAQKMLYAILMASRKLRHYFQAHRVTVVTSYPLGQILHNREGTGRVVRWAIELSEFDLRFEPRHAIKSQALADFVAEWTPAPEPVSAPEASSGPSQLPHTAYWVMQFDGSLSLQGAGVGVTLTSPSGDVLRYLVRLDFRATNNMAEYEGLLAGLRVAAGLGIRRLLMDAYVRQVRRMERHFDGIKLRHVPRRDNAVADELSRLASSRAQTPPDAFEERLAQPSARPDPLGETDAPERPPRPVGVQASGPEGSAPSSPRLIAWITEIQAYLADKTLPEDREGSERVRRISKRYVLVEGTLYRRAANRVLLKCIPREQGVKLLVDVHEGECGAHSASRTLVGKAFRQGFYWPTALNDAVDLVRRCRACQFHARQTHQPAQALQTIPLSWPFAVWGLDILGPFRRAPGGFEYLYVAVDKFTKWPEAYPVIKIDKHSALKFIRGITAWFGVPNRIITDNGTQFTSELFGDYCEDMGIKLCFASPAHPRSNGQVERANAEILKGLKTKTFNILKKHGDSWIEELPAVLWANLTTPSRATGETPFFLVYGAEAVLPSELTLRSPRVTMYCEADQDQLRRDDLDYLEERRRRAALRATRYQQSLRRYHQRHIRARSLCVDDLVLRRVQTRAGLSKLSPMWEGPYRVIGVPRPGSVRLATGDGTELPNPWNIEHLRRFYP

SEQ ID NO: 166913 - protein, 41 aa, Oryza sativa
  Clone ID: PAT_MRT4530_65575C.1.pep
MALGPRSSGTVGAIAEHGDSISNRCSTPPPYQAATVTSLAS

SEQ ID NO: 166914 - protein, 703 aa, Oryza sativa
  Clone ID: PAT_MRT4530_65576C.1.pep
MVEEEEKQSSVGRWRCRWLVDVGRWRPSPAEFQAAAALLPPHDRPAIHRFVREDDRKRALVSRLLQYSLVHHALGIPFHQIRINRTLEGKPYLQNKNANFPGFNFNTSHQGEYVGIASEPLCLVGLDIVCISKPQRETALEFINNFTSYLTDHEWNCIVTAGSHDGIGVLKKHLSKLQVLALDLGCNASIAKGHPEDAIDSFRRTLSDVARANPTDAMGQCCTGGGKAVAGDEAEPGTSKAAPPSRGTSSKNGSAKQQPCSPAAKAAATEAAAAASSSKKPAGPIGEVLERPMEEIMHHLSGQPNIVDLRGAYEDKHNVHLVMELCAGGELFDRIIARGHYTERAAAALLRAIVGIVHTCHSMGVIHRDLKPENFLLLSKGDDAPLKATDFGLSVFFKEGEVFRDIVGSAYYIAPEVLKRKYGPEADIWSIGVMLYIFLAGVPPFWAESENAIFTAILRGQIDLASEPWPKISSGAKDLVRKMLNINPKERLTAFQVLNHPWIKEDGDAPDVPLDNVVLNRLKQFRAMNQFKKAALRIIAGCLSEEEIKGLKEMFKNIDKDNSGTITLEELKNGLAKQGTKFSDNEIEQLMEAADADGNGIIDYEEFVTATVHMNKMDREEHLYTAFQYFDKDNSGYITKEELEQALKEQGLYDANEIKDVITDADSNNVGRRLFRVWSCTLSWLRKGSEKKKQQTQRRRGEI

SEQ ID NO: 166915 - protein, 1859 aa, Oryza sativa
  Clone ID: PAT_MRT4530_65577C.1.pep
MEGEEPHLAPPAEPAKGGLRGLPVRSPTLRHLARQNPRRRARTPPSPSRRNLGRGEALGEVGGSATSPPAGDGGGRRDGARRRLVYGDGGTPQGALQAAGALLRHPPVVPDPETPARRWLDDLADLVMTAQQRLGAGGRSSAIEASSAAAAGSMSSRRRARRAAAVTRRSSAIPSSTPPTQEDVRGGPDARLDIERRRDARRAAHATEGTSSSGAPLRSGHGGRPPVSPVGGAGCRAFVASLRNVRWPPRFRPTITEKYDGSVNPTEFLQIYTTGIEAAGGDDRVMANFFPMALKGQARGWLMNLPPASVHSWEDLCQQFTTNFQGIYPCPGEEADLHAVQRRDDESLRSYIQRFCQVRNTIPCIPAHAVIYAFRGGVRHNRMLEKIASKEPQTTAQLFELADRVARKEEAWTWNSSGSGVAAPAAPGSAARSGRRDRRRKKGSARSDDEGHVLAVEGASRAPRKGRPASDKKKEAGAPSRERPTGKWCTVHNTSLHDLADCRAVKSLAERTRKWEEEKRQERREGKTPAAPAGNRRGEAKQKATAEDIDDGDDDLGFQEPEATVATVDGGACAHASRRSLKAMKRELLAAAPTHEATRRARWSEVALTFDQTDHPPCVARGGQIAMVVSPTVCNVKLERVLIDGGAALNILSPAAFDAIKAPGMVLRPSQPIIGVTPGHTWPLGHIDLPVTFGGSANFRTERVDFDVADLSLPYNAMKMPGPGGPITVHGDLKVALACMEQRADHLAAASKPVGGDERLSTSVPAAPRQRMVTCDEVPEDALVSFLRANADVFAWRPADMPGVPREVIEHRLAVRPGARPVRQKVRRQAPERQAFIREEVARLLEAGFIREVIHPEWLANPVVVPKANGKLRMCIDYTDLNKACPKDPYPLPRIDQIVDSTAGCDLLCFLDAYSGYHQIRMAREDEEKTAFITPIGTYCYTTMPFGLKNASPTSQRTTRISLGSQIGRNVEAYVDDLVVKTRNQETLLSDLAETFESLRSARIKLNPDKCVFGVPAGKLLGKLRDVQCVTGCMAALSRFISRLGEKALPLFKLLKRSGPFTWTEEAKRAFTQLKAYLSSPPVLVAPEPDEPLLFYLAATPQVVSAALVVERDEDNPHSAHPHPVSTRPGREQGGEAPEPNGGPRPPTAGAGPPPACPTVPGAPNPQDGPGATAGRPRLSPSDPEVVGTEAECAPRGLSDEERPGDAAPGEEDRPRRKVQRPVYFVSEALRDAKTRYPQAQKMLYAILMASRKLRHYFQEHRVTVVTSYPLGQILHNREGTGRVVRWAIELSEFDLHFEPRHTIKSQALADFVAEWTLAPEPVSAPEASSGPSQRPHTAYWVMQFDGSLSLQGAGAGVTLTSPSGDVLRYLVRLDFRATNNMAEYEGLLAGLRVAAGLGIRRLLVLGDSQLVVNQVCKEYQCSDPQMDAYVRQVRRMERHFDGIELRHVPRRDNAVADELSRLASSRAQTPPGAFEERLAQPSARPDPLGETDAPERPPRPVGVQASGPEGSAPSSPRLIAWITEIQAYLADKTLPEDREGSERVRRISKRYVLVEGTLYRRAANGVLLKCIPREQGVELIADVHEGERAPDGFEYLYVAIDKFTKWPEAYPVIKIDKHSALKFIRGITARFGVPNRIITDNGTQFTSELFGDYCEDMGIKLYFASPAHPRSNGQVKRANAEILKGLKTKTFNILKKHGDSWIEELPAVLWANRTTPSRATGETPFFLVYGAEAVLPSELTLRSPRVTMYCEADQDQLRRDDLDYLEERRRRAALRAARYQQSLRRYHQRHVRARSLCVDDLVLRRVQTRAGLSKLSPMWEGPYRVIGVPRPGSVRLATGDGTELPNPWNIEHLRRFYP

SEQ ID NO: 166916 - protein, 116 aa, Oryza sativa
  unsure (1)..(116): unsure at all Xaa locations
  Clone ID: PAT_MRT4530_65578C.1.pep
LKVAIRTRWNRSAERASGCTIRGWLLLLLLLDAALLQPLLPVAAVAGEVRIALKKQKVDXPXRVGGHLAGEDAQRLLARRXGYLTKRSVWARLRKARAAAEGDIVAXLNNYLNAQY

SEQ ID NO: 166917 - protein, 155 aa, Oryza sativa
  unsure (1)..(155): unsure at all Xaa locations
  Clone ID: PAT_MRT4530_65579C.1.pep
KGLKXMFKNIDKDNSGTITLEELKNGLAKQGTKFSDNEIEQLMEAADADGNGIIDYEEFVTATVHMNKMDREEHLYTAFQYFDKDNSGYITKEELEQALKEQGLYDANEIKDVITDADSNNDGRIDYSEFVAMMRKGSGCAEATNPKKKRRDLVL

SEQ ID NO: 166918 - protein, 1120 aa, Oryza sativa
  Clone ID: PAT_MRT4530_6557C.1.pep
MGSPRSSLPPLWLLLLCVVAAARRASMARAQQPMPPSFAFSWLDYRSSFVAGDTAVIKITPLDLPPGDEARRSLSFTATVNGRRGNSTYIADVAAHHAGEPAAWNITFVPLRAGDFVVLVGEERFGVAESTLEFAVAAAGVHPSASLASWTYSGACVAGSKASVSVALRDAFGNGVARGADMPGGNGNLKVSVSRSNGAIVEFKDFRYNGWAEDGRISLEFVPVVAGAFLVRVQSDDNTLRGSPLLLTVNPGPVDIAKSTCSWKYGTNVLQIFSKLEIFIHQKDYFGNAVPDIHPFDARIVKRATNLSVPVADLLIEVVDDGTRLLSFKAVDPGEFVLTIFDPKLNQKISNMDYVYNVFVGYCDGSNSFANGSGLAHSVAGSVSHFMVYLQDHYSYPSPIESAWLKVQILSKNGASVNSTISPGELNEETFVGGHFSTFVGGHFSGGPTGHQEKIIAGNMRPNSFNVSYTPKFAGEYEIWVQCGNIVINSGNPYKMTVSTGVVSTDLSTVVTFVRKVKTSVHNEVVVQLVDPFMNPMIHLASKLRIQLTSADSTTPMNAPSFTAGEFVDNKDGSYTTYYVAKNTGLYRICIQFEDAQLKPCPFEVHVVQDEDFSTVQNDIISVRENESVSFDVLSNDYIAGGQAVVNFYPPLHGSVLQYNQKKFRYTPFEGFFGNDTFWYIIFDKHDNIAYGTVFISVLCRPPQFISLPQQLHATEDTIAPQFGGFPGIKIAYSDAAENISVMLQAQSGNVSLAPMPMKFHQTSYDVLSISTGDRYGKDLIFNGTVEAINGALRFVKYIGNEDFYGNDIIKIYAMSRSGREDAQVPIFVEPINDPPVILAPESIFLGGKKSIEGYQIFDKQRDPFESSIVEPDLQSFPGNKSHLQLVLSLEVHEGALMVTLTAGIVATAEVKIEGNNCWQPLQTSSADRIVLRVAGIRFRGSVSDCNNAMQRLFYQGRSNETTLVIIVNDLGYFGCYPDCSMKSGTPLSTIKTIRLLIRKSVKSRDLLLRTALTIELSLGCVLLYYILKCICALKGKGKNHNKKTRKLKKTASHQNTSTSSSDDAGYLSAPATVLSSGGNRSSLRKRSPRSRRQELELQPLTMSRNNGDQDDQLAEHKDK

SEQ ID NO: 166919 - protein, 106 aa, Oryza sativa
  Clone ID: PAT_MRT4530_65580C.1.pep
MGKEELAVIRKKKLAGMGKELADVGKDELAGVGEDEIADDCQMRASKRSEGDELTTRGFGETEWHGMKQFASSVAYSESSANWMANPESNAYSVAYSKNSRYSSKI

SEQ ID NO: 166920 - protein, 228 aa, Oryza sativa
  Clone ID: PAT_MRT4530_65581C.1.pep
MPLPFFSGKLEYVPELKLWFGLSAEPSRRLLAAADLISSDSQPQLIGDWNEFAPPEGWLEYQEPQLVNLGSARFCISRFFHIRSMDNDNEVIDSVVVFTGVEVMPVGHNGDGNGKYQSWGELETGGGLKEHAQLPPPQNAVEHTAKSKLSPPPPPPGAAAATSIRDGAVPPPLPPPPGATAAGSIRGGAAPSQAGSPKAAAAMLKCALDQLLPSSELRSSDPCGVIVL

SEQ ID NO: 166921 - protein, 64 aa, Oryza sativa
  Clone ID: PAT_MRT4530_65582C.1.pep
ALPGKVAQLNTHPGEQTIGLHGHAAGQPLPKCYEGQPQLQQGSRTPNRTHQFPRCVGEQFPRGK

SEQ ID NO: 166922 - protein, 87 aa, Oryza sativa
  Clone ID: PAT_MRT4530_65583C.1.pep
APSTLPHALPHESGASSSDGGLGWAATIPRTDPATALPRADPATAALPRNDNDLNDDNLGGSSRLGFRREHHSTGILNGTDEAYSSE

SEQ ID NO: 166923 - protein, 53 aa, Oryza sativa
  Clone ID: PAT_MRT4530_65584C.1.pep
LIIAINSRNDANSKNTPSTCVPSTRVDRPDSSALTYLINSSACSLAEEILVTF

SEQ ID NO: 166924 - protein, 92 aa, Oryza sativa
  Clone ID: PAT_MRT4530_65585C.1.pep
SFGKFTAKEAQSKGGFFRSVKGAGPANPAGEGNQNKIRWRKFGYKQKLKGGLFVFSNLAFSFSIISGRAGVTTTSSTGLPYGGPGSITLGGF

SEQ ID NO: 166925 - protein, 515 aa, Oryza sativa
  unsure (1)..(515): unsure at all Xaa locations
  Clone ID: PAT_MRT4530_65586C.1.pep
MAAATAAAFAEPKGRRRRRRRRSKAKPRKSGRAHSTRGEETTPPPEAMAAATAAAFAEPKTKYDRQLRIWGDQGQAALEKASICLLTCGPTGTEAMKNLVLGGVGSVTVVDGSKVEQSDMGNNFLLDAECLGQSRAKSVCSFLQELNDAVNAKFVEESPLALIDTNPSFFSQFTVVIATQLPERSLLKLDDICRKANIXLVAARSYGLTGLVRISVWEHNAFESEPDNFLEDLRLKNLCVVLERXYKQAVESTYTGSDTPGIRDEIRQIIDDSSAEVNSSSSDFWVLVAALKEFIANEGNGELPLEGTIPDMTSLTEYYVSLQKIYQAKAESDCLALEHHVKDILKRIDRDPDSISRAYIKTFCKNARKLRVCRYRSMEEEFSSPVLSEVQIYFTDEDYCFAMNFYVLLRAVDRLAANYNRCPGIFESEIDEDVPRLKTAAVSVMSEMGMNGAPLSEDLITEMCRFGGAEIHPVAAFIGGVASQEVIKLVTKQFVPLLGTFIFNGIDHKSQVLAL

SEQ ID NO: 166926 - protein, 339 aa, Oryza sativa
  Clone ID: PAT_MRT4530_65587C.1.pep
MAIALLGLSPHQVPARTGIRQIFTCRSVEEGLNSLRTRVDFCFHPRVSKTVRSICLLNVAFKLITKVLAVRLSRVAGKIIRECQTTFIPGRYILDGVVILHEVIHELSVRKLEGIILKLDFEKAYDKVQWSFLFDVIRKKSFDEIWIQWVGKATLNGRVAININGEVDGYFKTQKGLRQGDPISPLLFNLVADALSEMLTLAKEAGHLEGVVPNLVPGGLTHLQYADDTILFLQNTEENILTVKFLLYCFEAMSGMKINYQKSEVFVIGVDDAEAQRIAEKFNCERGKFPMKYLGIPISSVRLTVADFAASPDKLEKRLATWKCGHLSYGGKAILVNSS

SEQ ID NO: 166927 - protein, 162 aa, Oryza sativa
  unsure (1)..(162): unsure at all Xaa locations
  Clone ID: PAT_MRT4530_65588C.1.pep
PRTSTSSCYPYLNTSSSGEEASRDPKYGGTAEEFLPPKALDGSPQPLPRASGKNSPGGNRQLYDTLYTVTATITNTGKLVGEEVPQLYVSHGGPEDPPVVLRGFERIRLDPGHERHLQGRPXPRRDVSNWDVKVQDWVISEHPKKVFVGSSSRKLHLSADLN

SEQ ID NO: 166928 - protein, 406 aa, Oryza sativa
  Clone ID: PAT_MRT4530_65589C.1.pep
MDVAMALAVLFFCLLLLSSAAITFLLLRHCLSGLRRRHRAAAAADVDAEAAEGGAGARQLMPPCSPPPQQELPLLRPAAKLVPSTKEEGEPWKLTWREVEALTGGFDEAAVVGRGGSSTVYLASSCRVAVVSPPVAVKVHRWCGGERWLRAFRQELDLLRRLRHPHIVSLLAYSDDHEEGGALVLEYLSGGTLADRLHGGASPPLPWRHRMRVVHDVAGALEHLHDGAPPVVHGDVSASNVLLDGRGLGARLCDLGSACEGFSAAVAPTRAAVGSPGYVDPFFLRTGIVSKKSDVYSFGVLLLEAITGSPAAGIPGPDGGAGGGNLTARLLPRVRTEGVDGLADRRLGDDYDAAEAGDVARIAVECLAAQPGLRPTMAQVRAAIAEKAATSISIAHHDLHDASDST

SEQ ID NO: 166929 - protein, 102 aa, Oryza sativa
  Clone ID: PAT_MRT4530_6558C.1.pep
MTTGEIEVSIAALATKKALQEAFDVLTAACSPFTWGDLNSYISSLQDPLYLLPAGIGMGDGGEKQAAAAEGWRLSVNDFQLPERPKDPHFVKRVIKRCHENI

SEQ ID NO: 166930 - protein, 129 aa, Oryza sativa
  Clone ID: PAT_MRT4530_65590C.1.pep
DVCFLILPDRGLECLSAGLRIHSRLCSIPLSEWNRIVQHTLSQVSCSVIRHVSVSLHSLKGSQSYPLPLFSSSSDRNRQSPMRLAVCAWCIPRHTNGQLKLTNGCQWSLQVNVVWEHLDIQFPCLLGYN

SEQ ID NO: 166931 - protein, 471 aa, Oryza sativa
  Clone ID: PAT_MRT4530_65591C.1.pep
YRSGGSSHDPRLTLGRSLMNFLSNILREEGGFEYKKAIVDSIIILIRDIPDAKESGLFHLCEFIEDCEFTYMSTQILHFLGNEGPKTSDPSKYIRYIYNRVILENAPFLHSSAVSTLAKFGALVDSLKPRIFVLLRRCLFDGDDEVRDRATLYLKLLGGEATAPFDISSVSLETKSQPLAEKKTTGKKPTGPASALSGPVPTVDASYEKLLSSIPEFAGFGKLFKSSAPVELTEAETEYSVNVVKHIYDGHVVLQYNCTNTIPEQLLEEVVVFVDASEADEFSEVATKSLRSLPYDSPGQTFVAFEKLEGVLATGKFSNILKFIVKEVDPSTGEADDDGVEDEYQLEDLEITSADYMLKVGVSNFRNAWESMDPESERVDEYGLGARESLAEAVSAVIGILGMQPCEGTDVVPSNSRSHTCLLSGVFIGNVKVLVRLSFGLSGPKEVAMKLAVRSDDPEISDKIHEIVANG

SEQ ID NO: 166932 - protein, 131 aa, Oryza sativa
  Clone ID: PAT_MRT4530_65592C.1.pep
HIDIAVLIRSRKKLMATMPKSNTKVVVLVAAVTFTVFLLLTVPAIASDEQNPVGSSTAALTVHGGTPLQQGGDSKTSSPCKSAIGSCLSRGNCGSVGHYYVCEPCTKTAKCDSILVGRHRKDVTGCRHTCS

SEQ ID NO: 166933 - protein, 130 aa, Oryza sativa
  Clone ID: PAT_MRT4530_65593C.1.pep
MASFFWPGPPGAQPVGDLQVAKLALLVAGNGFISPSSYLRRCCDDDGPCFVDGAGERCLHLANLVTAMLGLALVLGQMAFFSAAAFRPQVASVTVAARWIVSLAKLATVGTLQLWVYVFCLCLKMLCIRY

SEQ ID NO: 166934 - protein, 136 aa, Oryza sativa
  unsure (1)..(136): unsure at all Xaa locations
  Clone ID: PAT_MRT4530_65594C.1.pep
TQSSPEGRSCRPPKPEGRAAATALDPEGSSRRHPDLGRGGEPHRGAPPSIAAAATALPLPQARSREGTEPGCAAIAWSRSRQRHHQHRXPSPPPPSPSLRPDXGGDRAGVRRHCLEPQPPTPSPPPVTVAATALRP

SEQ ID NO: 166935 - protein, 76 aa, Oryza sativa
  Clone ID: PAT_MRT4530_65595C.1.pep
RGIRRGFLGVNSYLFPCGPVTAEVSMGRILFFRECGQISARRSNRTALSPAQVLPECGLEGREFNSPPFRRGRGWN

SEQ ID NO: 166936 - protein, 574 aa, Oryza sativa
  Clone ID: PAT_MRT4530_65596C.1.pep
MEHSLVAEAEAQVFFKAKAKGGFRALPFIISNEILEKVAGFGLNINFITYLNMQYHLSHANAGSLLFVWGAVSNFAPIPGAVIADMYLGRFIVVAIGSIACFVGMVFLWLSAMIPGARPPPCDMSASPELCAPPEARHMAWLLAGFVFLSVGAGGVRPCSMAFGADQFSRHPKERRSRILQVYFNAYYGSIGVAFMVAVTVVVYVQDNLGWKVGLAVPTCLMLLSAASFLLGSGLYIKDRGSKRMFAGIGAAVAAAVRNRRAWLPAKTEDGVYHHLKDCKLTVPTDRLRFLNKACMISNTKEDKSGSGGADGISDRGRLCTVDQVEQLKSAIRVMPIWSSTIFLAQAMNQYFAVPQADAMDRRVGAGGFRVPSGTFAVFNMLTMSLWSGCYDRWTAPALRRLTGNPRGLTMKQRIGGGLVFGTAAMAAAAVVEAARRRQALGGGGMSAFWLVPQYALAGLAEAFGVIGVIEFFYTELPKSMASFSMALLYMALGAGSLVGSLIIKLVHEVSGRRGRTSWLAEDLNAGRYDYYYWLLAGLGAVNFVYFLWCGWAYGEEGQNVEWEDEGEGETTIA

SEQ ID NO: 166937 - protein, 238 aa, Oryza sativa
  Clone ID: PAT_MRT4530_65597C.1.pep
KAAGPSPSPGEATVALRAQITMGRGYDYGPSPPREYRRRARSPSPRGRYGGRDRDLPTSLLVRNRPRDCSPVVLPGPGGKFGRVKDIYLPRDYYTGRPRGFGFIQYYDPEDAADAKYHMDGQILLGREVTVVFAEENRKKPSEMRARERVGSRDRSYDRRSRSPRYSRSRSPVYSPRSRSRSRSYSPAPKRKHYSRSPARRERSLSRSPADSRSRSRSLSDDRRSKSPDRERSLSVSR

SEQ ID NO: 166938 - protein, 140 aa, Oryza sativa
  Clone ID: PAT_MRT4530_65598C.1.pep
ARGVLQLKNKESGAKIKFAFFEKGLNKFFFKEKANSKGAPVSLKFPPPPPLRVFLKNFGIGVFPLKGEFLSQDQPVVDIGVDTPPFKEEFLFFYEHPPGEKVVFSPPPKAKVVLQEHPIAAKKAPQKRVDDDLGDFQAGG

SEQ ID NO: 166939 - protein, 50 aa, Oryza sativa
  Clone ID: PAT_MRT4530_65599C.1.pep
MDSATPTPPNPAQLAFGSVTHAVTSPLLPVARADLPSQLAVLASLPCHRK

SEQ ID NO: 166940 - protein, 304 aa, Oryza sativa
  Clone ID: PAT_MRT4530_6559C.1.pep
MAVAARLRSAGARLVVGPAAMAVGRGGGGEGRWMGTATAEAAAGIARWEPMGAREYYDYRRAIYGDITHKAILVDAAGTLLAPTEPMAQVYRTIGEKYGVNYSEDEILMRYRRAYAQPWGRSRLRYVDDGRPFWQHIVSSSTGCSDLQYFEELYQYYTTAKAWQLCDPDAKYVFEALRKAGVKTAVVSNFDTRLRPLLQALNCDHWFDAVAVSAEVAAEKPNPTIFLKACEFLGVKPEEAVHIGDDRRNDLWGARDAGCDAWLWGSDVYSFKENQAHIIKSGLLCRSQKGSELRCKESFVRWVT

SEQ ID NO: 166941 - protein, 55 aa, Oryza sativa
  Clone ID: PAT_MRT4530_655C.1.pep
MGLFGCHICGSAAAATCVVRLQQLQLAAVRLWLHTRFQTCEEKDWGGSSTGATGY

SEQ ID NO: 166942 - protein, 928 aa, Oryza sativa
  unsure (1)..(928): unsure at all Xaa locations
  Clone ID: PAT_MRT4530_65600C.1.pep
MSTAARRGHPPPHENGVGGHADHEPDEEGQEVEQESEGEWEDYEEDXAAVXYQRLGGRGPAIVFTDPSAATAIAVDMGALVTNNGILHFLDFQGNQVKEIAAHTATINDISFDADGEYIGSCSDDGTVVISSLFTDEKLKFEYHRPMKAIALDPNYYNNYRRFATGGLAGQVLVLTKKSWGGGYHKKVLRDGEGPIHSMKWRTDLLAWANDAGVKVHDMKTDKGIAFIERPXGIPRPEFLLPQLVWQSDIRNXMVLNLKEKDDTILVIGWGTSVKIAAIRTDSSQGLNGIQRSITASNEKYVDIVGSFQTGYHISGIAPFGDLLVVLAYIPEEEDRENSFSNSVPSRQGTAQRPEIHLVSWKNDELTTDALPIHGYEHYKAKDYALAHAPFSGSSNAGGQWAAGDEPLYYIVSPKDIVVAKPRDAEDHISXVICDGXNTMMSYGVEAGQGRTELLDEVGSRYLDHLIIERKYAEAARLCPKLLRGSPSAWERWVFQTAHLRQLAVLVPYIPTENPQLSDTAYEVALVALTTNPSFHELLLTTVKKWPPTLYSASPVISAIEPQLNSSSMTDSLKEALAELYVINSQYDKALSLYAELLKPEVFEFIEKHNLHDAIHDKVVNLMILDSKRTVNLLIQHRDTIPPNEVVGQLLHASKSCDKRHLLHLYLHALFETDMNAGKDYHDMQVELYAEYEPRMLIPFLRTSQHYRLDKAYEIFAQKELVREQVFVLGRMGNAKEALSTIINKLEDIQEAVEFVMEQHDDELWEELIRQCLQKPEMVGMLLEHTVGNLDPLYIVSLVPDGLEIPRLRDRLVKIVTDYRTETSLRHGCNDILKVNIQEKDILKADCVNLLVKYYHEARRGVYMASMDEEDISVIVFYCCHAYHTSCLEGGLDLMKSNSSTQDSDEDDEGTPSGESRMRCVLCTTAAA

SEQ ID NO: 166943 - protein, 1369 aa, Oryza sativa
  Clone ID: PAT_MRT4530_65601C.1.pep
MAAGGGGGGAARDPGDLRHLAATKRTHRPLAEFRRLRPGRGTHAACSTKCAGKTGADHMSHEIEEKVRARRRRRSTPPPRPRPCREARELNSTQEMGGRPVSPSAPRPKELDLQTEHSLEGSPPPFPWQNRRMAGVGLVVGGWIAKAVIANILSRVRSLLHDNFSLQKDTEKMLNDLEVALPRIEAVIEAAERRSIESSALSTWLQQLKDAVSHAGDVVDDFEAKTIKDQVESKSKVSAKAYSTVKALKALVFSDSELKKLKHAVRRLENVSARVDSFIELIRLNDDDTVGRIGHSLHSETSSLLGDTKVIGRDEEINLILDIILGYRYHLPRTSEHARPDDQPKFGQRGTLFDKLRKIFLTGTAESSKSSDKAKLEELEARKKGNKIEEEDPSKDCIEIGEYEPNQKGQTERLDYNSSDVHETSGSSQNLGILPIVGINGVGKTTVAQAVFNNKRVKMCFDLTAWVYVSDNISGKQIIQRIIMSLEPWSGLTDDALDLDNLQHKLIGIIRSKRLFLVLDGVSDDIIIVWSQLRSILRCSGPQSMVLVTTQKYSIANLLGTMGPITLNTLEQTDFRYLFNHLVFDDCFYHHYEVHLFESICGKIADKFHGLPLAAKTVAPLLRANRNMEYWENVLGSDWWNISDHGLGINVLPALGIGCLYPALRQCLLFCSIFPRNYVFEKERVVQMWVAHGFIQSSDRRDIVPENVAKNWFDELVDRSFLQPTVWQGRYVMHDLIREFSVAVSSNEYYVFHRNSKVLPQFANHISVDNDNFDLQWGHYDHKRLQTLMFFGHHRVDKNYGTLGSIVRKSTSLRVLDLSYICMSNVSQASDVLCKLSHLRYLDLSFTGIKDLPEAFGNLYHLQVLDLRGCIIEKLPKNMNNLINLRHLYADSQTTALIYAVGQLTKLQELQEFRVRLEDGYKINELRDMKDLRKLYITNLEKVSSWQEATDAKLVEKKSLDYLQLKWVYQVPESRSTSQLNKDILDGLHPHFQLKRLKILNYMGIDFPYWVQRLTDLVAVNIINCRWLSVLPPLGELPRLKKLSLFGLSSITHINDQVYGTNDVIFPYLEELHFSELFSWEQWSEAEYKLLIPHLRKLGINACSKLSLLPIETLSSSVKELHLSSCTSYISMLPAYLKRLTSLTKLSIQDCSATLLIPCHSLTLLEHLQLESCFDVHFEGGMQYFTKLKKLEVHRCFDVTQNIYEQTSLVERYSLMGGLQSLIHLVIDDRFMYYRYYHMLNTLCSIRTMKFCAFDLSEFTTEDEEWLQQLQSLQEIQFASCRNLLRLPSNLNNMCNLKKVVLNDCCKLQSLPLNGLPDNLKEFHVSGGSEVLEQQCQKTDGDEWQKISHVPYVRINGRTIQMISHDLGS

SEQ ID NO: 166944 - protein, 208 aa, Oryza sativa
  Clone ID: PAT_MRT4530_65602C.1.pep
MVTPSWPSRPSCEPRCVAAAATPPRPSRRLSRPAATAIGEDEEAVEKCARLLGLISPESLKMGDFCGGDWNIGLVGAAAPPRATREKRPEKGKSRQRRRVATTQSAAAALPSVRRAGGETPVLMSGTRHDAMAMVRLTKVRMLFVRCGGSVRHSSEESVLDDDIWAAARKKGKRKEERERKNSVKGGRAKVRSRLRRECHQTSNSSSG

SEQ ID NO: 166945 - protein, 57 aa, Oryza sativa
  Clone ID: PAT_MRT4530_65603C.1.pep
PHHPRVKGSVPVRLRSPALSAGYSPPNVRYPSCKLICSIKKEGKAPPGPAKIKDGLF

SEQ ID NO: 166946 - protein, 59 aa, Oryza sativa
  Clone ID: PAT_MRT4530_65604C.1.pep
VRRAIKFLRSTFFTRLLSALHLLPLHQHVARNLNGSNGGGGENDNDNGNEGNNTNHASS

SEQ ID NO: 166947 - protein, 62 aa, Oryza sativa
  Clone ID: PAT_MRT4530_65605C.1.pep
IHINSISNSKREATCGSKWGKKSYDKRNISQHIKNGTAIETVAAAYFRIQIDPITQVSDLEV

SEQ ID NO: 166948 - protein, 383 aa, Oryza sativa
  Clone ID: PAT_MRT4530_65606C.1.pep
MSSHGDGGGGGGGKRRLYLVLDDSKHGYGFRRIDMDEYYFEADDSGDDSALERMTEYLPSRRCLRVKAPRHQAMLFKALGTKIIATHPSPTRAAIPAYDARAQAVSAGPAWPPGEGDSTLPSCSTVFVPVGDRLYALDGGGDSGRAVSFQVLFPSGGDGWWSWSSVASAAAPPFDPSRITSYAAHPNGRAFFVSVARKDVPFFPTLSRGWPWLHAGSTFCFDTESLEWTDYGCWMLPFQGQGHYDAELDAWVGICRHPDKPGRLCSSDVPAPRIRGRDSRWRVPSCKIGKDVLFCKDKERHRGVALHYMGSDSNFCLLECVEQPAATASRLMYVRMFRLKYGKDGGLRTATLGRWGRCFLLPPEASSFDVMDQKITAFLMCIT

SEQ ID NO: 166949 - protein, 429 aa, Oryza sativa
  Clone ID: PAT_MRT4530_65607C.1.pep
MASAAAPEIQELIHHPYDGRVTSFVVLSCVTACLGGILFGYDIGVSGGVTSMDAFLERFFPEVYRRMHGGGERVSNYCRFDSQLLTAFTSSLYVSGLATTFLASHVTARRGRRASMLVAGAAIAAGATVGASAAGLATVILGRVLLGVGVGFGNQAVPLYLSEMAPPSRRGAFSNGCKVTTRRGLTLMLTHRRYRPQLVMAVMIPFFQQMTGINAIAFYAPVLLRTVGMGESVALLAVVIKQVVGIGATLASMLAVDRFGRRTLFLAGGAQMVISQLLIGAIMAAQLGDDGELSQASALLLIVLVAVYVAGFAWSWGPLGWLVPSEIFPLEVRSAGQSIAVAVNFLLTTAVAQSFLAMLCHMKAGIFFFFAAWLVAMTAFVYLLLPETKGLPIEQVGKLWARHWFWRRFVVPDSGDGEEEGGAIDADKL

SEQ ID NO: 166950 - protein, 605 aa, Oryza sativa
  Clone ID: PAT_MRT4530_65608C.1.pep
MANPTKPSSRTTQPTAPPLRPRRLAPPGEWNGPVLLLLLLPTTQGERNSTLVGFGLSAATGFSRSSDLMATCIVASIMSIGRLATALCSAILGALHKLSALPHIEEEHVGVLPSMVEAELPHLPEDLLVQILSRLEIPDLLRASSVCSSWHSAYTTLHSLGQYKRHQTPCLFYTSESAGKNVGCIYSLAEQRTYKITLPDPPIRDRYLIGSSDGWLVTIDDKCEMHLLNPVTREQMALPPVITMEQVNPTYDESGAIVKYENRSQFWHDGVMFSSRSMGSIISPRWQQLFLTGRAFVFSETSTGKLLVVLIRNPFGQLSFARVGDDEWDYLPEYGRYEDCTYKDGLLYAVTTLGEIHAIDLSGPIAMVKVVMGKVMDIGDGDRNTYILHAPWGDVLQIWKTEEDDYIHPSEDDYDAILKNTASIEVYKSDLVEEKLVKINRLQDHVLFVGHNQTLCLRAEEFPSLKANHAYFTDDSQNWITEFKNNRRDIGVFNLEDNSRDELGSPQLWSNWPSPSNANLRTREWQHGGNPPSCGVADQGSVSGSHQKKGLGVYVMRLRTKKGFSSSHGPLSPNTTCSITTRCFLSLLLPHRVTSSSSQLASAFF

SEQ ID NO: 166951 - protein, 137 aa, Oryza sativa
  Clone ID: PAT_MRT4530_65609C.1.pep
KASFQAFLLVLVAGGGDRSFTKEDHGMVEEDFRSLKRAFCTRGEGVVTEQVVDGEAEAAESVVALMGQTAEQLVEELSIACELNGTASSAGQRMPLPETTWRWSRTDPDTILRVLCHRDDEVASHYLKRAFQLPKRR

SEQ ID NO: 166952 - protein, 59 aa, Oryza sativa
  Clone ID: PAT_MRT4530_6560C.1.pep
KKNHWTGFGGSGFKNLGDKGGFLFELPVLDGGVFKEHQDSRPYVEPFLKAITFLENLVV

SEQ ID NO: 166953 - protein, 524 aa, Oryza sativa
  Clone ID: PAT_MRT4530_65610C.1.pep
MAPSAAAPEIQELIHHPYDGRVTSFVVLSCVTACLGGILFGYDIGVSGGVTSMDAFLERFFPEVYRRMHGGGERVSNYCRFDSQLLTAFTSSLYVSGLATTFLASHVTARRGRRASMLVAGAAIAAGATVGASAAGLATVILGRVLLGVGVGFGNQAVPLYLSEMAPPSRRGAFSNGFQLCVSVGAFVAQLINFGAEKIAGGWGWRVSLAVAAVPAAFLAVGAVFLPETPNSLVQQGEDHGKVRALLSKIRGSDGAGVDDELDDIVAADRCKVTARRGLTLMLTHRRYRPQLVMAVMIPFFQQMTGINAIAFYAPVLLRTVGMGESAALLAVVIKQVVGIGATLASMLAVDRFGRRTLFLAGGAQMVISQLLIGAIMAAQLGDDGELSQASALLLIVLVAVYVAGFAWSWGPLGWLVPSEIFPLEVRSAGQSIAVAVNFLLTTAVAQSFLAMLCHMKAGIFFFFAAWLVAMTAFVYLLLPETKGLPIEQVGKLWARHWFWRRFVVTDSGVDGEEEGEAIDADKL

SEQ ID NO: 166954 - protein, 105 aa, Oryza sativa
  Clone ID: PAT_MRT4530_65611C.1.pep
FAQSEGAALFRKACIGCHDMGGNILQPGATLYMKDLERNGVATEDELYNITYYGKGRMPGFGEKCTPRGQCTFGPRLVEDDIKLLAAFVKSQAENGWPKIDGDGD

SEQ ID NO: 166955 - protein, 57 aa, Oryza sativa
  Clone ID: PAT_MRT4530_65612C.1.pep
NEDTPSFYNIMSYIFVWRIDNTICELLSIPATSKSAVISISDEAPEVIRRLQNKRET

SEQ ID NO: 166956 - protein, 128 aa, Oryza sativa
  unsure (1)..(128): unsure at all Xaa locations
  Clone ID: PAT_MRT4530_65613C.1.pep
HXXAPXXXDVGXXXXNXXXGXPRXTGPNXVXXPXRRNPPXIXAXRXIXFXPTXXXLXPXPGXGNLXXGEXXLXXPPXFXQAGKAPPVFXXXGXVPPSXPSFLRTHQQRRRXRLVPNSARASNPDPAPK

SEQ ID NO: 166957 - protein, 50 aa, Oryza sativa
  Clone ID: PAT_MRT4530_65614C.1.pep
LARPANKLLPAQVAASETSPVRARQARSSPLVYLVDELLLPRAADWQATP

SEQ ID NO: 166958 - protein, 118 aa, Oryza sativa
  unsure (1)..(118): unsure at all Xaa locations
  Clone ID: PAT_MRT4530_65615C.1.pep
CRYLLHYVLTYGSHDNVMVVTGLSLAFLLVMLVGIGRIYLGMHSLIDVIAGICFGVVILAFWLAVHNHVDAFVVSGQNVTTFWASLSXLLCFAYPKPEFPTPSFEYXTDFNGVAFGNL

SEQ ID NO: 166959 - protein, 110 aa, Oryza sativa
  Clone ID: PAT_MRT4530_65616C.1.pep
SPYSFVWTAAGKQADLEKQVGVGGYGYPAMVALNVKKGAYAPLRSAFQLDEITEFVKEAGRGGKGNLPLDGTPTIVQSEPWDGKDGEVIEEDEFSLEELMADNSPVNDEL

SEQ ID NO: 166960 - protein, 44 aa, Oryza sativa
  Clone ID: PAT_MRT4530_65617C.1.pep
GLAIADNKSSSYFRGKIQTQFSCKGGFSGKERAWALMGPGGGLK

SEQ ID NO: 166961 - protein, 447 aa, Oryza sativa
  Clone ID: PAT_MRT4530_65618C.1.pep
MRPAVAAALLLVAAAVAASPVSALYSAGSPVLQFNPNNFKSKVLNSNGVVLVEFFAPWCGHCQQLTPIWEKAAGVLKGVATVAALDADAHKELAQEYGIRGFPTIKVFVPGKPPVDYQGARDVKPIVEFALSQVKALLRDRLNGKTSAGSGGKKSGGSSEKTEPSASIELNSQNFDKLVTKSKDLWIVEFFAPWCGHCKKLAPEWKKAAKNLKGQVKLGHVDCDAEKNTNSSVWSVDKSYRSLMSKYKVEGFPTILVFGADKESPFPYQGARVASAIESFALEQLEANAAPPEVSELTGPDAMEEKCASAAICFVSFLPDILDSKAEGRNNFVWTAAGKQADLEKQVGVGGYGYPAMVALNVKKGAYAPLRSAFQLDEITCLITKPVSCSEFVKEAGRGGKGNLPLDGTPTIVQSEPWDGKDGEVIEEDEFSLEELMADNSPVNDEL

SEQ ID NO: 166962 - protein, 39 aa, Oryza sativa
  unsure (1)..(39): unsure at all Xaa locations
  Clone ID: PAT_MRT4530_65619C.1.pep
APARRPPPAGXVPARXEELGPPLDCPAAXAVQIDKIVRP

SEQ ID NO: 166963 - protein, 1001 aa, Oryza sativa
  Clone ID: PAT_MRT4530_6561C.1.pep
MPPKAKKKQSAASPQPSPRTPASRGREGGSVAAGGGDGGGTLDLPSVAAAAAARHPALVPRGGEGCFSGTVAEVAPRGRSRGGEARLWLSEPAMVGAALRPGCLVSVSLISSNRGRSDGSPLDSLFEECNEFFDLDVDNDLMPNEAGRNFVIAKVFPSREVQKNGIKLSWDLACSLGNPSVGCSLFFSPLYTSQAPKETDSVDILRVIKCSNLYLSFVPAKVGSSSEIESESVHHPIRNGMVIESPKRNSSVLSGRNESYDIASHSGPSLCLDPATARSSLADEKINELLQTCASRWLSGRHLLKANYVPLLMCGKLSMFIVMGAEVDGSAPDVVHDKDKLPSNEEISGKFGEAPVSFLVDRTTKVHLSGPVCSEEIAFVKPGPSAHNSFRTDARNGDFNHGPRLGGLSKESKEIKEIISFSIKDQIGLQRVKDNLWYRGILLSGPPGTGKTSLATSCAYDEGVNLFTINGPEIISQYYGESEQALYDVFSSAKQAAPAVIFIDELDAIAPERKDGSEELSIRIVVTLLKLIDAMSPRDRVLVIAATNRPDSIDPALKRPERLDRKIEIGVPSPVQRLDILQHLLVGVQHSLSCEQLESLASATHGFVGADLAALCNEAALSALRRYISLKKSSQQLGYYDNNAEKPDIREINDPLGYQVNSIASSLSKLTMSVDDVLCTSRSNDTENNGSSGKKDDLLLLVTTEDFEKAKIKVRPSAMREVSLELPKIRWEDVGGQVRIKEQLIEAIELPQKNPKAFENMGVSPPRGLLMIGPPGCSKTLMARAVASEAKLNFLAVKGPELFSKWVGDSEKAVRSLFAKARDNAPAILFFDEIDGLAVTRGRENDSVSVGDRVLSQLLVEMDGLEQRIGVTVIAATNRPDKIDCALLRPGRFDRLLDVQPPDEADRVDIFRIHTRNMPCSHDVNLNELARLTEGYTGADIKLVCREAAIAALDENIDIPEVEIRHFKSAISRIKPSDVKFYQELAAQYSRFVDPMSQSKQ

SEQ ID NO: 166964 - protein, 495 aa, Oryza sativa
  Clone ID: PAT_MRT4530_65620C.1.pep
MASAVAPDIWHWTRSLPNPKHWRGKSYYLQICNSPSTNQSLNLIISWHSETQSFNLSYSICAEHHDPVSLWSSHYSRLKSVNGSDFAIHFFHDIICGVLRYGPYSNKMSPFRLPNVQVSEDTGKIFNLAALTLALMVCIYEAPSTLRRDLIGTVSAQLIRGDMWGAAKKLMLAMGSDMEEQWMRSLNLAVTNWIIETRRSGGTPVSPFTVFSYAVSAIRLWKVELYCPVVAMIMEHPAHQTKDEKLQFSLNYQHLEAVIQFIYRVTFRENWIDVTVNVDNIRCDLIQLVSETLMAKQGYGSDEKHFPSRISLQLTPLVQTDILSLTVSRSTDNPAQEVDTEMGLDATLSAAPATIGITMSAHETVTRTLRPWKFEHSVHGNTAALNWFLHGGAEGREVFSSEPHKRELLQPRSWFRNRYTNPGRPFTRGGGVIFAGDEYGESVCWRMPAAAAGKTVEWEMKGRIWVTYWPNKKRTLHVETRRVEFRELLRLTIRE

SEQ ID NO: 166965 - protein, 71 aa, Oryza sativa
  unsure (1)..(71): unsure at all Xaa locations
  Clone ID: PAT_MRT4530_65621C.1.pep
EVPPNSSPPFPPGGPQFGAPPPXEALFQRGGAPPGLEKLPFFFSFPPVPGPKPPLGEHEGKLWGNPGKPPP

SEQ ID NO: 166966 - protein, 819 aa, Oryza sativa
  Clone ID: PAT_MRT4530_65622C.1.pep
MAAPATPRLLLSPTSKDLIAAASSSFPSPPSPTTSSDPASPLDAFASDPVLSAFLSPSFSPSDFSSAALSSGLAASRAEQLQEAIRLLRRHLRAEVLRRHPLLLSHLLSLRSASASLSSLPSHLHLLSSHLSLLSSHLSAPRAHLAHSSSSLSTLLSTADLLLHSHRLVRLSSRLLTSTPPPDLARQAELHREIRLLYEEKNLAGINAVDEEMRKVDAAASKLRSEASAVIDRGIAESNQNDVWCGLQVYYNLGELKPAVEGLVAKYKAAGAKSVAVALDMKAISMAAGGGGGPGGVQRSGTPQIGGSKKAAEALWDRMRQCMEELHRSVTAAWQLQTVLTKKRVPFTQMLFLEEVWQEGDPLLTERVWDAIVKAFASQLKSAFTASSFVKEIFTLGYPRLFSMIENLLERILRDTDVKGTLPALTPVGKNHMTAAIEIFQTAFLALCHSRLSDYINSIFPMSGRGIPSKDQISRLISRIQEEVEVVRTHGHLLARVLQEIGKVLLLLAQRAEYQISTGTEARQVTGTVTPAQLKNFALCLHLQDVHTRISSIVSTLPNVTSEKLSKSLEAIYTVACDSVSPLFKEMFDRLGSCILKMHEQDFGTHGMDATMDNNASAYMEELQKCAVHFRSEFLSKLLPSSSSRSETICTIMVRSMASRVLILFIRHASLVRPLSEAGKLRMTRDMAELELAVGQNLFPVEQLGAPYRALRAFRPVLFLETSQLEKSPLLQDLPPSVILHHLYSRGPDELQSPLQRNKLTPLQYSLWLDSQGEDQIWKGVKATLDDYEMKVRSRGDKEFSPVYPLMLQIGSALSQAKG

SEQ ID NO: 166967 - protein, 179 aa, Oryza sativa
  Clone ID: PAT_MRT4530_65623C.1.pep
PRILSSSSRTREARASPTRASLLASPPSSRSSNGDVTRWLPCAALLTTTCISISRCIRSVCCCCRGVPCEFAAASESEPVVWLVAEALASAEAALVWPVAHGFQAARALARCFFFFFALTRKAQTRSVKRRGNPHRPNGDAAHCFPRVAIKSRTRTCARSCASLLLLYSLFTRAGWLAV

SEQ ID NO: 166968 - protein, 193 aa, Oryza sativa
  Clone ID: PAT_MRT4530_65624C.1.pep
MASSASRFIKCVTVGDGAVGKTCMLICYTSNKFPTDYVPTVFDNFSANVVVDGTTVNLGLWDTAGQEDYNRLRPLSYRGADVFVLAFSLWLPELQHYAPGVPIVLVGTKLDLREDKHYLLDHPSLVPVTTAQGEELRKHIGATCYIECSSKTQQNVKAVFDAAIKLQGCHVQKKASMLQVNKRGSLMSRAEEG

SEQ ID NO: 166969 - protein, 72 aa, Oryza sativa
  Clone ID: PAT_MRT4530_65625C.1.pep
FLPGVKYTRGGDSRGLDEEFQRAQDYFQSVGGGYFCDVSCGQVALFTRKLWKIGIVLSGDGWDFSENMLAVL

SEQ ID NO: 166970 - protein, 215 aa, Oryza sativa
  Clone ID: PAT_MRT4530_65626C.1.pep
MASSASRFIKCVTVGDGAVGKTCMLICYTSNKFPTDYVPTVFDNFSANVVVDGTTVNLGLWDTAGQEDYNRLRPLSYRGADVFVLAFSLVSRASYENVMKKWLPELQHYAPGVPIVLVGTKLDLREDKHYLLDHPSLVPVTTAQGEELRKHIGATCYIECSSKTQQNVKAVFDAAIKVVIKPPTKQRDRKKKKTRRGCSFFCKGVMSRRRLVCFK

SEQ ID NO: 166971 - protein, 253 aa, Oryza sativa
  Clone ID: PAT_MRT4530_65627C.1.pep
MKDRNASAGPEVKPAGLSPSRFVKVFMHGEPFERKINLAIHNNYDSLSFTLKRLGNNYSMSPFELEGFVNNEEDGAIDNDFDLLYDDMNGVRYLLGEVPWEVFTITVKRIYIVPAEQQNESEYQEEEEDNAAAAATADEDPPAAGAEGWRWQAPAGAEAGGGGAEGRSAAAGSGVVEGRPAAVAEGRPGGGRQRLGPPGMEFFAFFSFFLLNVMWMTVICAILNGAAADDGAAAAVDNGDDHGYTSNDDPSFD

SEQ ID NO: 166972 - protein, 1889 aa, Oryza sativa
  Clone ID: PAT_MRT4530_65628C.1.pep
MAPKSKRGKAKGEKKKKDEKVLPVAIDITVNLPDQSHVILKGISTDRIIDVRRLLCVNTATCAITNYSLSHELRDGRLKDGADIATLKPFTLTLVEEEYDEESAVAHVRRLLDIVACTASFGPPPPPPPPPSPKDAAADPAKEPSGSKAGSAAATGGRRTGSPPPSPAPVAKDAATKDDAAAAAAAAAAKESSASAELEAEMSGACPRLGAFYEFFSLANLTPPLHFIRRVAQPRQEEQPSDDHLFFLEAYEDLMKAFLERNKFGNFPYGFRANTWLVPPIAAQSPSTFPPLPSEDETWGGNGGGWGRDGKSDMLPWADEFLYLTSMPCKTAEEREIRDRRAFLLHSLFVDVAIFRAIAAVRHVMEIKDVSASANIDEVLHSETVGNFSITVTRDSSDASCKLDTKIDGSRATGMDFKHLAERNLLKGITADENTAAHDVESLGIVNLRYCGYVAVAKVNNIEKAKVNTSIKPIDITDQPEGGAHALNINSLRMLLNDANSTGEKKTLNLPQNNKQEELIAAHSFVENLLKESLQKLEEEESEKQSFMRWELGACWVQHLQDQKNSDKDKKQGGEKEKKKVVDKSAKETKIEGLGKPLKALKHSKNNVDVADKGSSLGEKSMCDGTSSAESQKFKPSAVQLPQGESNASENESLLKDLLSDSAFTRLKDSETGLHQKSPPELIEMALKYYDEVALPKLVADFGSLELSPVDGRTLTDFMHTRGLQMRSLGQVVKLSEKLSHVQSLCVHEMIVRAFKHIVRSAIAATSDMRQLALAIAAALNLLLGVPEPEVFTSSDGVRPLVWKWLVAFLKKRYEFELTEQHYHDVRKYALLRGLCHKVGIELAPRDFVMDSAFPFQKQDIISLVPVHKQVACSSADGRQLLESSKTALDKGKLEDAVNYGTKALAKLITVCGPYHRMTAGAYSLLAVVLYHTGDFNQATIYQQKALDINERELGLDHPDTMKSYGDLAVFYYRLQHTELALKYVKRALYLLHLTCGPSHPNTAATYINVAMMEEGLGNVHVALRYLHKALKCNQRLLGPDHIQTAASYHAIAIALSLMEAYSLSVQHEQTTLQILRAKLGPDDLRTQDAAAWLEYFESKVIEQQEAARNGTRKPDASIASKGHLSVSDLLDYINPNEESKGRDSESSKRRYSSIKVLSNSNGGSNVASPEVSPRDSTSANADEDKQIIEPSQDDTVNFVAEAEIKQNLKSVEYSASSEQPVERAEVINVPREVVQEELVEPEDGWQPVQRPKSAAGSGKQMKHFNPTTRKMYDPDNHDPQYTSQYKARNSYPNSRYYFLKKRTVVPATYTDPHQHMKVQTSSARFGRKIYKAVTYRIKPGSTSTEAQDASAEQMSGKAESQMAYSQVHSTTSVDHKESEPHGTLVTSSGNAPSYKDVALARPGTIAKAQIQKSRDDVVQNQPSLGQIIAQEMKDSLVDTHQVEQGSVSANINNPKEVGNIPEEIQHSEDIKVSDRELDTGDIDTDGSPNDEKSLNGSNLANDHTSQEPVSCSNENAAVEFAESSNSAKDEQSRKSDMEIFEEALPTSIGPIAVSASTANTEGLAGAGNEKSKPNLLLNSIDLREMPNKKLSAAAPPFNPSPPAILSPLAVSVGLPPPGAIPGVAPWPVNVPMHPGHSTMVPSGPPLCTSPHHLYPPAPRSPNLLHPVPFIYPPYSQPQVIPSSTFPMNTNIFRPNHYGWQPYMNAPSSEFVPGSAWPSNHPVDFTPTPHVVNPISQSLADTHIQSDAAVVSIGPSLDSNTMAVKEEMEATLVGSGNLISNKRPADDQDKQLKDPVRIELNPDLPGDNAHGICATDHLRSTVKNEDEGSFRIYVKGKSRRKQTLRIPISLLNKTYGSRSFKLVYNRVVRENDIFRPSTVSFAEVVSSGN

SEQ ID NO: 166973 - protein, 89 aa, Oryza sativa
  Clone ID: PAT_MRT4530_65629C.1.pep
MRSSTTFAKPAVAILSALLLLFFLLCNSSTSSPHEQPSVLRSRRLLSQCDGTGSCSTRVDGLGRFEKTPKAVFESLKRVPSSKSNPSHN

SEQ ID NO: 166974 - protein, 973 aa, Oryza sativa
  Clone ID: PAT_MRT4530_6562C.1.pep
MGMVRKIGRAGREADASSSPELLPGPAQPASLTSEDAFVARTGTALKHLNIGVEDAVDAAPAVGSADGSDIRRAVNRRTLRPRRGLWVRSGVAAGSISSPDLSPDVRVPGEIDNDREAFAHHGAHRPGLPRVVGSESGCEACGRGGVDPRKRTFSSLRRGVLLRRGGGGMSFGGLFDGGGGGGMQFPFASGFASSPALSLALDNAGGGIGGRMLGGGAGAGSSAGGAMTRDTEAENDSRSGSDHLDAISAAGEDDVEDAEPSNSRKRKKRYHRHTPQQIQELEALFKECPHPDEKQRAELSRRLSLDARQVKFWFQNRRTQMKTQLERHENALLKQENDKLRAENMTIREAMRSPMCGSCGSPAMLGEVSLEEQHLRIENARLKDELNRVCALATKFLGKPISLLSPPPLLQPHLSLPMPNSSLELAIGGIGGLGSLGTLPGCMNEFAGGVSSPMGTVITPARATGAAIPSLVGNIDRSVFLELAISAMDELVKMAQMDDPLWVPALPGSPSKEVLNFDPCVRSFLPCIGMKPAGYVSEASRESGLVIIDNSLALVETLMDERRWSDMFSCMIAKATVLEEVSTGIAGSRNGALLLMKAELQVLSPLVPIREVTFLRFCKQLAEGAWAVVDVSIDGLVRDHNSGTAPTGGNVKCRRVPSGCVMQDTPNGYCKVTWVEHTEYDEASVHQLYRPLLRSGLAFGARRWLATLQRQCECLAILMSSATVTANDSTAISQEGKRSMLKLARRMTENFCAGVSASSAREWSKLDGATGSIGEDVRVMARKSVSEPGEPPGVVLSAATSVWVPVAPEKLFNFLRDEQLRAEWDILSNGGPMQEMTQIAKGQRDGNSVSLLRASAVSANQSSMLILQETCTDASGSIVVYAPVDIPAMQLVMNGGDSTYVALLPSGFAILPDGPRIGATGYETGGSLLTVAFQILVNNQPTAKLTVESVETVNNLISCTIKKIKTALQCDA

SEQ ID NO: 166975 - protein, 102 aa, Oryza sativa
  Clone ID: PAT_MRT4530_65630C.1.pep
MEGVVPCMFNPPPPFFQDFFFFIDKIFPIMFRVGWVQLGGSIQGVWAPFLCGGNKPPLPGPPGGVWGRLIKILPLGKKKKKKKKKKKKKKKKKKTKKKKKPT

SEQ ID NO: 166976 - protein, 94 aa, Oryza sativa
  Clone ID: PAT_MRT4530_65631C.1.pep
MALDGDGIGGLEQHVGAIGRGGEANRINNPTPTASSSSSCSREMEHDADPAPAPAPAITSLQPADDDWAARDDLEEAPAKPHPHSAARDDDDAR

SEQ ID NO: 166977 - protein, 187 aa, Oryza sativa
  unsure (1)..(187): unsure at all Xaa locations
  Clone ID: PAT_MRT4530_65632C.1.pep
GPVRPAVCGRSDRQVRVRPCFVGPPCCRRPLLTGAGGRRREGGRYGEELGGERGEREGEREQGAVAATSSMAGSKQICYSVGDEDLHGRQQXGCAEHVVVHSRLRRLGSAWXQGYHADTQVPRSDTQVPARYPGYQVPRSDTXGTSSIPRVPGTSRYQGTSRYQCTRYLLSTLPKGRRCRRGITRAR

SEQ ID NO: 166978 - protein, 66 aa, Oryza sativa
  Clone ID: PAT_MRT4530_65633C.1.pep
GPGIFTVFTYQRKLLTLDLASCVGAAVYMMFHLNDLTSKTSCLQIEGASYLNNVLMMLVNFASFLK

SEQ ID NO: 166979 - protein, 513 aa, Oryza sativa
  Clone ID: PAT_MRT4530_65634C.1.pep
MARHQDHRRLDYHVFPDDLGGLGAAAPRCDLERRVHGAALLGAFSPCFHGSSSSHLPPQHSSEEVSAAAATREQEQTLRLFLQDIERSIVFGICKNPETTEFFRDHRRRLDDYFAAAKNLLQMLEHPVLAYGDLHNRAKSLLVTAMGSLAVELCHLKIWKPDALASYLGCTPTSIWELARSSCRGGGDGSGSASSASWMSTSRSCSGGSSGPNGVSFDGYYMALSEERTVRSGQASSVTASHIDLKSVSILNKIADFMIGVGHEQMLRGAFDQHSEHLVRYIEILDIDKILGNHMEESTELLLKQLFDKFNSRFEMTYNVQKTWKVTDPVIRQKLREKITQKVIPLYRMYLESYSDKKQKSARFNVEHLEARLLEIFEGGEAIEGVGLAWHPNATPPWRVVDVRGQTAWVGSGTMLDEVYYAIANKTSRLGFPESVSLTAIRGGGGGNFGIVLSWKLRLVPVPATVTRVAPSLPNDTFLRVVVPLYLGTRAGLVAAMADTFPELNVTVSDCTE

SEQ ID NO: 166980 - protein, 85 aa, Oryza sativa
  Clone ID: PAT_MRT4530_65635C.1.pep
MVAAPAEEAEAQVVAEELEERGEGWKRKSSLGGRRLKHPYPRNGFLPSAPGRKGGGGRVSQLRDALSRRGMTPTEKRMAVARGTG

SEQ ID NO: 166981 - protein, 70 aa, Oryza sativa
  Clone ID: PAT_MRT4530_65636C.1.pep
HAVYHQPSLSVVGAGTSRRSRDHDEQFVHSPPDRHRERRAECSRRIVRRRRGWSCCLYKRTALSGIAKPL

SEQ ID NO: 166982 - protein, 52 aa, Oryza sativa
  Clone ID: PAT_MRT4530_65637C.1.pep
MPESIVYHQPSLSVVGAGTSRRSRDHDEQFVHSPPDRHRERRAECSRFPHRR

SEQ ID NO: 166983 - protein, 62 aa, Oryza sativa
  Clone ID: PAT_MRT4530_65638C.1.pep
MAAACRRARPPDADVGSDFASTPALAYHLLGYRRELNHRQWRSSGPHAFHILPKVGKLLNPF

SEQ ID NO: 166984 - protein, 221 aa, Oryza sativa
  unsure (1)..(221): unsure at all Xaa locations
  Clone ID: PAT_MRT4530_65639C.1.pep
APPPPPPPPPPPPPPPPPPPPPPPPPPPPPPPPPPPPPPPPPPPPPPPPPPPPPPPPPPPPPPPPPPPPPPPPPPPPPPPPPPPPPPPPPPPPPPPPPPPPPPPPPPPPPPPPPPPPPPPPPPPPPPPPRTAPCPLASPCVMPPPATPPKLLNPNESPLPLPPPPPPSTSPTLPLAPVSPXPPPPLTSPPSHPCLPPTASPLSPXPPPPPPPPPPSISLLH

SEQ ID NO: 166985 - protein, 76 aa, Oryza sativa
  Clone ID: PAT_MRT4530_6563C.1.pep
VDPRAAGPPPFFFFFFFFFLMLMLWCYYLIYIIYNLRSNQGRLQRNPQPRKKKTTSESAEHISRENKSPPNTSVEK

SEQ ID NO: 166986 - protein, 53 aa, Oryza sativa
  Clone ID: PAT_MRT4530_65640C.1.pep
LSTNIQGGDKMGSTLRIILRTWKFRDPCTSNFEFTLQLININRKISLKKLEVN

SEQ ID NO: 166987 - protein, 173 aa, Oryza sativa
  unsure (1)..(173): unsure at all Xaa locations
  Clone ID: PAT_MRT4530_65641C.1.pep
GSCSTFHRLLLINEFTSLPSWQELEHQVLIYRYFAAGAPVPVHLVLPIWKSVASXLLRPAPLPFPYVPTRYFSFSSHCVWPDWCRGSMEPDPGRCRRTDGKKWRCSRDVVPGHKYCERHVHRGRGRSRKPVEASAAATPANNGGGGGIVFDASRRSMERQLEGRHIFDRPCTT

SEQ ID NO: 166988 - protein, 48 aa, Oryza sativa
  Clone ID: PAT_MRT4530_65642C.1.pep
RSQGFLSVLTVFYSEVVITSVFRMTYALIIILVGSDLTVATLAIKKNK

SEQ ID NO: 166989 - protein, 180 aa, Oryza sativa
  Clone ID: PAT_MRT4530_65643C.1.pep
MDEEKEADSPQPPSKLPRLSGADPNAGVVTMAAPPPPVGLGLGLGLGGDSRGERDVEASAAAAHKATALTFMQQQELEHQVLIYRYFAAGAPVPVHLVLPIWKSVASSSFGPHRFPSLAVMGLGNLCFDYRSSMEPDPGRCRRTDGKKWRCSRDVVPGHKYCERHVHRGRGRSRKPVEAS

SEQ ID NO: 166990 - protein, 204 aa, Oryza sativa
  Clone ID: PAT_MRT4530_65644C.1.pep
MGASIAYVNPMMVCETTHTVRISENSTVLKNKIDEEKKDYVECLHKRKMAEVANYLAHSMLSHSDKRVIMVPYHFGNHYILFLVYPTDQTVVVLDPADYDKQAYMEFLCLLNLAHGRYRKLGGFGKNPNRDKLYIRGRWPLPSIPYNAIRFDQKTLINLCMDLCQFIRCDICNHLGEFHDPHSELATDPKFKNLRVWEREHAMV

SEQ ID NO: 166991 - protein, 73 aa, Oryza sativa
  unsure (1)..(73): unsure at all Xaa locations
  Clone ID: PAT_MRT4530_65645C.1.pep
SSPLTCSFNSEMSKVHHRSLNLYRCVIPVPKLANRPFXFSNLFNCVIPIPKLADHSFRSSNLFCYATPAPKQN

SEQ ID NO: 166992 - protein, 51 aa, Oryza sativa
  Clone ID: PAT_MRT4530_65646C.1.pep
MELGAMKLALDMEETLDSEVALDSEMTLWDSVEMALDSVKVDLDSVEVALD

SEQ ID NO: 166993 - protein, 57 aa, Oryza sativa
  Clone ID: PAT_MRT4530_65647C.1.pep
PWVFSRGPNPRAGHIFGNPFLKGGGGPPPPEALPGESSPRPINFPAPARKTKGFFSL

SEQ ID NO: 166994 - protein, 40 aa, Oryza sativa
  Clone ID: PAT_MRT4530_65648C.1.pep
MGKEKTHINIVEIGHVLSGKSTTTGHLIYKLGGIDKRVIE

SEQ ID NO: 166995 - protein, 240 aa, Oryza sativa
  Clone ID: PAT_MRT4530_65649C.1.pep
MATATATAAALFSSRTLSPSSSPRRRRRRGIPAAVTGFLSRRHAPALQRRLAPLHVVDDSKEVETAAGDGAEERSQTDKLVDGMDFGELCNDFECISSPYVEATARQLARDILDLRDDNRAFTCYAVSVKYKDPVRTFVGREKYKRPLWITKALENPTVTVQEMSMQSTSNLTIKWTFRGKPKNPIFATIGGDLIVSVTSQFVLNQISGQVLEQVDSWDLSASSPPAQAYFWVVQEGLLH

SEQ ID NO: 166996 - protein, 699 aa, Oryza sativa
  Clone ID: PAT_MRT4530_6564C.1.pep
MSPDADAAAAAAAGGEGAAAAGVGTAGEGRGVIRWDQILPRRSLRVLLVEHDDSTRQVVTALLRKCGYRVAAVADGMKAWGVMRERAYAFDLVLTEVTMPTLSGIELLSRIVASDECKNIPVIMMSSQDSIGTVLRCMQKGAVDFLVKPVRKNELRNLWQHVWRRHAMNSQTNASENNAASNHLSANGGNGSKTGEHSDEESDAQSSGSKREVEIQSAEKLPEVVADGGAGSSREHKIQNGFIDGMNTKSHALKGNDDAPSGNACGDSELQVLSTEKNVRSKFLNGITSAKVAGQIMDNALRFADSSSLRSSDPGKDLLVVAQTTADRKCKSSALENNAVMENNLSENSKGTATGHAESCPSHFVEINLEKQHHLNGYTNHKLNEKDIFNHSNSSAFSRYGNKRIESSAQRPFPPSFRVVHQQPVYDKNPQSSRVLLSCEHNTRESTVQAQVPLDRSTEGAAILCSSSVREDAGTSSSSPRKDSLTHPSYGFIPVPIPVGAAIPYHYGAIMQPMYYPQGAFMHCDSAAINKTAIQHVSCQSNYHENLGKPPQIDEHKQPEENHQLHHSRQILRESGEPVDLAKAHMERINQSASCSQDIRKGSGCTGSGETDANTNTVIALESGNESGVQNCSNNVLDGDRSRREAALLKFRMKRKDRCFEKKVRYHSRKKLAEQRPRVKGQFVSQKLKSAITTEAETD

SEQ ID NO: 166997 - protein, 93 aa, Oryza sativa
  unsure (1)..(93): unsure at all Xaa locations
  Clone ID: PAT_MRT4530_65650C.1.pep
MRVTLIKEIKEDLKKWKDIPCSWMXRINIVKMAILPKETYRFNTIPIKLTMTFFTKLKQTIQNFIWNNKRPRIAKAIMGEGWKQAGGMTLPDF

SEQ ID NO: 166998 - protein, 127 aa, Oryza sativa
  Clone ID: PAT_MRT4530_65651C.1.pep
MAAAAVYGGMKGGKLGVEEAHELQLNRIRITLSSKNVKNLEKVCADLVKGAKDKQLRVKGPVRIPTKVLHITTRKSPCGEGTNTWDRFEFRIHKRVIDLISSPDVVKQITSITIEPGVEVEVTIADV

SEQ ID NO: 166999 - protein, 329 aa, Oryza sativa
  Clone ID: PAT_MRT4530_65652C.1.pep
MATATATAAALFSSRTLSPSSSPRRRRRRGIPAAVTGFLSRRHAPALQRRLAPLHGEDLISPMRSRRAVQLALVDDSKEVETAAGDGAEERSQTDKLVDGMDFGELCNDFECISSPYVEATARQLARDILDLRDDNRAFTCYAVSVKYKDPVRTFVGREKYKRPLWITKALENPTVTVQEMSMQSTSNLTIKWTFRGKPKNPIFATIGGDLIVSVTSQFVLNQISGQVLEQVDSWDLSASSPPAQAYFWLSRRAFSTVEAGKDTIEAAKGTASRLSSKKDENLEVYPDPSGDPTKFFQRPDDGLNQDVYQIALFLAVLYFIVQFLRTTL

SEQ ID NO: 167000 - protein, 96 aa, Oryza sativa
  unsure (1)..(96): unsure at all Xaa locations
  Clone ID: PAT_MRT4530_65653C.1.pep
DGAQSGMATAAAESGRDGGGSHDDLDDDDDISSRRRPQRCHSFLVDSLVSSVGERADLTXAEVAVEIGGGKKPSDDGDGXGRPERRRRRRXCALAH

SEQ ID NO: 167001 - protein, 171 aa, Oryza sativa
  Clone ID: PAT_MRT4530_65654C.1.pep
MAPKIPIFFFLLALAAGVQGETGGVGGGGGNVEYNCVYTVFVRTGSAWKGGTDSTIGVEFAGADGRGVRIADLERWGGLMGAGHDYYERGNLDVFSGRGPCLPAAPCWMNLTSDGAGAHHGWYCNYVEVTATGPHRGCAQRRFDVEQWLATDASPYRLTAVRDQCRGHAAA

SEQ ID NO: 167002 - protein, 236 aa, Oryza sativa
  Clone ID: PAT_MRT4530_65655C.1.pep
MARAARGKAPRPRPRPPRGLAASLRRLLAGAGGGLGVAAAAYVGVDYLRYLSPAWHGRLMPALWAALALAAAARAPFYRHWSAELRAALPFLGSIAFMLGAFLCEAVSVRFVSAVMGLQWHRSAAPLPDTGQWLLLALNEKLPQSVVDLLRAHVITLHHYLMLFIMLGFSVLFGCIKAPGLGIATRYMFTMAIGRLLRTMTFVATILPSARPWCAAARYQIPGHPHPWAQNIMGHM

SEQ ID NO: 167003 - protein, 46 aa, Oryza sativa
  unsure (1)..(46): unsure at all Xaa locations
  Clone ID: PAT_MRT4530_65656C.1.pep
MDSRRHLGNSRAFEAAALVSLNGKXMWDVFARKGQHRSFIANLWFT

SEQ ID NO: 167004 - protein, 63 aa, Oryza sativa
  Clone ID: PAT_MRT4530_65657C.1.pep
MAMRTHDPIPDGKNLQAHGYTDIFLRFIQGHQAKDMTGWRGFTGTGNPLFPDVALLRTRTARA

SEQ ID NO: 167005 - protein, 387 aa, Oryza sativa
  Clone ID: PAT_MRT4530_65658C.1.pep
MGTRELLVVLAVVVMAAVGAGAQSSSASPAPATSQAPTVRQQTPFGRTMSTVITVSISVFFFLLFFCAYINQCRLAEAGDARAAAAAAAGGGAGGGPSRRGKRGLDPAVVATFPIVPYREVVKHKIGKSVLECAVCLTSFDDGDDLRLLPHCSHAFHPECIDPWLESRVTCPLCRANLEKPPPPPPPLPAAAAASPSPERSPRCQPSPPPPPPPHALVIPVEDEEDDSDEDDRKEEAVELEMLRSERRAARLPRSHSTGHSLVASAAAAAESGDHERFTLRLPQHVRDEVLRSLRLRHAASLVNLSDMSSEGSSRGGRRALGLAFGNGGGSSHGGRRWQAFLARTVSWARGGGDGSVRRGWDGSTRRGKDDAESSRKGATSPAAGRP

SEQ ID NO: 167006 - protein, 51 aa, Oryza sativa
  Clone ID: PAT_MRT4530_65659C.1.pep
RSKSSKARSNKFVKEVSSYLRRVGYNLDKIPFVPIFGLEGDTLFERSTNLD

SEQ ID NO: 167007 - protein, 109 aa, Oryza sativa
  unsure (1)..(109): unsure at all Xaa locations
  Clone ID: PAT_MRT4530_6565C.1.pep
MDEGSTGSFKWARGREIVAGMGGNGAATAGEMEWRRGHVTGXTGADFHGESGGKGGGDVEGDRFYAVWARGREREGRIWRDVGGNRRPWRLWPRKPKVGGGPDGGVRGP

SEQ ID NO: 167008 - protein, 102 aa, Oryza sativa
  Clone ID: PAT_MRT4530_65660C.1.pep
RPRRKPSPLRKDGCRPCRRPTSSSSTSPTTAPSTSTAARRLQPDVPLAAFVPRPRGSNVLGPPPAMVVSDSPKPQPTPSPPAPPPLPVPAAAGTTMGELEAA

SEQ ID NO: 167009 - protein, 603 aa, Oryza sativa
  Clone ID: PAT_MRT4530_65661C.1.pep
MWTAAGRRLHQQRDLHAILRTAHRRCCTRPIGGGLDAPAAPPGDLRTLSGVGMLIHQFKALLAPKKIYPWRSSHLQSLEVRRLHTAPSNAAAAAAVTDGGDQDKTKSAKDDDGDDKVQCKKEKIVTATKKGAAVLDQYIPDNIKTAYHVLQVGDEIYDATMNQTNVGGNNNKFYIIQALESDAGGNFMVYSRWGRVGTRDIHWSYRKGSHCYAHKYTWLEMDYGEADKETNKKTSSITNQLEETKLETRTASFISLICDISMMKQQMVEIGYNADKLPLGKLSKSTILKGYDVLKRISNVISGADTDRTQLEQLTGEFYSVIPHDFGFKKMSEFIIDTPQKLKAKLEMVEALSEIEIAIKLLEDDSSDQDHPLYARYKQFCCDFTPLEVDSEEYSMARERKIKTYLTNTHGKTHTGYTVDIVQIFKVSRLGEMERFQKFASAGNRMLLWHGSRLTNWAGILSQGLRIAPPEAPISGFMFGKGVYFADMFSKSANYCCASEACKSGVMLLCEVALGEMNELLYGDFGADNLPNGKLSTKGVGQTEPNIAESKITDDGMVIPLGKPEKVPSRRGSLMYNEYIVYNVDQIRMRYILNVNFNFKRWG

SEQ ID NO: 167010 - protein, 612 aa, Oryza sativa
  unsure (1)..(612): unsure at all Xaa locations
  Clone ID: PAT_MRT4530_65662C.1.pep
MSSSSGAARRARPGPWPPAPPPQPQAQPLSWAKRTGFQSRVSGESVAIVSASSSGQVSLPRPAEAPCDLEFGTRVHXVGSCIEMGLLQLLIVVMFALYLRKVKLFGYRVFLIYAVPLALGITWAIAFVLTATGVYSYRGCDANIPASNNVSAYCRKHVLRMKSCRVDTSHALRSSPWLRFPYPLQWGTPIFSWKMGLVMCVASVIASVDSVGSYHASSLFVATRPPTAGVVSRGIGVEGVSTVLAGLWGTGVGSATXQRMYTQWRLLKWAIEGRLINPVVISPTVAAVGLSFFSYGFTKVGSCIEMGLLQLLIVVMFALYLRKVKLFGYRVFLIYAVPLALGITWAIAFVLTATGVYSYRGCDANIPASNNVSAYCRKHVLRMKSCRVDTSHALRSSPWLRFPYPLQWGTPIFSWKMGLVMCVASVIASVDSVGSYHASSLFVATRPPTAGVVSRGIGVEGVSTVLAGLWGTGVGSATITENVHTIAVTKMGNRRAVGFGAIVLILLSFVGKVGAFIASIPEVLVAALLCFMWAMLCALGLSNLRYSAKGSSRNSIVVGLALFLSLSVPSYFQQYRLQPNSNSSVPTYFQPYIVASHGPIHTGSSGSFNGNT

SEQ ID NO: 167011 - protein, 69 aa, Oryza sativa
  Clone ID: PAT_MRT4530_65663C.1.pep
PPRVFFFFFFFFFFKFSTNKFIQIGFRNIQMVHRKIKCVQLQFIKHMYKKIVFQQSVFCGASTLGNILN

SEQ ID NO: 167012 - protein, 617 aa, Oryza sativa
  Clone ID: PAT_MRT4530_65664C.1.pep
MSSSSGAARRARPGPWPPAPPPQPQAQPLSWAKRTGFQSRVSGESVAIVSASSSGQVSLPRPAEAPSDLESGPPARPNSALPPPPAAAAANAEAKPQPPPPPPPARTRRRDSDGGRPNGQAAAAPLPQLLEEEDDGAPERPKYELRDSPGVFPIAVYGFQHYISMLGSIILIPLLMVPAMGGSPDDMAAVVSTVLLVSGMTTLLHTFCGTRLPLVQGPSFVYLAPALAIIYSPEFFGLNHNNFKHIMKHLQGAIIIGGAFQVLLGYTGLMSLFLRLINPVVISPTVAAVGLSFFSYGFTKVGSCIEMGLLQLLIVVMFALYLRKVKLFGYRVFLIYAVPLALGITWAIAFVLTATGVYSYRGCDANIPASNNVSAYCRKHVLRMKSCRVDTSHALRSSPWLRFPYPLQWGTPIFSWKMGLVMCVASVIASVDSVGSYHASSLFVATRPPTAGVVSRGIGVEGVSTVLAGLWGTGVGSATITENVHTIAVTKMGNRRAVGFGAIVLILLSFVVPSYFQQYRLQPNSNSSVPTYFQPYIVASHGPIHTGSSGVNYILNTLLSLNMVIAFLVALILDNTVPGGRQERGLYVWSEAEAARRESAVMKDYELPFKIGHAFRC

SEQ ID NO: 167013 - protein, 309 aa, Oryza sativa
  Clone ID: PAT_MRT4530_65665C.1.pep
MFCSTIDQFSVDKYPFKDLREAVDVLFLHGSSDMVIAKQAIFLYYLFDRHWTIPDSEWRYLVDDFAATFGISRRTLLECLVFCLLDDHSSHALEEACSLLPKISCKETHPKIAQVLLERHKPDVALVVLKCTGRDTFSSAANIEKDDTESLSEAVTAVRVRIEYGHLTEAFMYHRSYCSKVKEQRSADMSHVEDANSYKSSWMYHVEVMMTEFCNICIERNFVDRMIDLPWDSEEGKHLHKSLLDCAREMPMEPCGSLLVVFYLQRCRYLEAYEVDRSLQSFEQNALETASEKKHPKSEQLLSGDKVGY

SEQ ID NO: 167014 - protein, 71 aa, Oryza sativa
  Clone ID: PAT_MRT4530_65666C.1.pep
VLWCVSGDYLVLDLRVVPLQDRCWSRTVDPLPWCFFGHAVWPSQQHHSNAESDDNLAPLPPPATPPLFIIS

SEQ ID NO: 167015 - protein, 231 aa, Oryza sativa
  Clone ID: PAT_MRT4530_65667C.1.pep
MSAAAPGTRLLRGVVFDMDGTLTVPVIDFPAMYREVLGGDEAYAAARAAGGGSVDILHCIEGWAPDEQRRAYEVIARFEQDGLDRLQIMPGASELCGFLDAKQIRRGLITRNVKTAVDLFHQRFGMMFSPALSREFRPYKPDPAPLLHICSTWNIPPNEVVMVGDSLKDDVVCGKRAGAFTCLLDETGRYGPHDSLPEGVRPDFKVSSLSEVFSVLEEHFDLAPVVSESRI

SEQ ID NO: 167016 - protein, 136 aa, Oryza sativa
  unsure (1)..(136): unsure at all Xaa locations
  Clone ID: PAT_MRT4530_65668C.1.pep
MVLYDLELIPFHLMMAIWGGQKRGYASMKFMLYTPFFGLLVLAAFLGISLLSGSHSFDYNPVITQTFTESAQTILLILILLGFGIKIPLVPLHTWLADAYTEASPAMAXLLGTYLSNLGTYGMIRSSVLVILPKIN

SEQ ID NO: 167017 - protein, 614 aa, Oryza sativa
  unsure (1)..(614): unsure at all Xaa locations
  Clone ID: PAT_MRT4530_65669C.1.pep
IPVPDVPMEITVADVLQATQSNRSPGPDGLNVGFYRVSWPWIKSDITQTVQDFYVSAERGIRQGCPLSPYLFILALNELFEMISNAIQTGQVKGASLTPNGTIIHSSMYADDLMIVGQATPEEARSIFQIIQFFCHQSGQTPGWNKSSILFSSHTPILSXVTQDILSIFPVSLMNNNSKHLGHPLILNTKARNSAYNFIIEKFKTRLSIIKAKTLSHAGTNDEDSKKGICWKSWSDICKPFDQGGLGIRYLLTVKKSLLIQCAWRIIENPNNLVSKILKEKYFPQGSFWKALTKIPKSTFWSSILKISHLWNDRKEXDISKVSQIFDPQVSNEILKTPIVHSNTDDKLYWIHNSKGICTSQSAYKVLSTNSMLPAANMIWKARNDFYFKKKNWEPIQVNFAAQIMSSNFISCLDTIDEDHESQNHDVNSWTSLNSASVIRCYTDASWQDGNTGIGIFIHNSDTHKALFIQAASNFFSSPLQAEHAAIMTAILICQKLNIIDVTLLLDNQELVSLLQVQDYYSHEHYWSLNPLLXDLISLAGTQALNIKWISRQVNKMADFLAKKARNKSRQNLNQIVCQNISHLCSHSDCPTKTALESSPNKRINQTWPIATLL

SEQ ID NO: 167018 - protein, 136 aa, Oryza sativa
  Clone ID: PAT_MRT4530_6566C.1.pep
MSPDADAAAAAAAGGEGAAAAGVGTAGEGRGVIRWDQILPRRSLRVLLVEHDDSTRQVVTALLRKCGYRAVAAVADGMKAWGVMRERAYAFDLVLTEVTMPTLSRIELLSRIVASDQCKNIPVIMMSSQDSIGTVL

SEQ ID NO: 167019 - protein, 113 aa, Oryza sativa
  Clone ID: PAT_MRT4530_65670C.1.pep
PPGGFNPQKTGIFSGLRFQGRAQGGNTFPGKKGKIPFLFKRVGWPPWKENNARHNKNPAPPLWGKPPPLLIEKRGGFFQKRNRGGGLRFPRPPFRGRFGRFPPQKKTKKFFCP

SEQ ID NO: 167020 - protein, 73 aa, Oryza sativa
  Clone ID: PAT_MRT4530_65671C.1.pep
MNYHHKKYEDATSGLAGEMGALHGLLKSGFHQAHHSPRGPSWRDPVVSDRSPGSSGPVDPFLFNLIPSYVLHR

SEQ ID NO: 167021 - protein, 58 aa, Oryza sativa
  Clone ID: PAT_MRT4530_65672C.1.pep
MGSISALCEKGIWSGPEEDDKAGPVGPTCQSEKGRRQPIEGSNAYVGPSGETAMAEII

SEQ ID NO: 167022 - protein, 335 aa, Oryza sativa
  Clone ID: PAT_MRT4530_65673C.1.pep
MLLHHRLLPRLLLSPSTPVTTTLLVHRTSLFPTRRILSPCCSALSQVAAAPETVDHSDGDEPQGDVQVQLPLDRLFVPPGASVSAGDAEAVTARVLKGSNIVLGPYARGDANVIAADFVKSSVRPDDCPRDGLPEFALVGRSNVGKSSLLNSLVRRKRLALTSKKPGKTQCINHFKSLFNRYAAAPQEARTNWDEFTRNYFLGRENLVSVFLLVDASIPAKKIDLDYASWLGQNKCKIQKSSQTSNYVGINLVPETPLKTSSNVPMTLVFTKCDKRKKKKNGGKRPEENVENFQSLIREYFEAAPPWIMTSSVTNQGRDEILLHMSQLRNYWLKH

SEQ ID NO: 167023 - protein, 823 aa, Oryza sativa
  Clone ID: PAT_MRT4530_65674C.1.pep
HLVRRASANVVSIIAKYAVPAGEWPELLPFIFQCSQSPQEDHREVALILFSSLTETIGTTFQSHLNDLQPILLKCLQDEASSRVRIAALKAVGSFIEYVNDGGDVVKIFRDFVPSILNVSRQCLANGEEDVASIAFEIFDELIESPAPLLGDSVRSIVQFSLEVCSNQELEINIRQQAIQIISWLVKFKASFLKKHKLVIPILQVMCPLLTETADEDGDSDLAADRSAAEVIDTMAINLPRHVFPPVLEFASVSFRHINPKYREAAVTSLGVVSEGCCEHLKDKLEDCLKVVLEALKDQEQMVRGAASFALGQFAEHLQPEILSHYESVLPCILNALEDPSDEVKSAIGSVAAAAEQAFMPYAEKVLEMMKGFMVLTNDEDLCARARATEVVGIVAMAVGRARMETILPPFIEAAISGFVLDYSELREYTHGFFSNVAEILDDSFAQYLPHVVPLAFSSCNLDDGSAVDIDDADSVDNGFSGVSSDDDVNDEPRVRNISWLTIIADILTAIRAIPPAHADVLEKQKDILDTVMNIYIKTMREDDDKEVVAQACTSLADIVRDCGFAIIEPYITRLADATLILLRQESCCQQVESDGEDDGDIDHDEVLMDAVSDLLPAFAKVMGSYFDPIFTKLFDSLMKFAKSPHPPQDKTMVVATLAEVAQGMGAPISAYVDKIMPLVLKELASSEATNRRNAAFCVGEMCKNGGAAALKYYGDILHGLHRLFADSEPDDAVRDNAAGAIARMIMVQPQSIPLNQILPLVPDVINAFAQVVVSPNESDEVKTVVAKAVSHLISVYGQQMQPILSALPPAHANALASFANRR

SEQ ID NO: 167024 - protein, 78 aa, Oryza sativa
  Clone ID: PAT_MRT4530_65675C.1.pep
MAKKTGAEDPPAPLTWVAVTGGAGSGRGGNEVVGRASAAVDDDVCQRWTLQWTDQMMLNVGLADADMLRFLVKNLATH

SEQ ID NO: 167025 - protein, 86 aa, Oryza sativa
  unsure (1)..(86): unsure at all Xaa locations
  Clone ID: PAT_MRT4530_65676C.1.pep
TDDHRRWPQFITPGXLFVYIAVWIGWVARSYLMALTGKNKPSIREIIIEVELPVKLVPRGFMWPXVSASRELLPGSLVVAEASIGD

SEQ ID NO: 167026 - protein, 65 aa, Oryza sativa
  Clone ID: PAT_MRT4530_65677C.1.pep
MAAGVGTAMTARAYHGVAGWRSSMARGAVWPKQGQPAVGDCRRFRFNALARPDYLFGRVAGEGGS

SEQ ID NO: 167027 - protein, 199 aa, Oryza sativa
  Clone ID: PAT_MRT4530_65678C.1.pep
MPPHKILLLEKDRRASLPLLALLLNFRVLAAAAGSHFSPAVSRIAGHLCLSPSMAAVTLLALGNDAPDVAGEQRRGRDGEWHGDERDGPDDERGDERALAAGDGQRGGGDGGDQRVGRRSAGRGGRGEGPAVDSPRRRSAPLAARSSAAAGAPLRRPPALYALVAANTGSASSTTRRTGSSTCYAVSTQENTLRRTHTW

SEQ ID NO: 167028 - protein, 287 aa, Oryza sativa
  unsure (1)..(287): unsure at all Xaa locations
  Clone ID: PAT_MRT4530_65679C.1.pep
LSTATSVSVSLVRCIGWRCCSTAPCPRPPLPCQILTATRPRWTHVPVSTSPPSLLISFPSSAQDRRASLPVLXALLLNFRVLAAVAGSHFSPAVSRLAARLRLSPSMAAVTLLALGNDAPDVAGERRRGRDGERHGDERDGPDDERGDERASAASDGRCGGGDGGDQRVGRRSAWRGGRGEGPAADSPRRRSAPLRLPPRARGPAPAVRLPPLRXLAARSSAAAGAPLRRPRALCTLVAANTGSASSTTTRTGSSTADGGGGVVVVVVSVSGSANHLALAAACSRSR

SEQ ID NO: 167029 - protein, 300 aa, Oryza sativa
  Clone ID: PAT_MRT4530_6567C.1.pep
MAASQRSRSTAAQLDVDDQAAADQLMTMMRRPAAVLQDEAAAEEEASAAAADLQLELRRGPWTVDEDLTLVNYIADHGEGRWNSLARAAGLKRTGKSCRLRWLNYLRPDVKRGNFTADEQLLILDLHSRWGNRWSKIAQHLPGRTDNEIKNYWRTRVQKHAKQLNCDANSARFKDAMRYLWMPRLADASQLGDHHGYNSTTAMGDAHGMPVMTSSSSDSFATSESYDGGLYANVQDNEMVNGGDYWMQGANKGFCSNYESEQLHPHEHSQFQDPDLVGWVQGFSEGISENFWSLEDIWKM

SEQ ID NO: 167030 - protein, 102 aa, Oryza sativa
  unsure (1)..(102): unsure at all Xaa locations
  Clone ID: PAT_MRT4530_65680C.1.pep
GSKHIPRRCRPEKVAFLNCKKKXPPNPQKCLEKGPQVKPWVFALLKELXPKCPKERGAYAGCMYYSPXEFGFCCKGPQDFERACPVFEEPLRVFLPRDDFPK

SEQ ID NO: 167031 - protein, 36 aa, Oryza sativa
  Clone ID: PAT_MRT4530_65681C.1.pep
MAGLGPDHGFVQETEGNWSWVVKATNYNTSSSARFQ

SEQ ID NO: 167032 - protein, 89 aa, Oryza sativa
  unsure (1)..(89): unsure at all Xaa locations
  Clone ID: PAT_MRT4530_65682C.1.pep
RTGMSHLVICATKGCSSQRKGIASAAAPESREIMGVARSSRPSHRSPSCTDRHDEIPLLSSAPLLFLPSSIXAAGRRDQATTPPKXXTP

SEQ ID NO: 167033 - protein, 80 aa, Oryza sativa
  unsure (1)..(80): unsure at all Xaa locations
  Clone ID: PAT_MRT4530_65683C.1.pep
WARGSGRGASGCHVMPLGPSRCLAPRPSSNCHVXGGASGEGTQAEPLSMRAAPQLPLTAFNTSVIRSSPGVRKTAKVSTH

SEQ ID NO: 167034 - protein, 77 aa, Oryza sativa
  Clone ID: PAT_MRT4530_65684C.1.pep
PYYCYFHTLFALVHLSSSYLHEGQRVNNRVYVFSVNYDICSLLFRSYSSKNLRRKFRRTCRKLMIALKKRRLGFSIT

SEQ ID NO: 167035 - protein, 142 aa, Oryza sativa
  Clone ID: PAT_MRT4530_65685C.1.pep
FLDSQAEYDESSGEDQDAKVSPSAEDEEAGKKAEDGRSKLSDEQKVKQQRPHKIQIWSEIRPSLGHIGEMMSLRVKKKQSSADKENAANELQSANNEEIKPSEDSDDEFYDVEKVDPNQEGPVADSADADSSMKCDANSEGH

SEQ ID NO: 167036 - protein, 131 aa, Oryza sativa
  unsure (1)..(131): unsure at all Xaa locations
  Clone ID: PAT_MRT4530_65686C.1.pep
GGFTLHHPGVEVFMGAARSVFYQSIWKAWVPPKCKFFSWLATQNRLWTADRLGXEAXRNQKVCPLCRTIDESAVHLLAKCRVTKRIWAEIQRWTHTDLQMDKWNDCPSIEHWWNLVVESPSTPRAPLRTLL

SEQ ID NO: 167037 - protein, 87 aa, Oryza sativa
  Clone ID: PAT_MRT4530_65687C.1.pep
SSPVDDEPPPTLPLPVTGPSHHGLRCSRSGHPELGGRGSNHPEFGYSKSHDPSFTSSRSGLEVSGPPSLTPPRVVEVDLSLQLKCRS

SEQ ID NO: 167038 - protein, 71 aa, Oryza sativa
  Clone ID: PAT_MRT4530_65688C.1.pep
RLNGPTSSGKRKRVRGFPKVQPKSHTPPISRPQGIPGFQGAPKVPRPKKRGRCARMPPNPCTSCRIPRTRG

SEQ ID NO: 167039 - protein, 108 aa, Oryza sativa
  unsure (1)..(108): unsure at all Xaa locations
  Clone ID: PAT_MRT4530_65689C.1.pep
GLVSTHGINMYTDGLCNLSLXSIQLLSTYRHPLFRGFYLSTGRTWHVTRXCIGFRSLARGXVLRSAGPGNCIGYIGVVQGCIVSTSXIALVWLIYLPTGLSYILVNLI

SEQ ID NO: 167040 - protein, 94 aa, Oryza sativa
  Clone ID: PAT_MRT4530_6568C.1.pep
PARSDVYAFGVLLIGLLAGKHPSQRPFLAPPDLQDWVRTMRVDAGSEADRLEMLPEVAGICSAPSPEQRPVMWQVLKMIRGIKDSATMEDAALT

SEQ ID NO: 167041 - protein, 865 aa, Oryza sativa
  unsure (1)..(865): unsure at all Xaa locations
  Clone ID: PAT_MRT4530_65690C.1.pep
MGCAGLYMAPSQQSRQQCWPPWPVSSSSHSFCRFLCVSTNSRMASNAASPAQLGPSCRGIVLRLSCXYTSPQNGKAERVLRTINNSIRTLLIQASMPPSYWAEALATATYLLNRRPSTSVRNSIPYQLLHNKLPDYSNLRVFGCLCYPNLSATTPHKLSPRSAPCVFLGYPASHKGFRCLDISTRRLYISRHVVFDDKTFPFAAIPQDASSFDFLLQGFSTAVAPSSEVERPRFSSVTPSHEVEQPIPDDDTSGTELFQLLPGLRSSAAGRPLVGLPVNARLPGGCANGAANGSSSSNPSPVMDPPAASVVRPAPSEGPNTSLISPYRHTYVRRSQPAPAAIHGPIRSSRAFRSATDQQQQTGHTMVTRSQTGHLRPIQRFTYTATHDAVSPVPSNYRSALADPNWRAAMADEYKALIDNNTWRLVPRPPGANVVTGKWIFKHKFHSDGTLARHKARWMSRMLLHGNLEETVYCQQPSGFVDPSAPNAVCLLQKSLYGLKQAPRAWYQRFATYIRQLGFTSSASDTSLFVYKDGDNIAYLLLYVDDIILTASSATLLHHITARLHSEFAMTDLGDLHFFLGISVTRSSDGLFLSQRQYAVDLLKRAGMSECHSTATPIDARSKLSATDGAPVSDPTEYRSLAGALQYLTLTRPELTYAVQQVCLFMHDPREPHLALIKRILRYIKGTLHIGLHLRTTPVNSLTAYSDADWAGCPDSRRSTSGYCVFLGDNLVSWSSKRQTTVSRSSAEAEYRAVAHAVAECCWLRQLLSELHISLTSATVVYCDNVSAVYMTANPVHHRRTKHIEIDIHFVREKVALGQVDYFARIFPGVAHGFACRYNGSNPFAVRTAEQSLALMLDWFEKHLK

SEQ ID NO: 167042 - protein, 318 aa, Oryza sativa
  Clone ID: PAT_MRT4530_65691C.1.pep
MASRRAGRERDPCADGVSRSPFTDEDVRVYSDSRGYFSSGGRDDDAGPFPTSDELYHHYRPRTTPSDPVPPPLSSQCSYPESAHALQEPDVLSLGKLLDATTLKESITCSPSSSPQAVSKDTINSSPSVRCLSSPGSIIWVREPPEDRLGVYHIRMDRSGSFHMYPDLGGPFQSLNEAQDAISSHLNRIYPPVKFQERPGESYVDRMIREKLYWPDGTRKKCSKAQAFENVKNMMNQLAKVILDISMKHPNDVNSYVGGHCYITGIYDTEVSSDSEEDEDAEEQRLRKMYQDEDAEEQRLRKMYQDLDDPGVWEELFG

SEQ ID NO: 167043 - protein, 191 aa, Oryza sativa
  unsure (1)..(191): unsure at all Xaa locations
  Clone ID: PAT_MRT4530_65692C.1.pep
KGDHVLALSNVCFEKDRPCAACQAGKQVESSHHSKNVMTISRPLELLHMDLFEPVAYLSIAGSKYGLVIVDDFSLFTWVFFLQDKPETQGTLKRFLRRAQLEFELKVKQIRSPIGCEFKYLQVEEYLXEEGVKQEFSAPYTPQQNGVVERKIRTLIDMARMMLEEFNGXERFWSVAVTSASKPKLGIEDAS

SEQ ID NO: 167044 - protein, 50 aa, Oryza sativa
  Clone ID: PAT_MRT4530_65693C.1.pep
QANHTNPPLINFTENSPGPLHHTNLYLDTPIVPKTTNFLINRKHTGLIHQ

SEQ ID NO: 167045 - protein, 124 aa, Oryza sativa
  Clone ID: PAT_MRT4530_65694C.1.pep
GGRFGTLWCDDPKKGRMYADFIGSAGSIFELITPLYPGYFLPLASLGNLAKAVRRGFRDPSFRVIQNHFTESGNLWEVAAKEELWEVGAHLVGLSIGVFIMDTSSIKSSYPTLALTWLGVRLLH

SEQ ID NO: 167046 - protein, 139 aa, Oryza sativa
  unsure (1)..(139): unsure at all Xaa locations
  Clone ID: PAT_MRT4530_65695C.1.pep
ERAGKIYLSGGRPRSNTYRRRXFDLTTVGIGWRRVGANPGMTRGGGEGENGRLGEAKSHSAAAWTGAHGIERRFRAAVVVLALSPSRLARRRWAESIGRVTARQGSRPRAGSLKADARRHDARQSRLLESVRKGEEKAN

SEQ ID NO: 167047 - protein, 457 aa, Oryza sativa
  unsure (1)..(457): unsure at all Xaa locations
  Clone ID: PAT_MRT4530_65696C.1.pep
PFQIHSLAILQDRSICSPQPPPPPPTRASMAELPDEEDRGYAPASRPRRHPVEEEETAASWKKRDVCSWRDTRMXVSKRYILDGNSKLQIHQEKNEHMANTLEEEEKEEANSSIPRAIKDFVLPAGFPGSVSDDYLEYMLWQLPTNVTGWICHTLVTSTLLKAVGVGSFTGTSAAASAAAIRWVSKDGIGAFGRLLIGGRFGTLFDDDPKKWRMYADFIGSAGSIFELITPLYPGYFLPLASLGNLAKKIIDSGLLKQAVGRGFRDPSFRVIQNHFAESGNLGEVAAKEEVWEVGAQLLGLSIGVFIMDTSGIKSSYPTLALTWLGVRLLHLWFRYQSLSVLKFRTVDRLLKLYRNEKYILFLNPIGTGRAAFFVTFKEAATSMSVLRSLWQAHWLDKNQLRQDDVFSWLEESVLALEHGFPDFLKQMEIAGWDQNQIILKVPKEPIMVMEHPDQEV

SEQ ID NO: 167048 - protein, 100 aa, Oryza sativa
  Clone ID: PAT_MRT4530_65697C.1.pep
SPHQCGIWLTLEPLMATHPPLSLDLPLRPPATAAPSLAKPKVLDEDDFFHQQPLKKDPQVAALEAELQRMGPENQQLSQMLAAVAAKFEALQNPVSDMGT

SEQ ID NO: 167049 - protein, 80 aa, Oryza sativa
  Clone ID: PAT_MRT4530_65698C.1.pep
MSDAILVDIRRSSGPRRRRRLQPEEHKSPRSREIDRSETKLRVQIDYREPGRQAGPEIDRDAAPEPRTGHMGTPNRLGLI

SEQ ID NO: 167050 - protein, 73 aa, Oryza sativa
  unsure (1)..(73): unsure at all Xaa locations
  Clone ID: PAT_MRT4530_65699C.1.pep
DNNPNLKSXXNNQIERGYKTLPRRLHDCILLXFHTTLALLITNLLLLNYHHCLHHYXPLQHXREEQRQEKMXK

SEQ ID NO: 167051 - protein, 97 aa, Oryza sativa
  unsure (1)..(97): unsure at all Xaa locations
  Clone ID: PAT_MRT4530_6569C.1.pep
CGRAAAGLQDEAAAEEEAYAAVADLQLELRRGPGTVDEDLTLVNYIXDHGEGRWNSLARAAGNIIKSSVKRTGKSCRLRWLNYLRSDVKRGNFTADE

SEQ ID NO: 167052 - protein, 70 aa, Oryza sativa
  Clone ID: PAT_MRT4530_656C.1.pep
IISISMVGKRGLQCSCQVANISIEHVVTQVETRPRNKKCRINYDGNHNSTTHGFCNSKFHESSLSNSCKT

SEQ ID NO: 167053 - protein, 173 aa, Oryza sativa
  unsure (1)..(173): unsure at all Xaa locations
  Clone ID: PAT_MRT4530_65700C.1.pep
VIRXTIXXIGXRXPXXXFFFFFFYIXSCYXFQHXQLGXXEKEHGRLXXLXAXPXINILLIYXXTXLYCYNQHTXXDXXTIXILTSKXAXXXIXXXFVYFXKPFFGXXSFHSCXQWXSRXHVXLPMLHLVYXRYLXTGCXTKPSXKXGFXLIKXCXXWXDPKVGVFXLGXLXXI

SEQ ID NO: 167054 - protein, 60 aa, Oryza sativa
  Clone ID: PAT_MRT4530_65701C.1.pep
MAKSKNHTAHNQSYKAHKNGIKKPKRHRQTSTKGMDPKFLRNQRYSRKHNKKSGEAESEE

SEQ ID NO: 167055 - protein, 240 aa, Oryza sativa
  unsure (1)..(240): unsure at all Xaa locations
  Clone ID: PAT_MRT4530_65702C.1.pep
ADQLVDAASGHKILSFMDDNAGYNQIFMAEEDIHKTASRCPCAIGLFEWVVMTFSLKSAGATYXWAMNYIFHDLIGWLVEVYIDDVVVKSKELENHIADLRXVFERTRKYGLKMNPTKCAFGVSAGQFLGFLVHERGIEVTQRSVNAIQKIQPLEDKKKLQELISKINFVRRFISNLSGKLEPFTHLLRLKADQKFTWGAEQQKALGNIKEYLSSPPVLIPPQKGVPFRLYLSAGDKWGI

SEQ ID NO: 167056 - protein, 1100 aa, Oryza sativa
  Clone ID: PAT_MRT4530_65703C.1.pep
MAAAAVADDWSALLAFLSNVSADSGGVALADWGRSPEFCNWTGVVCGGGERRRVTQLVLAGRGLRGVVSPALGRLEFVTVLDLSNNGFSGEIPAELASLSRLTQLSLTGNRLEGAIPAGIGLLRRLYFLDLSGNRLSGGIPATIAGLVNLTYLNLSNNMLNGSIPPEMSRLRRLERLYLSNNLLAGEIPRSIGEMPHLGLVDLSGNRLAGTIPDTFSNLTQLRRLMLHHNHLSGDVPASLGDCLNLEILDLSYNGLQGRIPPRVAAIRRVVKLMLRDQKLSGEVSPALGNLSHLNILNLSGNLFAGRVPPELGNLFRLTLLDISSNTFVGRVPAELGNLSSLNTLDLSRNLFTGEVPPELGDLSKLQQLSLGNNLLEGKIPVELTRMSNLSYLNLGENNLSGRIPPAIFCNFSSLQYIDLSSNSLDGEIPIDCPLPNLMFLVLWANNLVGEIPRSLSNSTNLKWLLLESNYLSGELPADIAGMRRLERLYLSDNMLSGEIPPSLGEVPRLGLVDLSRNRLAGGIPAAALSNLTQLRWLVLHHNHLAGVIPPGIAQCVNLQNLDLSHNMLRGKIPDDLSELSGLLYLNLSSNLLEGMIPATIGRMAMLQVLNLSSNRLSGDIPTQIGGCVALEYVNVSGNALEGGLPDAVAALPFLQVLDVSYNGLSGALPPSLGAAASLRRVNFSYNGFSGEVPGDGAFASFPDDAFLGDDGLCGVRPGMARCGGRRGEKRRVLHDRRVLLPIVVTVVGFTLAILGVVACRAAARAEVVRRDARRSMLLAGGAGDEPGERDHPRISHRELAEATGGFDQASLIGAGRFGRVYEGTLRDGTRVAVKVLDPKSGGEVSRSFKRECEVLRRTRHRNLVRVVTTCSQPDFHALVLPLMRNGSLEGRLYPRDGRAGRGLGLAQLVAVAADVAEGLAYLHHYAPVRVVHCDLKPSNVLLDDDMTAVVADFGIAKLVKPCNSITGLLQGSVGYIAPEYGLGGHPSTQGDVYSFGVMILELITGKRPTDVIFHEGLTLHDWVRRHYPHDVAAVVARSWLTDAAVGYDVVAELINVGLACTQHSPPARPTMVEVCHEMALLKEDLAKHGHGGSGGDVVA

SEQ ID NO: 167057 - protein, 40 aa, Oryza sativa
  Clone ID: PAT_MRT4530_65704C.1.pep
FVLTVWLPICVFDRKKKKARLVCFDQKKKKKRSQSSRVFI

SEQ ID NO: 167058 - protein, 271 aa, Oryza sativa
  unsure (1)..(271): unsure at all Xaa locations
  Clone ID: PAT_MRT4530_65705C.1.pep
SSSKLSLTGNRLEGAIPAGIGAXSRRLYFLDLSGNRLSGGIPATLFCNCTALQYVDLANNSLAGDIPYSGECRLPSLRYLLLWSNDLSGLIPPALSNSSLLEWVDFESNYLAGELPPQVFDRLPRLQYLYLSYNNLSSHGGNTDLAPFFRSLTNCTRLQELELAGNDLGGELPAFVGELSREFRQIHLEDNAITGAIPPSIAGLVNLTYLNLSNNMLNGSIPPEMSRLRRLERLYLSNNLLAGEIPRSIGEMPHLGLVDLSGNRLAGTIPD

SEQ ID NO: 167059 - protein, 1060 aa, Oryza sativa
  Clone ID: PAT_MRT4530_65706C.1.pep
MAPVPISVFVFVFIFIFFLLDGSIPTLGSNDHSALMSFKSGVSNDPNGALANWGSLNVCNWTGVSCDASRRRVVKLMLRDQKLSGEVSPALGNLSHLNILNLSGNLFAGRVPPELGNLFRLTLLDISSNTFVGRVPAELGNLSSLNTLDLSRNLFTGEVPPELGDLSKLQQLSLGNNLLEGKIPVELTRMSNLSYLNLGENNLSGRIPPAIFCNFSSLQYIDLSSNSLDGEIPIDCPLPNLMFLVLWANNLVGEIPRSLSNSTNLKWLLLESNYLSGELPADMFGGMRKLELLYLSFNYLRSPENNTNLEPFFASLTNCTSLKELGVAGNELAGVIPPIAGRLGPGLTQLHLEYNSIFGAIPANLSNLTNLTALNLSHNLINGSIPPAAVAGMRRLERLYLSDNMLSGEIPPSLGEVPRLGLVDLSRNRLAGGIPAAALSNLTQLRWLVLHHNHLAGVIPPGIAQCVNLQNLDLSHNMLRGKIPDDLSELSGLLYLNLSSNLLEGMIPATIGRMAMLQVLNLSSNRLSGDIPTQIGGCVALEYVNVSGNALEGGLPDAVAALPFLQVLDVSYNGLSGALPPSLGAAASLRRVNFSYNGFSGEVPGDGAFASFPDDAFLGDDGLCGVRPGMARCGGRRGEKRRVLHDRRVLLPIVVTVVGFTLAILGVVACRAAARAEVVRRDARRSMLLAGGAGDEPGERDHPRISHRELAEATGGFDQASLIGAGRFGRVYEGTLRDGTRVAVKVLDPKSGGEVSRSFKRECEVLRRTRHRNLVRVVTTCSQPDFHALVLPLMRNGSLEGRLYPRDGRAGRGLGLAQLVAVAADVAEGLAYLHHYAPVRVVHCDLKPSNVLLDDDMTAVVADFGIAKLVKNADGDVTTNSGSIAAASSDPCNSITGLLQGSVGYIAPEYGLGGHPSTQGDVYSFGVMILELITGKRPTDVIFHEGLTLHDWVRRHYPHDVAAVVARSWLTDAAVGYDVVAELINVGLACTQHSPPARPTMVEVCHEMALLKEDLAKHGHGGSGGDVVAAATVMAAAAPPSVAMTASERSCSTSDSSLSY

SEQ ID NO: 167060 - protein, 82 aa, Oryza sativa
  unsure (1)..(82): unsure at all Xaa locations
  Clone ID: PAT_MRT4530_65707C.1.pep
GRIPVHSLPTTIGEQDNCYVYDSGESHMNDTDGPIVDINDGXEGNEGTNDDVDIDDEAQMXDTDFDINVRVENGAPETRGKY

SEQ ID NO: 167061 - protein, 78 aa, Oryza sativa
  Clone ID: PAT_MRT4530_65708C.1.pep
MGLWTLLEGFLLLANALAILNEDRFLGPRGWSMSEVSGNGQTKSLKGQIVGLIYATQFLRMPLIALNVLIIVVKLVSG

SEQ ID NO: 167062 - protein, 159 aa, Oryza sativa
  Clone ID: PAT_MRT4530_65709C.1.pep
MGVYTFVCRSSGDEWTAKQLKGELEASAATPYELQRRLVAAASAADSAAGVQSSFSMVSPSSAVFQLDLNSTFVPDMRYFALIGRWIWFLVRSQKISVGFDTKLTLVIIGAVGGGAAIGGGAAAGAASGGAAAEAPKAEEKKEEEKEESEDDLGFSLFD

SEQ ID NO: 167063 - protein, 49 aa, Oryza sativa
  unsure (1)..(49): unsure at all Xaa locations
  Clone ID: PAT_MRT4530_6570C.1.pep
VSTSWAIGLIVGPAISGYLAQXFPYFLPCLCISIFCFVILISCIWLPEN

SEQ ID NO: 167064 - protein, 50 aa, Oryza sativa
  Clone ID: PAT_MRT4530_65710C.1.pep
TPFCVPLKKLCSQNCPSGVGAICIITPFGEPFKLLFVACGLPLINFSHVF

SEQ ID NO: 167065 - protein, 142 aa, Oryza sativa
  Clone ID: PAT_MRT4530_65711C.1.pep
SLTEAKDLKLSAYSDVYLFNRDLKCCSTFSKLKNLVLNAWFVAPDISALTWFLQYAPLLERLTLKVSEVPNNLVETEGSYSQLEQSFAASHLQIVEIKCKEVHGIILKILEVLNANGIPLEKISIRCSGRFKFVCTGIDSEN

SEQ ID NO: 167066 - protein, 118 aa, Oryza sativa
  Clone ID: PAT_MRT4530_65712C.1.pep
VARKLADYAKIVTVSTSSDAIKDQDRPLSTSEVLSPDSKEDVFVPEDLFLPGTLYYLKRDIEDINGVEDESYTLWRGDAGENFQRILLSGNLISDHKCESIYYALRDVLKTLPPQESG

SEQ ID NO: 167067 - protein, 677 aa, Oryza sativa
  Clone ID: PAT_MRT4530_65713C.1.pep
MARPRRASTMQLGLFLAALLLLTPSPAGSVAAAKGGGAKSGGGGGTVIGIDLGTTYSCVGVYRNDRVEIIANDQGNRITPSWVAFTDGGERLIGEAAKNQAAANPERTIYDAKRLIGRQFSDAEVQRDMKLLPFAVVDRNGKPHVRVEVKDGDVRVFSPEEVSAMVLTRMKETAEAYLGEKVTRAVVTVPAYFNDAQRQATKDAGVIAGLTVDRIINEPTAAAIAYGIDKKGAEKNVLVFDLGGGTFDVSILAIDNGVFEVLATNGDTHLGGEDFDQRLMDHFVKVIRRKHGRDIAGDARALGKLRRECERAKRALSNQHQVRVEIESLFDGVDFSEPLSRARFEELNGDLFKKTMVPVRKAMADAGLGKGDIDEIVLVGGSTRIPKVQQLLKDYFGGKEPNRGVNPDEAVAYGAAVQASIISGHVDENTESMILLDVAPLTLGLETAGGVMTKLIPRNTVVPTKKTQVFTTYKDRQTTVTIQVFEGERSMTRDNRLLGKFDLTGIAPAPRGAPQIAVTFEVDANGILSVLAADKATGRSEKITISGDDRKISQEEIDRMVREAEEFADEDRRHREQVDARNSLEAYVYNVKSTLGGKMADAMEGEEKEKVEEAVREAHEWLDGNPDAGKEEYEEKLRELEDVCNPVMSAVYQRSGGGGGGAPEDGNVDDEDDHDEL

SEQ ID NO: 167068 - protein, 146 aa, Oryza sativa
  unsure (1)..(146): unsure at all Xaa locations
  Clone ID: PAT_MRT4530_65714C.1.pep
YSKIRITRIVFILVSLVLLXQGDTYGYKYKXPLGGEERRNNRSTYKPTYAKTSRRISTSEIGLVVPIRYLRYDYRQEDLVLSLISSGTDSRRKTTLLSTTGWFYGXPSRQQIDRLPQILYCLAYILVPTIPILCKYHSRDIKRRHH

SEQ ID NO: 167069 - protein, 131 aa, Oryza sativa
  unsure (1)..(131): unsure at all Xaa locations
  Clone ID: PAT_MRT4530_65715C.1.pep
PVSSWSTHKWESQVFNGELRRGQAGLLMXPQHLMPVVKKAQREGWCLTMCIARPMPNSXWVSHIRRKEFHAVPALPKWMVLANAYRISREEAQRLKHNRGDEFGAFTPXQYKSYQDVYNRQNPLSRLADKE

SEQ ID NO: 167070 - protein, 201 aa, Oryza sativa
  Clone ID: PAT_MRT4530_65716C.1.pep
MNDPSVCHRLRPSHPPVKIILTNKKNSPHPTRASTHIRRHRRPPPPSDQIWEGGELPPLPLSPGLPPAGSRRDGNCRHRCRPSLASLRSDLGGRGTVAAVAALPRSPSGWIWEGGGLSPPPLPPFPSLPPAESGREGKRRRRHLSPPSPLRPDLGERGGEPRRPRCLAVAAVDPTALSLSPPTPPPQRLAVVGFRRSHHRC

SEQ ID NO: 167071 - protein, 61 aa, Oryza sativa
  Clone ID: PAT_MRT4530_65717C.1.pep
YAWYPLAFFLSVVFHSSQCLLDSCDTLILTISSFKSCSYLNNKADSSLIFHSKPKDSRNQL

SEQ ID NO: 167072 - protein, 90 aa, Oryza sativa
  unsure (1)..(90): unsure at all Xaa locations
  Clone ID: PAT_MRT4530_65718C.1.pep
DEFHQXHQHLASVDFYLXKTSTTNGKLMGHSHGFDQRTLTKTTTTAASAMERRDVPPQFAAAVDGLHVLHLLAPKSATMARTDXXRRSSN

SEQ ID NO: 167073 - protein, 93 aa, Oryza sativa
  unsure (1)..(93): unsure at all Xaa locations
  Clone ID: PAT_MRT4530_65719C.1.pep
APPLRWNLPVLAPHEVKLAQLLLSERQSHCVXNHWPEPGVXDDDMNRNLFDQVCRLNSSYPGGLASLIQNARQLLADSMAGXNPYDGLSPYAP

SEQ ID NO: 167074 - protein, 436 aa, Oryza sativa
  Clone ID: PAT_MRT4530_6571C.1.pep
MVLGKSIRRSNGHASSSSSMLDGDDTSSACGGGMSIYYQKINQRVAVLEKAAVSVHESRASTREAALASLVGALEGFVPAHFIGWHLRGEIVRGCCASIKKGAAAKEARLALRAVALLAVTLGPGSKRRILPAETYNPLEPGPGSKKIMAETFPLVSRILEVSTDAPLVIAALESLAVVAFVDVAAENMDDTEACMKALWGLIRPSTGPKLAGAARKTSPHVLAAAVSAWTLVLTTTDGWKKKKAAASSPAAWRDTAAHLAPLLHSDSRAVRMAAGEALAVTIEMKLLTRDSHGALISGVAARASELANEAAGAGVGKANFVEQKELFKSIASFLAGGKAPASSVRASSSHHGRLTASTWTDIVRLNFLRRFLGGGFLPHLQGKVLMGEEAPLIGQVFVVKEDDMAMDHKKKVDKQRTLNRERPIASDLKHGSSHV

SEQ ID NO: 167075 - protein, 772 aa, Oryza sativa
  Clone ID: PAT_MRT4530_65720C.1.pep
MLGRRVVMLPSAAAALGLRRGRARMRLGCVLEHVAPRLAVASAALLGAGEVIAAAAAAGKSGGAGHAAVASTLAQLTVTAVAIASGACLSTKVDFLWPRIEQLPDTLIFEGVEVTGYPIFEDPKVQKAIVFASTAHIGQFRKTGDPYVTHCIHTGKILAALVPSTGERAINTVVAGILHDVIDDTAENLKSIEEQFGDDVASLVSGVSKLSYINQLLRRHRQKNTGGSTLTSEEYFSYALPIRKAEAVAQETLAVWCSLASRLGVWALKAELEDLCFAVLQDLLQAVLPFDLLLDRKRRSYFLNNLHGSSETSVPKPKIVDDAAVALASLAACEEELEQELLISTSYIPGMEVTLSSRLKSLYSMYCKMKRKHVGIKQIYDARALRVIIGDKNGALHGPAVKNCYSVLDIVNRLWTPIDGEFDDYIINPKGSGYQSLHTAVQASDNSPLEVQIRTQRMHEYAEYGLAAHWLYKESKVDYRSGTSNKIGQSTSYPSSSSEDENYIQDVMPSKYSSMKMGHPVLRIEGSQLLAAVIVSIDKGGKELLVAVSFGLEASEAVAERRSCFQLKRWETYARVYKKVSEKWWCAPGHGDWSTNLEKYTLCQDGIFHKQDQFGRLLPTFIQLIDLTEEEEEEYWMVVSAIFEGKEASSLTPDSSNTERSTSEPPSSTPLSDPINNKVHLLRTMLQWEEQVRRGASLVEKSLSVGTCTEPILREVAIICWPYGKIMRMSLGSTAADAARRMGVEGKLLWVNGQLVLPQTELKDGDIVEVRM

SEQ ID NO: 167076 - protein, 263 aa, Oryza sativa
  Clone ID: PAT_MRT4530_65721C.1.pep
MVSGVAHRPDDDGGRAASTFQRPPQPAGARPSLATPPPSGGAQSASTSGGSAGSPSSRSEQHVPAAAGMAAGAAAASTPISENTFLRLNDLDIHGDDAPSSQAPTSKKKKRGARAVGPDKGGRGLRQFSMKVCEKVESKGRTTYNEQQYDEKNIRRRVYDALNVLMAMEIISKDKKEIQWKGLPRTSINDIEDLQTELVGLKSRIEKKNTYLQELQDQFVGMQKLIQRNEQLYGSGNIPSGGVALPFILVQKVLTGRASSYLI

SEQ ID NO: 167077 - protein, 99 aa, Oryza sativa
  Clone ID: PAT_MRT4530_65722C.1.pep
QRNWLIFLEKIHFFMQNVITIMILAGMIFITHARIVLDVCMQLGYYLYLLLFFSFFLFFLFISFYLLFSYHIPFFLPLFFFILLYFSSTFFILLIIFFL

SEQ ID NO: 167078 - protein, 627 aa, Oryza sativa
  Clone ID: PAT_MRT4530_65723C.1.pep
MARDGSSSPAKLERDERAPVVSVGAAAYEGPDRISSLADALLHHILVFLPVVEAIRTCVLSRRWARVWTGLPRLRLDDGAAEAVGSFPALVDGVLRRYDARVNLRDLTVSAHVGEEEELGGLENDDVVSLVGAAARLVTGRFRLDVSRGINISEDYDEEANLLALPCFERATEIAISIADMAVQLAPDDHRGRTFAHLTKLHLSNTFVADEGELLSEVVSHGCPCLKTLELIDIHAGARELTIHTTSLLTLCVVSINDLQLLDVDAANLRWMKVKDCFDIDAAETEGSAMSLLTPAMEEFYWKDCCPEEVKLVREPAGFIHKIACVDSASTNLSFISGSQSFYTRILQLFSSTCTEVLQIEFPIKPYGSINALDYYKDRAQRMIIITKQESEEQKKFLHTVDLPYCLELELIVEKKEHTLAPTIVHLLKKSRWIKRFSLEICPKKNHIQCEPNCTCRQPPNWRDQEISLGSLEELSINGFGGTYDEKQLVLFIVENSKLLRKVQHACSPNCSCDWPPNWRDNKDISMRSLGEVEILNFGGKEHELDLLRVLVRVATVLRRIRITCHRSLSAWERLSAVIQSFARPEISVEHLTFWNAIFVSTEQCALVAWSELRTEVKCEHWCKEQS

SEQ ID NO: 167079 - protein, 219 aa, Oryza sativa
  unsure (1)..(219): unsure at all Xaa locations
  Clone ID: PAT_MRT4530_65724C.1.pep
LPPRDEARHDDDERARRRRLRDDGGERRGNDFGGDPWTKARHXPAQRLTTRSRGRRRLRGGGVRVEGRRGQGRPFRCNAGGGDGDVGQRTGTAEGAATNSSRPETVQWWQRHWTPAGTRLRWSPRETEGRPGERRRLRRRGWRRHSXTGARXGGGGGWRWPAAREREEGGGERRCGHGGAREEAKTRERTEGVPFYRRGEGSGHGXEGGTEAGMAAGGH

SEQ ID NO: 167080 - protein, 62 aa, Oryza sativa
  Clone ID: PAT_MRT4530_65725C.1.pep
KSTRDAPTKLHLLAATRSEVWVVSDCTQANPVQAHGGDEPHGEEPAPTAITHGAKKTTVLGP

SEQ ID NO: 167081 - protein, 340 aa, Oryza sativa
  unsure (1)..(340): unsure at all Xaa locations
  Clone ID: PAT_MRT4530_65726C.1.pep
SSVGLKRSEYDSCVYIKFVNGSRIYIXLLYIDDMLIAAKSKEEITTLKKLLSSEFDMKDLGATKKILGMEITRDRNSGLLFLSRQSYIKKVLQRFNMHDANTVCTPIAPYFKLSALQCASIDKEVEYMSRIPYSSAVDFFMYAMVCSCPDLSYAMSLVGRYMTNPGKKQWKAIXWSFRYLRDTANACLKFGRTDKGLIGYMDSDFAADLDKRRSLIGYAFTIGSXAMSWKATLKPVVAQSTTEIEYKAITEACKESVWLNGLFPELHGVDSCINLFCDGQSAIYLTKDQMFHERXKHIDIKYHYVRDVVAQGXRFDLCYKKEFVSRWSLLSFNPNSFAHV

SEQ ID NO: 167082 - protein, 303 aa, Oryza sativa
  Clone ID: PAT_MRT4530_65727C.1.pep
MGCSSSLPANNAGGVGTISNENSGTDLKNLRVKLVLLGDSGVGKSCIVLRFVRGQFDPTSKVTVGASFLSQTLALEDSTTVKFEIWMERDITSLPTKRVAVVTGGNKGIGLEVCRQLAADGITVVLTARDETRGVEAAEKLSGMGLSSVVFHQLEVNNAAVGGMEYVQGVDTNKEQVVNNEDLRKELDDVDNLTEERLDEVLDSFLKDFEAGALEAHGWPTAFAAYKTAKVAMNAYTRILARRHPELRVNCAHPGYVKTDMTIDSGFLTPEEGGRNVVTVALLPDGGPTGAFFAEGKEASFLG

SEQ ID NO: 167083 - protein, 152 aa, Oryza sativa
  Clone ID: PAT_MRT4530_65728C.1.pep
MARPWPLPSQPQRKMPRPLPARRDVHSHTHRGREALATAVAGRPATLYPRHTRVDRLRRPANQRSYEPMPLVDPIKRARTLDAGRPTSRRCAGNQPASLLPIRVSITTTTPPDVTDARILCANRRENERIRAELACSGRYRFLVSTKLTVIT

SEQ ID NO: 167084 - protein, 361 aa, Oryza sativa
  Clone ID: PAT_MRT4530_65729C.1.pep
MRRHGGPPCSTSSELPVIVIASSNQLDNVGYRGGHLIVASSYPADPTSFLARAEVVLAMQIDVTRRGSASNGDEMEPQRGRLEAFVHLLVRHIMEGATSSLPSQSARVAVVTGGNKEIGLEVCRQLAADGITVVLTARDETRGVEAAERLRGMGLSSVVFHQLEVNNAAVGGMEYAQGVDNNEEQGRETYDTAKNGVQTNYYGAKHVIQGLLPLLLSSSEGKIVNVSSALGLLRFLGNEDLRKELDDIDNLTEERLDEVLASFLKDFEAGELEAHGWPMGSAAYKVAKVAMNAYTRISARKHPALRINCAHPGYVKTDLTIDSGFLTPEEGGRNVVTVALLPDGGPTGAFFAEGKEASFLG

SEQ ID NO: 167085 - protein, 628 aa, Oryza sativa
  Clone ID: PAT_MRT4530_6572C.1.pep
MTATYFVLPRRDNGDGDPILSRHSSSSDDPILARIDEERGLNLLSGNLYGAILDSLVPHAHGPFLAPRQQHPKFCKIDTMVEEMQMDLRTLHRYGGDGDDDGHGDGEDEDDVLDLDHIELCSFMEQIKSAVQLVRAALQEKVMRMTTNTRGGEDDDGGGDEAFPSGSGHLKSVLESLDPQLKQCALCLAVFPSGKAIKRRLLIHWWIGEGIVRSAAAGKACFQDLLSRGLLQPAMLRPHCHTAHYCRVHPSVRDLLVAAARSFSYFAFDRDGEPTDECLPGTTRRVTLCRTRGSSRHGGGGGEYVTVYNLSQRYLEMDEAWLGEQRGMGTLQLGRWQTSPEHHVEMVRPDGVLGAAAAAACRNLRYLSLRGISLVESLPESIGDLRDLVVLDLRACHNLETLPASMASLGKLEYLDASECYLLDQMPHGVCKLHRLQVLKGFVVASAAGGKKIPPCRLADLAALPLLRKLSVSTGRQLPVAPDDELPRLHGFAALESLSVRWGAAAAHAGGGGRMDLSLLPRLAKLDLRRVPAEELQEVVHPARGGGLRKLCVRGGRLRAFGDDVTWDVVETLRVRFLERLDCEWRQLRSTFGKLRFVDKRRCPKLSSWRCDAQGIWRREEDDGGDRN

SEQ ID NO: 167086 - protein, 308 aa, Oryza sativa
  Clone ID: PAT_MRT4530_65730C.1.pep
MEGDISSLPTKRVAVVTGGNKGIGLEVCRQLAADGITVVLTARDETRGVEAAEKLSGMGLSSVVFHHLEVTDSSSVARLADFLKTRFGKLDILVNNAAVGGMEYVQGVDTNKEQFVSMDKKQRLAWLNKQGRETYDAAKNGVQTNYYGTKIVIQALLPLLLQSSGEGRIVNVSSDFGLLRVVNNEDLRKELDDVDNLTEERLDEVLDSFLKDFEAGALEAHGWPTAPFVAYKMAKVAMNAYTRILARRHPELRVNCVHPGYVKTDMTINSGFLTPEEGGRNVVTVALLPDGGPTGAYFDEGREASFLE

SEQ ID NO: 167087 - protein, 49 aa, Oryza sativa
  Clone ID: PAT_MRT4530_65731C.1.pep
MGAKVAQVWLCRRGKVAVQVASTQESWRGNMKRLHGEIRGALGEDTVEG

SEQ ID NO: 167088 - protein, 92 aa, Oryza sativa
  Clone ID: PAT_MRT4530_65732C.1.pep
CMLITLFITNDLGTLQDPPNSVLTESIRFFSATKIDAKQRRRREAGTTPSGWMDTDRKTEGVPRYAAYAHRSEDEMPGSTDGHGVHLTFMLS

SEQ ID NO: 167089 - protein, 48 aa, Oryza sativa
  Clone ID: PAT_MRT4530_65733C.1.pep
HEAVFCKRGDNNPVGGGSEAVPRRWKNWHRNILSRTSLLISCYSLLGC

SEQ ID NO: 167090 - protein, 64 aa, Oryza sativa
  Clone ID: PAT_MRT4530_65734C.1.pep
TKTATSAACSLSQLVPFLHVSVIAELFDNLMGNYSKQLFKYSNSYCKQFICHSNSYENNEDMFP

SEQ ID NO: 167091 - protein, 528 aa, Oryza sativa
  Clone ID: PAT_MRT4530_65735C.1.pep
MSGAPLPSSPLPPILSLSLCVCACSCFLRDGGRMRRRCEGGSARDVHREELGASMGEPSVARSKDCDMEYDDSSSRQSGEPLWEHAEGVERSVDYSDGLPPTSKGLSLKAATDPFFKSAFSRATSMPGFTAEEDEHQDDQPSLVTQMFFSIGLSPTITRNPYYRGSFAMVALFQIPGYVPPGVDQLKTTLLQKERADIENMLQTIKNTWRKAGVTIVSDGWSDFKRRPIINIIAVNEAGPVFLQAINNEDGWMWMMDDYIAEKLIAAIEDVGSENVVQVITDNDPFCRAAGVLIEQKYSHIQWTPSVAHSLSLALENICAAKNAENVVFKDCHWISEVIGDAKMINDFISNHSMRRCYADSWIDEGANRQPPHSDAEINEMANDCLKKLFPAADDLTAIKAEYAKFSLLSTEFASSGTGCFNLNSITDRDVLDPKTWWVTHGSPTPKLQELALTILGHPASASCFCGFGQEPQFYYSDPESMFWDIGGNADILASLVPADLLEFADFSLDEPEFELAILEGLEGDDLA

SEQ ID NO: 167092 - protein, 81 aa, Oryza sativa
  Clone ID: PAT_MRT4530_65736C.1.pep
GGSPFFQSQSILLSLNEVLNDLHKHWVHLLELHIQHLAQVRAPCQRVLQVHGERIHLIKWVWLQFYVQKALHRLLSSWETT

SEQ ID NO: 167093 - protein, 975 aa, Oryza sativa
  Clone ID: PAT_MRT4530_65737C.1.pep
MARFFRDSTSSSRSSSDLAAGADAFASAATTAASSRTPPLPSPFPDLGVPLSAAELRATAYEVLVAASRATGAKPLTYITQSAASAASAAAPAPSLSSSIHRSLASTAAASSSKVKKALGLRRSSASSSSKRRGARRPATVAELVRVQLGVTEQADARIRRALLRIAAGQLGKHAESLVLPLEFLQQFKASDFLDPHEYEAWQLRYLKLLEAGLLFHPLVPLKKSDISALRLRQVIHGAYDKPVETEKNSKLLVELCSAARALAGRSLIETFDECHWADGFPLNLHIYQMLIEACFDSEDGAVVDEIDEVVEMLTKTWPILGINQMFHNLCFAWALFNHFVMSGQADIELLSGAGIQLTEVVKDAKTTKDPDYCDVLISTINSIMGWTEKRLLAYHETFSASNIDSMQGIVSIGVSTAKILAEDISHEYHRKRKQETDVVVHSKIETYIRSSLRTAFAQKMEEADSKRSSRHPVPVLSILAKAIGDLATKEKTVYSPVLKKWHPLATSVAVATLHSCFGNEIKQFIAGLTDLTPDAAQVLKAADKLEKDLVNIAVEDSVNIDDDGKLLIREMLPYEAENVMANLVKAWVKERVDRLKGWIDKNLQHETWNPKANGENFAPSSMKMMQIIDDTLQAFFQFPLTMHSTLHSDLATGLDRNIQYYVSKSKAGCGTQSTLIPQLPHLTRCDVGSKLFMKKEKPQVLMKRGSQVGSTTNGASVIPELCVRINTLYHVQTELESLEKKIKTYFRNVESIDRSTDELNIHFKLSQSACQEGIRQLCETFAYKVIYNDLSHVLLDSLYAGDTASNRVEPLLRELDPILRMVSGILHNGVRNRVITSLMKGSFDGFLLVLLAGGPTRAFTLQDSQMIENDFRALRSLYIANGRGLPEELVDKASSEVKNILPLLRTDTGTLIERFKQAISESCGSTAKSGFPMPPVPAHWSPSNPNTILRVLCYRNDEAATKFLKKAYNLPKKL

SEQ ID NO: 167094 - protein, 162 aa, Oryza sativa
  Clone ID: PAT_MRT4530_65738C.1.pep
MAFVTLLVSVVVVALVLCLCCNRSSRVHDFDPAHRGGDGLDERPPVYMVKQFSTTGKRSASWLGKRTGSSLRGHRRAASAAKADELGGGAGDLVIVNNCKGVFGLTDLMKAAAEVIGSGGHGSAYKAVMANGVAVVVKRARDMNRATKDAFEAEMKRLGAIS

SEQ ID NO: 167095 - protein, 116 aa, Oryza sativa
  Clone ID: PAT_MRT4530_65739C.1.pep
MTATSVRRPAVRLRSSPAVARLRPTTSSDTSASQQRRKPCRVMEYSYYGNYLSGGGANMAKEKRPPLKRGQVKRRIVRSISNLMANNAAADDDSNSAQAADHRNSFIRREASYNNN

SEQ ID NO: 167096 - protein, 131 aa, Oryza sativa
  unsure (1)..(131): unsure at all Xaa locations
  Clone ID: PAT_MRT4530_6573C.1.pep
IENHLAKHNPTQHNQPEEPLQSSCHHQSRLFYILIKDELHQAASYENMCVYYNQDHLRSSALLGIWRSQPLSPYSAQVTSRGCRGENXTPTPTRTLGFGHRRRLLLPPAAETHAGCQRGRRAGRGSHGHIP

SEQ ID NO: 167097 - protein, 83 aa, Oryza sativa
  Clone ID: PAT_MRT4530_65740C.1.pep
MAFVTLLVSAVVVALVLCLCCNRSSRVRDFDLAHAVVAATVSTTGKRSASWLGKRTGSSLRGHRRAAGGKGGERHVGPTWVPR

SEQ ID NO: 167098 - protein, 234 aa, Oryza sativa
  unsure (1)..(234): unsure at all Xaa locations
  Clone ID: PAT_MRT4530_65741C.1.pep
ADVIHGRPARVSKLAGDRTVGRGFGGHLRVEDDETNPMVLTTTANDERRRPATRKTAAAARVNGDGGAPVVGGEGGRAAEVLLTTAHLTATRKGGGDGGIDGATTPEDGRRRRRLGARCGDATGHXRARDRGQTKEDDEVVLFIALDXRDRTPNERNRLGKNPNSVLGIKSKRTRFGXNPQRFAPKLGGKDRGEREDQNPSINRTQGGRIEADLEGEGGGSGGLSRRLEVRDGS

SEQ ID NO: 167099 - protein, 134 aa, Oryza sativa
  Clone ID: PAT_MRT4530_65742C.1.pep
AGPYFFLRRGPWPPLSQVVRASPPPPPGDFCPTIKNFGAPRKPPPLFIRGFLPKNFCGSPGGKKNTGSGAPPERGGFSFLSPPFIKPGKFLEFWGPVPLLGFVFFPLKKFWDPVKYPLYFLLTGVPQKMRFLLG

SEQ ID NO: 167100 - protein, 504 aa, Oryza sativa
  Clone ID: PAT_MRT4530_65743C.1.pep
MGQLDALSVVRADQVHFDSLKYRGDDVGSPPLSETSGDQLRTGYTSSNAMPRNTATFTRDLWRSSSSTLHTIQSASRASTSIPYRLHRFFTDVVESSLSMQLDIGGAGRLSMPLLMSFHFGRVGLDVFSSTSTFVAANSDLSQKRCESIIYSKTIIAKLSRLRTSVRVAVVLYNNYKPLTASRHASRAHCNIACLPDFRLARHPHTHLNWTPCVPLDRYDSGSLSQPANQPAAVAPNTADFHCATTYRWQLGTRNAARITVLIASDYCFRCHQQRPNTVDYSLNVDTPLIMDSKLASYMMHAYSFGPGLNLSKAQPLQLATAALLRTIKLHLYDHPISFSQLALESAVIVVLWILWTVQIGFDWSSILLTLVNAEHASSNCQKVPYGCASSTADTELQAGWSLELVAFFEISDKNSLPELLATSAAIHNTSNGYPTPLNFRPTLSTPKVGYQNNVKFAQRHSKIFFKQHASTVKLLWQLEGIQIRLTVHAHPVMKSLPPGAETR

SEQ ID NO: 167101 - protein, 89 aa, Oryza sativa
  Clone ID: PAT_MRT4530_65744C.1.pep
QNPPGLNASQIRQHTTESFRFRYYCFFCVVTIHSRQFCFSQSSAHTLSHSSHLLTSIRPLVSPRIRVYILSILGDKHNYPHPTETDTWI

SEQ ID NO: 167102 - protein, 916 aa, Oryza sativa
  unsure (1)..(916): unsure at all Xaa locations
  Clone ID: PAT_MRT4530_65745C.1.pep
EYREFQEAVPHSPVAALPRTAAPALAVATQGAEPQLLLDDDKNVDETSQGGSXMLRIVLTHSGATLAIIMVPGESAVIVYQXGSLHLEDVESEEQPGHQNPKSQDSCAERSLSSSNYIDQERRLSALNIDESRLVGMADKTEEVTKLLDEGHVPNLKVVSVVGFGGLGKTTLAMTVYKSPAVKGIQSRAFVAVSQNYDPRALLESLLKQLIQRPFLREPRSVDEETSTEDPLKGIETWDICQLINRCRNYLENKSMEPLPSEESRHLFFKRVFKLDKCPSQYQDLVDISDAILRKCNGLPLAIVSIGGMLARMKNKTYAEWQKVCDRLDCGLEINNTVGGMRKILSLGYNDLPYHLKACFLYLSVFPEDFEIKRGPLIRRWAAEGFIGRVRGSNLEEIADKYFDEFISRNIVTPIRIDSSGEVRSCRVHDIMLEVISAISVQENFISLLGNYSYSITGHDKIRRLSIHVGGGKEQDFSCRNLSHLRSLTILGCKEKPIPIALADLTLLRVLDLEGCGWLSDSDLKDICKLYLLRYVSLRSTNISKLPRAVGNLKELLTLDVRSTYIRELPATITQLRCLKHLLAGRYKYYTRTHHVKHFASKEAVTIPAGLKNMSALQSIAPVNISSSFRAMHELGELSQLTKLCAINRKGVEKWRPFATSLSKLSNSLRHLSVIHIDKMEHGLEFLMDLSSPPLFLKKLYFWGRVSALPPWISSLSNLVRLSLRENYLESELVKILGKLHSLLSLKLYVNSYLGTELCFEHNLFPRLKQLMIDNLKNLDELSFKGGAPDLERLTLAFVKAPERGISGIENLPKLKEVEFFGIIVDSVVEGVIAAAKIHPNHPRVYRDETIDPRSLTTACRSQEYIQSPARQAVQGQRLSNNAKESTVVTSKEDGRSLAKAGRKAGVTGCTGREGY

SEQ ID NO: 167103 - protein, 434 aa, Oryza sativa
  Clone ID: PAT_MRT4530_65746C.1.pep
MKAERNNTVLFEIKFGRYNFNGVVIGLVVGTGVLALSLVLTILLRRWKRGIQKKIRRAYFRKNKGLVLERLISSDESVAHSTKIFSLEELERAPDHFNSTRILGRGGHGIVYKGILSDQRVVAIKRSKIVEQGEIDQFVNEVAILSQIIHRNVVKLFGCCFESEVPLLVYEFISNGTLYDILHGDMSTECSLKWDDRVRISLETASALAYLHCAASIPIFHKDVKSANILLNDNFTTKVSDFGASRSISIDETHVVTIVQGTFGYLDPEYYHTGQLTAKSDVYSFGVILVELLTRKKPIFLNCSGEKQNLCHYFLQSLRDKTTTDMLDSQVVEEGNLGEIDEFVSLAEACLRLRGEDRPTMKEVESRLQLLRANITKKIQDESQKNVEAMQLFPSVYDSTSFTQNVDIGMDADSLTQLASTCHTMEQELVSLTR

SEQ ID NO: 167104 - protein, 290 aa, Oryza sativa
  Clone ID: PAT_MRT4530_65747C.1.pep
MAGKEIYHKMKDKVKDAFSSSGPETGKGKTKLSGKRVKHGYHLVKGKSNHPMEDYLVAEYRQEGEHDLGLFAIFDGHLGHTVPDFLRSHLFDNILKQPEFLSNPQAAIRNAYQLTDAKILESAAELGRGGSTAVTAILISSENSVNLVVANVGDSRAVISKSGVAKQLSVDHEPNKERHSIEKKGGFVSNLPGDVPRVDGQLAVARAFGDRSLKKHLSSEPDVVEEPIDENTDFLILASDGLWKVMSNQEAVDEIKDFKDAQAAAKHLTEQAVNRKSKDDISCIVVKFLC

SEQ ID NO: 167105 - protein, 73 aa, Oryza sativa
  Clone ID: PAT_MRT4530_65748C.1.pep
SSEPDVVEEPIDENTDFLILASDGLWKVMSNQEAVDEIKDFKDAQAAAKHLTEQAVNRKSKDDISCIVVKFLC

SEQ ID NO: 167106 - protein, 77 aa, Oryza sativa
  Clone ID: PAT_MRT4530_65749C.1.pep
MIFPRNKINTTPLEYSRVKCYNGISVRLWMNSVTIIYQKYFCAITGNYISSHDVKKYRHPPILVLAYGSNMWPASDT

SEQ ID NO: 167107 - protein, 124 aa, Oryza sativa
  Clone ID: PAT_MRT4530_6574C.1.pep
MERMDNSLRGEDGAADEQHSSSAMTKKRIPQHVGRRRLPPPPLSLPASYRRTLLSSSPLPPDLAEGRAPPKTLSPLLPPQHAIAAAYLLSPHVAAVASPPIGFGGGGGAASHCRLSSHCRCCCD

SEQ ID NO: 167108 - protein, 58 aa, Oryza sativa
  Clone ID: PAT_MRT4530_65750C.1.pep
MATFRPGNDVETIFRSAAVNSEIWIVMQEFFNMCPRHRNNLRRILKRKLLSGGWLFRE

SEQ ID NO: 167109 - protein, 720 aa, Oryza sativa
  Clone ID: PAT_MRT4530_65751C.1.pep
MPSSLKSLLPGGKDDKRRTLMHQVSTLGERVSELENKNAQLLDEKGKVEKQLEETKQEAQVISRQKEEVESSLKGQNEMLGLKVLNVEEKYNHMVEKLQMELCALVKEKEKMMMESEDLKRRLEEIQAKKDLMESEKDMLRSEAMITKQKQIMFEAEIERLNMELVVLTEAKKAAAKACEAQNDEIMKELEDLKRKFEELQTNKDLVQAKNDELLSNVLAIKEKYGQSEAEVKKLQMELSALVMEKEVAVKTFDDEKDKMMMESADLKRRLEEIQANKDLVESENDRLRSEALITKQKQIMFEAKIETLNMELVALTEAKEAAAKACEAQNDEITKELEDLKRKFEELQTNKDLVEGENDKLQSEVLAIEEKYGQSEAKVKWLNQILRVVVEAKDAAAKACEAEKVEILKESGNLKRRVEEILVNKDLVESENDVLRSDILTLKQKYNQFEVEVKSLKNELEAFEEEKEVTAKAFNVEKTEILKELEDLKMKVLEIQAKKDLVESENNVLQLDIVTTKQKYNQFEVEIKSLKNELKALEEEKEVTAKAFNVEKAEILKELEDLKRKVQEIQANKYLVEGENDKLRLDVSTAEQKESISEAEVKRLWKILDALMEAKEVTTKAFDAEKEKIMKELEDLKRKVEEIQASKDLAESEKDKLRMVEEIQVGKKAAEKAVHDKDAEAHRLRDELVKIRVSLSELQASYNELDAKYPCLNDEKNSV

SEQ ID NO: 167110 - protein, 69 aa, Oryza sativa
  Clone ID: PAT_MRT4530_65752C.1.pep
EREGSHISQVKTYANARSVSPPCREETQVFRAHAHVECSALMRIASHREQARSPSRTPGEKSHRFPFTS

SEQ ID NO: 167111 - protein, 68 aa, Oryza sativa
  Clone ID: PAT_MRT4530_65753C.1.pep
HKQFHFNFYTNKNFSYNIHIYWHLTTHTRTIHQRLHTHHSKLNILYFTRLSVTFYSHYFLPILIFWIH

SEQ ID NO: 167112 - protein, 361 aa, Oryza sativa
  Clone ID: PAT_MRT4530_65754C.1.pep
MAAAVLAVLWACMMMMSLAPASLAASGFEEVPTIAFDEGFSPLFGEDNMVKSADGRTVSITLNRYTGSGFISSDYYHHGFFSASIKLPKDHTAGVVVAFYLSNGDVFEKTHDELDFEFLGNRYRHEWKMQTNVYGNGSTDRGREERYLMPFDPTADAHRFSILWHSRLIVFYVDGVPIREVPRTAAMGADYPSKPMALYVTIWDGSTWATDNGKYKVNYKRGPFTAVFSDLVLRGCTARSDIRLATTADDQDRCAAAEEDLMESDEYSSTMAMTARKRMAMRRFRQRQMLYTVCYDTNRYPEPFPECDVNMAERQMYWQWGESKVVRPRVRPRPGRRSKRRPSPEATAIPPPVLVSLQQAD

SEQ ID NO: 167113 - protein, 96 aa, Oryza sativa
  unsure (1)..(96): unsure at all Xaa locations
  Clone ID: PAT_MRT4530_65755C.1.pep
MPXLFANRSXCWXRXREGDVALLDARRCKALRPGWSKAWYREGAALSLLKNYSRSGGGFXTEALKLDPENYEIKIALREALECRKRAARSEEDKNP

SEQ ID NO: 167114 - protein, 141 aa, Oryza sativa
  Clone ID: PAT_MRT4530_65756C.1.pep
MEESRPDGGGDTGRIRRSFDKIGYRRKKGGREVAPTGSGLGRLLEKKPLGNPAVSAAATPPGDRRTAPLSATLSPAPPVLLRPATARNPAVPSPDDRTSPLLVLLIGRIEEMMRGRIEERKINTGLLKFGEVSLLVLVTVL

SEQ ID NO: 167115 - protein, 137 aa, Oryza sativa
  Clone ID: PAT_MRT4530_65757C.1.pep
PARRLLLSPVCRREGPYLCAAFSKSVASDPPALSMAGRHTIILMQPSQNRASRTFMDYNSINHALDGLCGLYERKIRDINPMVPNITYDITDLYNFIDGLADISALVYDHSIQAFLPYDRQWIKQKLFQHLKKLAQR

SEQ ID NO: 167116 - protein, 195 aa, Oryza sativa
  Clone ID: PAT_MRT4530_65758C.1.pep
MDELFLAGSGREGGEREAAGGGPVEGETECSGGEDEWSTRMAEAEVVVDDWKFAADQLVRWSDRARVLADRVPSTAKQLTRDHTVFHREGFLMKMANPTPPVDATPLCSTSHYGPSLIRFPQTSKLDMKDPSTIEMQRDTLNLWNIKAMYITITMDIKEKQVRHVKHNIFPHGTQQHHLARPCTTDLSSRPSCHC

SEQ ID NO: 167117 - protein, 75 aa, Oryza sativa
  Clone ID: PAT_MRT4530_65759C.1.pep
MASEWSKEENKLFEQAIAYYGEGAPDLWHKVSRAMGGTKTADEVRLHFEILVDDIKLIEARRVPFPKYNTQGAWN

SEQ ID NO: 167118 - protein, 144 aa, Oryza sativa
  Clone ID: PAT_MRT4530_65760C.1.pep
MTNGTKGVRRTSTHIRRRAACPVPSDRDDEGFSQPLIITARVGYPQSGPYPYPPPSGAVYPPQGYPSSHGVYPPPQGPYPPPHQPPPPGYQGYFNQGQQPYYPPPPLPYDHCHHHCGDEGSGAGFLKGCLAALCCCCLLEECCF

SEQ ID NO: 167119 - protein, 106 aa, Oryza sativa
  Clone ID: PAT_MRT4530_65761C.1.pep
MGGRKPVGPKNRGPWPARRWAPETQPWGPPRRVGPDHRNPGPPTPAGAPTPPGPPRRRRPTGARTPPGPAHGRPDAAATARHFRARPNVTEREEQKTSASSLKPKW

SEQ ID NO: 167120 - protein, 453 aa, Oryza sativa
  Clone ID: PAT_MRT4530_65762C.1.pep
MDDDGDAVLSDVDEEDPLPPPPPPSTYFYQKSPSPSQPQPQPHAQAQRLHDLAAELEEERRLRRKAEESLAEAEKRSERVKALAQNVLRKHDDLKTEASTASSMLTSGFERISAKASPSAAASPAPLPTSQKYSSGLPAIAYGVLKRANDIVDDLLSQIDAANRDRDRAREQMEHRNYQIAIEVSELEASLASRSAHCDSLSKSLSDKDAEISDLRNNLAFLETKLDAQRPVLADQIACASKVYDEIREVVKLVDADAASALSDSVFVWKETDVEESLKVSLEGTKMAYDLATTALHKVGAWVDKKESKVRDLEARVDELLREKEHIGVLLRSALQSNTSEVLKVAEDGLREAGIEVGLKERREHRPGSMEKDEVYTLVHGPLNTAGELENSMKESQVKIVELQHLVEALRAESGLLRTRLEGQEKEIAQLRKQIKHLEEKERVANESVIFYY

SEQ ID NO: 167121 - protein, 109 aa, Oryza sativa
  Clone ID: PAT_MRT4530_65763C.1.pep
CDDDVDVSVILKVVQEVATQNGAACSGSHFLPRLAAAAAATSASTHRPPRTYLATPPYSSSGVASSPASCSSSFFVTMAAASSASCLISCFSFWWHSAALLQPAQGPSC

SEQ ID NO: 167122 - protein, 380 aa, Oryza sativa
  Clone ID: PAT_MRT4530_65764C.1.pep
MESLIRRHGGRRAVSPSSSAAAASFILLLCAVVLLNTHVALCGCYKRIFSFGDSIIDTGNFVYLTGNGPSQFKELPYGMTYFNRPSGRICDGRVLVDFYAQALNLSLLPPSIPEEGSGQFENGANFAVLASTALGPDYFKTKYNFSLPVPYCLDNQLASFKKVLGRIAPGVDATKSLLGESLIVMGEIGGNDYNFWFTARQPRETARQYLPDVIGRIGAAVQEVINLGAKTVLVPGNFPFGCAPEYLQGFQSSNTSDYDATGCIAWFNDFSRQHNQALVQEVARLRSQNPGVRLIYADYYGAALEFFKNPKNYGIGDPLLECCGGDGPYHTGMTCNKTAKVWGSPANFASWDGVHMTEKAYSIIADGVLSKRYADAPLLC

SEQ ID NO: 167123 - protein, 152 aa, Oryza sativa
  Clone ID: PAT_MRT4530_65765C.1.pep
MHLARQWLCPPPRHRRHPPLLSRLRKFSINSVDALWRHFRAGEAAASQLPREKVAEPVGLFTFLLSSTMEALPIFMQEQEILAKEISLGIYSMTSSTVVFLPFQLALTVEFTVVVYWMAGLRSKTFGYFVVLVWLMLYKVNSEGIAVKRYVG

SEQ ID NO: 167124 - protein, 55 aa, Oryza sativa
  Clone ID: PAT_MRT4530_65766C.1.pep
RIFIHQMEASDLKHTSSSLLASSFVYLMKGMQSFWTCLKLVSCPMESILKCLSNL

SEQ ID NO: 167125 - protein, 117 aa, Oryza sativa
  Clone ID: PAT_MRT4530_65767C.1.pep
SLQPNTSLVPSSVGSSSLQVRLCSHGQQTAYAGRRLAAPCPVFDGDCHWASRYPAHGTAAATVARGRGGIDLACPASCVLCQCHSERSAARAPTASASASAPRATGGWTTRARDGRT

SEQ ID NO: 167126 - protein, 183 aa, Oryza sativa
  unsure (1)..(183): unsure at all Xaa locations
  Clone ID: PAT_MRT4530_65768C.1.pep
CSASPPPPMPPPPTTPICAASAFLSPPPPPPPRPPSPPRTTSSPPAASPATRRSRRPRRSPTSGPPPTRTPCSPSSPASASPAPTSPPSSPPTRTSSAPGPPAPPPISPPPXGPQPPPPPPPXPPPPDPPPRPPSPTSGRPPSPTPCSPSSPASASPAPTSPPSSPPTPTCSGSSGTCANQIQ

SEQ ID NO: 167127 - protein, 147 aa, Oryza sativa
  unsure (1)..(147): unsure at all Xaa locations
  Clone ID: PAT_MRT4530_65769C.1.pep
QCNILILICHFIKAIPRTIWLDGDGKRLLQWPTKKVESLRKNEVSLQGLKLKKGDLFEIKGTDTLQASSNLPQQKFYVFFCKHCSXIWHTIFLKQADVEIDFELTSIDAADPFXDPSWLLDTEKHCRKAEASLHGGLGPFGLDVLAS

SEQ ID NO: 167128 - protein, 359 aa, Oryza sativa
  Clone ID: PAT_MRT4530_6576C.1.pep
MDGGGVDGYGMEMVRNRKVVLRRYVTAGYPTVDDMEVVSSTMMPRVPLGTMAPAVMVKNIYLSCDPWMRGRMTKHDDATAEIAEDFVLGEAMVNFGVSKVVDSTHPVFAAGDLVWGLCGWEEYSLITQPETLHKINHPDLPLSYYTGVLGVTGLTAYAAFFEVGKPKKGETVFVSAASGAVGQIVGQLAKIAGCYVVGSAGSDEKVTLLKTKFGFHDAFNYKKEGNDLTGALRRCFPDGIDIYFDNVGGATLDAALVNMRRGGRVVVCGMISQYNLQEPEGMHNVIQILSKTIRVEGFAVFNHFGLYPRFEDEMARYLKEGKVTVLQDVVKGIEKASEALIGMFSGRNVGKLLVAVADE

SEQ ID NO: 167129 - protein, 929 aa, Oryza sativa
  Clone ID: PAT_MRT4530_65770C.1.pep
MAYTTKPAFTSPTLALSQTSPENTSPPDCDGGGGGNAGVVGLPSSGEAPSIPLRPRAVETELVDVDLRLFGGKSLPDRAAAAATGRRLSYLHGPIVLQVVSVRDIYRSIIDASFKNPQQHRLLRFVLTDGISEAVAIEFFPIPFIIEDIAPGTKICLENKIPIHNGILCLSAKNISIMGGVVQSLYEEWQMNQKFSGLSRSSLRLSQNDDGVGPPPFEKLDVEARPSRTSRSQTYSADNKARKPEVGRQNVSVSSSGKPVNESSSDENKESAVEPKQSISDGRPKEVSEAIPVQNQATAQKLLQKMTQAAPEDRYGRGHRFKGKGRQEDTPVFTLDEWEKRKSAGLKSTAQSYIDDTSRDEELARQLQEQLDLEDSYVAVLKKREAGEEIFEGEDGGEEGAEDEGEGEAGEDFSPIQTSNGSGNSSCDLTLISSLLPPLHLHLRDSGEPTAAGSPAILPKHLVGRQFLHRSTRLRLEAEKGFVSFAGVSSSSSVCRLHWLGVGGGEEEIHIRSVREWFDRFLFGVLRCCARSGLVRWRSPAMDHGGGGGGGVWIRAAVAVAAGGAIAARAVRRKSVDSTAVFVGVPAMVAHTVAGYRFAGMLLVFFFTASRMTRVGEKRKRALDPDFKEGGQRNWKQVLSNSGIASVLVVLIALVTGGSDRCLDTRESSLVTALIGGVIGHYACCNGDTWSSELGILSKAEPRIITTFKRVRKGTNGGVTIDGLLAAAAAGFSIGLTFVLLGFLTTQCSSDVFWRQLLVIPLATAAGLCGSLIDSLLGATLQYSGYCSLRKKVVGVDGPTVTRISGRNILDNNGVNVVSVFLTTLITALARSAAAEAFEAALAGLVAAEAAAEGEQAATKRERDHRLEEHDRRRGSPCIEAAFVLMALLDMVGVGHLLRRRRVVHRRPCRGRRRRSRRRRRGGRNQQGG

SEQ ID NO: 167130 - protein, 165 aa, Oryza sativa
  Clone ID: PAT_MRT4530_65771C.1.pep
RWLWRRKRRGRGRGSHQERLGESLSARGWCFRDPSNEIIQELLHASPSPSPEAVETELVDVDLRLFGGKSLPDRAAAVATGRRLSYLHGPIVLQVVSVRDIYRSIIDASFKNPQQHRLLRFVLTDGISEAVAIEFFPIPFIIEDIAPGTKICLENKIPIHNGILG

SEQ ID NO: 167131 - protein, 2632 aa, Oryza sativa
  Clone ID: PAT_MRT4530_65772C.1.pep
MDFASRHAASAPPPAPDASSPSSPRASSASSSSSAAAEEPEYLARYFVVKHSWRGRYRRILCIASSGLVTLDPATLAVTNSYDASYGFDRAAPEGNATEFTLTLRTDARGKFKALRFSSPLRAGILTELHRLRPVHPVLDFPVLHLRRRTHEWAPFKLKVTSVGIELLEGHSGDLRWCLDFRDMDSPAIILLGDSYGKRTAEGGGFVLCPLYGRKSKAFMAASGSTNTLIISYLTKTANSMVGVSLHVDNSQSMTATDFIAKRANEAVGAAETRHGEWSVTRLRPAAHGTASIESLSLGIGPRGGLGDHGDSVSRQLVLTNTSLVERRPENYEVDVGFFSPVLIQTIRKISITYEHASTFYTPCQINLLVIVVSRDEAHGPWAIIVRPLSTVSALVRFAEEPQMFAFEFNDGCPIHVYASTSRDSLLATVLDVLQNQSQCAIPVLPRLTMPGHRIDPPCGVARVHISHHTVDMEAASMHIKHLATVAKEAVVSSDTVPGAKIRLWRRIREFNACIPYTGVPVNIEVPEVVLMALISLLPATPQNLPADAPPLPPPSPKAAATIMGFVACLRRLLTSRSVSAHVMAFPVAVGRIMGLLRNGSEGVAAEAAGLVAMLIGGGPGDTSMLTDTRGESHATYMHAKSVLFSQPVYVPILVNRLRPLSVSPLLSLSIVEVLEAMLCEPHGETTQHATFVELLRQVAGLRRRLFALFAHPAESVRETVSVIMRTIAEEDAIAAESMRDAALKDGALLRHLLNAFFYPAGERRDVSRQLVALWADSYQPALDLLSRILPPGLVAYLHTRSDEDSQNQYDEVPLSRRQKRILQQRRSRGGKSMAVPEQGMPSNNNEGDFFGHTNVGPFGADVHQRHANQYPTAYTPSPGISIDPSQAVPHGFVPEAFYENNHQTGAPQLDSHAYLVDSNGNGDLANSAHLDFSVPAQVVVENTPVGSGRLLCNWYGFWRAFSLDHNRADLIWNERTRQELREALQAEVHSLDVEKERTDDIVPGSSVTEDASDSETLPRISWNYVEFSVSYPSLSKEVCVGQYYLRLLLESGSNYRAQDFPLRDPVAFFRALYHRFLCDADIGLTVDGAVPDELGSSDDWCDLGRLDGFGGGGGSSVRELCSRAMAIVYEQHNKVIGPFDGTAHITVLLDRTDDRALRHRLLLLLKALMNDLSNVEVCVLVGGCVLAVDMLTVAHEASERTAIPLQSNLIAATAFMEPLKEWMYIDKDGKQVGPLEKDAIRRLWSKKSIDWTTKCWASGMSDWKRLRDIRELRWALAVKVPVLTPSQIGDAALSILHSMASAHSDLDDAGEIVTPTPRVKRILSSPRCLPHVAQAMLTGEPSIVEAAASLLKAIVTRNPKAMIRLYSTGAFYFALAYPGSNLLSIAQLFSATHTHQAFHGGEEAAVSSSLPLAKRSVLGGLLPESLLYVLERSGPSAFAAAMVSDSDTPEIIWTHKMRAEHLIRQVLQHLGDFPQKLAQHCHSLYDYAPMPPVTYPNLKDEMWCHRYYLRNLCDEIRFPNWPIVEHVEFLQSLLAMWREELTRRPMDLSEEDACKILEISLDDLVLGENGSSKQSSELSSGNLTNNIENIDEEKLKRQYRKLAIKYHPDKNPEGREKFVAVQKAYERLQASMQGLQGPQVWRLLLLLRAQCILYKRYGHVLEPFKYAGYPMLLNAVTVDKDDSNFLSSERAPLLIAASELIWLTCASSSLNGEELIRDGGIPLLATLLSRCMCIVQPTTPANEPAARIVTNIMHTFAVLSQFESGRAEILKFGGLVEDIVHSTELEFVPSAVDAALQTAANISVSSELQSSLLAAGFLWYVLPLLLQYDSTAEENATSEAHGVGARVQIAKNLHAVHATQALSRLCGLGGDGISPSNQSAFDALRALLTPKLADMLRNHPPKELLSNLNANLESPEIIWNSSTRGELLKFVDQQRASQGPDGSYDLTESHCFTYQALSKELNVGNVYLRVYNNQPDYEISDQEGFCIALLKFIAELVQKWNSLSLDENMMHQCGTAIETSVTENGDISGSTNEGKEEDSLEKHNRGVTDGDSEVIMNLRSGLTSLQNLLTSNPGLAAVFASKERLTPLFECLALPVPPESNIPQICLSVLSLLTKHAPCLEAMVAERTSLILLFQILHCNRSCRDGALTVLYSLASTPELAWAAAKHGGVVYILELMLPLEEEIPMQQRAAAASLLGKLVGQPMHGPRVAITLARFLPDGLVSAIRDGPGEAVVSCLEQTTETPELVWTPAMAASLSAQLSTMATDLYQEQMKGRVVDWDVPEQASGQHVMKDEPQVGGIYVRLFLKDPKFPLRNPKRFLEGLLDQYVSSVAATHYEANAVDPELPLLLSAALVSLLRVHPALADHVGYLGYVPKLVSAMAYEGRRDTMASGQTTSRLQAEPSNQENSADSTVQTPQERVRLSCLRVLHQLASSTTCAEAMAATSAGTPQVVPLLMKAIGWQGGSILALETLKRVVGAGNRARDALVAQGLKVGLVEVLLGILDWRAGGRQGLCNQMKWNESEASIGRVLAVEVLHAFATEGAHCAKVREILNSSDVWSAYKDQKHDLFLPSNAQSSAAGVAGLIESSSSRLTYALTAPPPQPALVRLPSTAPALPSAPANPSGRHSYQHS

SEQ ID NO: 167132 - protein, 109 aa, Oryza sativa
  Clone ID: PAT_MRT4530_65773C.1.pep
EKRKSAGLKSTAQSYIDDTSRDEELARQLQEQLDLEDSYGVPETVLKKREAGEEIFEGEDGGEEGAEDEGEGEAGEDFSPIQTSNGSGNSSCGRPSHVLSSGSLQMMLS

SEQ ID NO: 167133 - protein, 581 aa, Oryza sativa
  Clone ID: PAT_MRT4530_65774C.1.pep
MEGGATLADKAEFKECLRLTWSQPYILQLVFSAGIGGLLFGYDTGVISGALLYIRDDFTAVEKSTVLRETIVSMAVAGAIVGAGFGGWMNDKFGRKPSILIADSLFLAGALIMALAPTPFVIIIGRIFVGLGVGMASMTAPLYISEASPARIRGALVSTNGLLITGGQFMAYLINLAFTKVKGTWRWMLGIAGLPAFIQFILMCMLPESPRWLYRQDRKEEAEAILRKIYPAAEVEEEIDSMRRSIEHEKQLEGSIGEQSLVGKLTKALSSKVVRRGLMAGVIAQVAQQFVGINTVMYYSPTIVQLAGFASNNTAMALSLITSGLNAIGSIVSMFFVDRAGRRRLMIISLVGIVLWLAVLGGTFLGAAHHAPPVSDLETRVFANQTCPEYSPSARWNCMNCLKAQSTCGFCAHGGNKLLPGACLAAGEASRRTCHAGNREFYTEGCPNNFGWLALVALGAYIVSYSPGMGTVPWIVNSEIYPLRFRGVCGGIAAVANWVSNLIVTQTFLSLTKALGTSATFFLFCAVSFFALVVVFFTVPETKGLQFEEVEKMLGEKDYKPWKRYRPDVSSKGRDIGLSVP

SEQ ID NO: 167134 - protein, 51 aa, Oryza sativa
  Clone ID: PAT_MRT4530_65775C.1.pep
IKEHGRFLNLFACTYAFIFVSFCRLVMMPRLHLYDNVTSASRRISKKKKKK

SEQ ID NO: 167135 - protein, 68 aa, Oryza sativa
  Clone ID: PAT_MRT4530_65776C.1.pep
KIPFGKKKKLHWAKVPPKPALGVNDVDRPIRGPPNLGRVEIFPPLGFFGGGFRPGLCPLLKGGPFSRA

SEQ ID NO: 167136 - protein, 43 aa, Oryza sativa
  Clone ID: PAT_MRT4530_65777C.1.pep
PLCPANARSNDDIRMTSSSCIAYLLSRGHCQQYRLENYQTCRS

SEQ ID NO: 167137 - protein, 281 aa, Oryza sativa
  Clone ID: PAT_MRT4530_65778C.1.pep
MDIKQFPFRLILSTPEALMYEACFTMENVVEMGWFKGQQLEKQHDIKANIEDKEDQNQIQCPSIEQVELLAEEDKNKALQIIQDRELALVLQEKEARGQFSGDKAAEDNIPEHLMLEFEKASKSAPHDVSVARETQEGQFASNCEDGVEVEGDEEGKLQLGDSEELFDSQDSEDAFAKSLGVRLAAGGEAAVAGGALPSARSGGRGGGVSSPTAEGDAAAVGQRQEGRRRRSNSGALPSARSGGREGGDGGSAAGGGDGRFLGSCSGGGSALLLSIRKWRW

SEQ ID NO: 167138 - protein, 54 aa, Oryza sativa
  Clone ID: PAT_MRT4530_65779C.1.pep
SRANCAACNGGRGDSEAPTDVRIKAWGARSSTSTLGLVYAGLYNQRSDVEVRRP

SEQ ID NO: 167139 - protein, 243 aa, Oryza sativa
  Clone ID: PAT_MRT4530_6577C.1.pep
MPPAEPCSRTARAPHGHRCHAWLPTGRTIHGKKNRKRRKMERDWRFCKRAPELMLVITNKEFAELAPYDQNYLTWASNVQIVLGAKKLLKTFGMGTVQEPMPTPDENDQAMYFLRHHLCATLKNEHMATKGLLTLWTTLKEWFEKRKNTTLPQAEQEWAHLRRMTCKKYDEIINITQMFESHDKVAQKAHESKGKSKAKASTKAHLVPINNTPVVDAMATLSITTPLDIPAPAIVVASKENVI

SEQ ID NO: 167140 - protein, 1070 aa, Oryza sativa
  Clone ID: PAT_MRT4530_65780C.1.pep
MDGAVRGQGCVGRLRSFNKTKKKNRNCSDDMRNGDDEEKKYSHHDMKNNLRNDANEEKRKSSDDMRDGDFEEKKKCSRHDMKKNLRNDANEEKRKSSDDMRDGDDEEKKCSRQDMKKNLRNDADEEKRKSSDDMRDGDDEEKKKRSRHDMKKNSRNDADEEKRKRKRKCSDDLKKSVVNDASKEATSHSDWRKNRKAGSDAEQRGKKLLNGDKKAKSRKVTTPFFEKMRKIKMQRTSNQNGEKNMKSDGDSYKKTVPLSVNKGKMEKDGTNKRTLSNTLVAKERKMRPSDSMEMKMKKKKRDASFVQPDERTAQTFSTKNKEKKRKAPSTPLKREQKERVASSDNKKETKKACIVAIGNEKKNCRDGKKKKRKAAFAFFKFVRDEFEELLFIPPAVAPSLKDLIDRHVYLEDSEGKCSKIRLSVVDGSLAFYEGWNSFVSEHCIKWGEFLLFEYTPESTFSVRVFGIDSCERLHFSVKSGGKGAVKKRKERHTLSDDLISHYNGQYQDSEDIHDGPNVSGESPRSKEPKITVDAEIGTRNLVAKSINAASETQDSERVESGIGYGSLGALGNKVRNLSNGECDTRSDSVFCIQEKTRRSEVIIISDEAYSTQVDEDTMKQTAPSEASEIHHVTINTQKDLERVVDGVCCESSVALNNKMGNLILGEPKNKNISPACSTEKTNGSEITPTTGVIPLTQENIDTVKLNTLSCFEEDRSTTRESELAAAIPTTSETHDSDKDLGQKHQRNSVQVNSIIAVDKYPNDSEMNISGNIFRIYEAPAGTRCLEKWKRGIVNGRAALDDIGQVRPEKTQKAGEKLVGNCGAMGESPVDLRIESDVTDTCLKPILNIPIEELSILDSVSISKCGRSRTEVNHLFNQKGATVQLQTKKEPLKPTGSSGNRKGDKIAVSVNRVFAHQSELQIPQQENGNFTSCVTPVALLPAKAELLDLDDHSLQFCIPSTIQKWLVFSYSVVQWMQFVEFMLIAVRAELPKSLPITCRQKGRYDRNVVILKDPMRRLWPVFYHDKPVFVGFTAGWKPFAAANNLQAGDVCKFVKEMDEDELAFQVYITRK

SEQ ID NO: 167141 - protein, 50 aa, Oryza sativa
  Clone ID: PAT_MRT4530_65781C.1.pep
KNSSISCTLLISGGFTSAKFRRMHAIGGLTSAKLEETTSAINTLQEIILR

SEQ ID NO: 167142 - protein, 280 aa, Oryza sativa
  unsure (1)..(280): unsure at all Xaa locations
  Clone ID: PAT_MRT4530_65782C.1.pep
WTTRNSTRKSLCLYLQPAAWTNAPRRHGRTSYRSWRAWSSAVSCPTETASASKPCAVRGASPRRGSTRCRRRCPGSAWTAPPTRASPTARCTASSPTPTTTNFPAPSAAAPSMAGSSXPAAGAAAAAAAAPTRVLSEEPSLHGQDCSAQPRSXSGSAPAAATTPCASPSPRNSCARSSCARRTTSPPXLTISSSSTFRPSRRSCRTGHSRPPPSPSTTAASLPRTTAGATWPCTTASSTPSAPARSSSSTSSAAARPSRRRHRRRRRQRSIDLATAAARS

SEQ ID NO: 167143 - protein, 75 aa, Oryza sativa
  Clone ID: PAT_MRT4530_65783C.1.pep
PPRPGGQTENVVRPKSPSPPGAGPPLGLPLGQTRGFLAPPRGPLKPPPPRPPRTDPPRGGAEDPIGPPPDANLGF

SEQ ID NO: 167144 - protein, 193 aa, Oryza sativa
  unsure (1)..(193): unsure at all Xaa locations
  Clone ID: PAT_MRT4530_65784C.1.pep
RLNPLDVPYSNCMFSCSENGVYSTKLAYXQFIGAAGSIFNQTISKCWVPLSARKFFSWLIIQNRVWIIDRLQKRDRTNQHNCPMCRASTESVLHLLANCRLSRRIWTKLQRWINIDLQINEWANCANVEEWWYKLSRIPHVPRKTLKLVIILVASKLWCERNTRIFIHIATTMATIITKIKENARAWIKAGGT

SEQ ID NO: 167145 - protein, 34 aa, Oryza sativa
  unsure (1)..(34): unsure at all Xaa locations
  Clone ID: PAT_MRT4530_65785C.1.pep
LKQTSSSIFISASSNLRTELATXVHILVGIRCFL

SEQ ID NO: 167146 - protein, 135 aa, Oryza sativa
  unsure (1)..(135): unsure at all Xaa locations
  Clone ID: PAT_MRT4530_65786C.1.pep
TLTHTGLRWEKTTLLFKLPWKPIPFFREIPWAPKASFTSWITHTTTGLYILAPKACHMHLEVGPPPIRIPFFFTGPGNTRTRGWPSFIYIYIYIYIYIYRXRENIFHHRRGGSPSSSCCSSRQTLLKSLVAWPQP

SEQ ID NO: 167147 - protein, 165 aa, Oryza sativa
  Clone ID: PAT_MRT4530_65787C.1.pep
MMGSNSAGGGGGGAMVPGGMGGGGPMGAAAAGGGGGGDGRHDDEAVLTEFLSSLMDYTPTIPDELVEHYLGRSGFYCPDLRLTRLVAVATQKFISDIASDSLQHCKARVAAPIKDNKSKQPKDRRLVLTMDDLSKALQEHGVNLKHPEYFADSPSAGMAPAAREE

SEQ ID NO: 167148 - protein, 162 aa, Oryza sativa
  Clone ID: PAT_MRT4530_65788C.1.pep
EARLHSPCLHSAHSFVLYAGPRRGGPIISLISLSPTQPFSRGGGGGGEEEEETRRGGGQWGDEKSKARVPHGEFGRRDDDDDDDEMGLIAKSGPCGPANQAHEGISTPRTQHSMRDRTGTIQEDSTHVEASETLQVHHVGVIHEQIHLHSQRNTLDTPGNAS

SEQ ID NO: 167149 - protein, 200 aa, Oryza sativa
  Clone ID: PAT_MRT4530_65789C.1.pep
GEEKRGPKAPKWSLWERGGALFPGRLFPFLKTPRQKRPPKPPPAQNFPENFGPPRGWAPGVSLSPSPPKKKRPPKAPGVPPGKKNPPFWGEDPLQKFPGGGKTLPVFPPPPGGQFGGEKIFFFSQGGGSFFSQKFPPPPKKRLQGGPGNPPFVDNFFPHPPPLWVQKKGGQGFPRVMKKGIFFWLLNKRTNFFRPLLFPF

SEQ ID NO: 167150 - protein, 186 aa, Oryza sativa
  unsure (1)..(186): unsure at all Xaa locations
  Clone ID: PAT_MRT4530_6578C.1.pep
LYKSVTEYNSALHQICINLSLSGKVVTDKEKIEKTLSTFHLSAMHSTRNHRRMTCKKYDEIINITQMFESHDKVLCKNFISHPSNKSIDLKVDTSSYKNHKPIXKKRGKQGGKKAPKNMHEGTPDAQVAQKAHESKGKSKAKASTKAHLVPINNTPVVDAMATLSITTPLDIPAPAIVVASKENVI

SEQ ID NO: 167151 - protein, 65 aa, Oryza sativa
  Clone ID: PAT_MRT4530_65790C.1.pep
ASGPRCPMVSTKGFPSKQKLSPREPFLYHSGAHFGTSVSSLARVHHWAHYCAISPRQGYSPNWGC

SEQ ID NO: 167152 - protein, 183 aa, Oryza sativa
  unsure (1)..(183): unsure at all Xaa locations
  Clone ID: PAT_MRT4530_65791C.1.pep
FFFFFFFFFFFFFFFFFFFFFFFFFFFFFSXPXPXXXXXXXWXGXXKXXXXPXXXLPXXGEGXPPPXXXIPPPPXKNXXGDPKPXXLTXXXXKKKXPPXLNLXPXXIXXXXPXKKXPKXPGXLGGLFWDPXTRIPPPKTXGRXXXGPKXPXKXKXXFXGXXPPKPLKRPPXXXFXXIXXKWGG

SEQ ID NO: 167153 - protein, 104 aa, Oryza sativa
  Clone ID: PAT_MRT4530_65792C.1.pep
SPGSQPPPHNTGSPGLQEFRTKNGKVQLIREPMITSTSLFDSHNNLSTTLTSPCRHMISRKIFFHLYGRSKQIPLRHIIQSIKTPTSPQVLTKSIRSASLHPTP

SEQ ID NO: 167154 - protein, 112 aa, Oryza sativa
  Clone ID: PAT_MRT4530_65793C.1.pep
SRRSQPLHGPDPIHLVSPISLPSSRPQESGRGRADVWVEGGDMARGGEGGTARGEDGEARCEEGGGATREEGGEERCEEEKAERRRGGGGERASKRRCICTRMWGCGDCPGR

SEQ ID NO: 167155 - protein, 78 aa, Oryza sativa
  Clone ID: PAT_MRT4530_65794C.1.pep
MKATSPLLTSEDELPAVSRRNGGEAGEEEVAAKRMVAMLGSEEAAVDEAAGRGEEENGRRVRRAAINGGSSLETKFDD

SEQ ID NO: 167156 - protein, 119 aa, Oryza sativa
  Clone ID: PAT_MRT4530_65795C.1.pep
IGAPCRHCRAGSHRHWIRRGVAAATGSGSGEGGAAPGRLARALGGGEEWSSGGSGGAAPGHRLLVVVGGNGRRVASSSSSSSAASAAPLSPPAMDPPPPSPPTMDMSPRGRHRWRELAT

SEQ ID NO: 167157 - protein, 154 aa, Oryza sativa
  Clone ID: PAT_MRT4530_65796C.1.pep
HDWRCRSSSVAFSPLLPLPHHRRMPLSPWSELNGGVGSGALGPPLTTEIPSAGGSFSYLHVELSDIAVFLATGNIPLEAVVGAVRAVAWLLLAAYLQFTFGWRREEWFPAPLQLWWSRRRLRVECLAGEERREKGGRERGREERKRKMKRGNSV

SEQ ID NO: 167158 - protein, 115 aa, Oryza sativa
  unsure (1)..(115): unsure at all Xaa locations
  Clone ID: PAT_MRT4530_65797C.1.pep
HLPQALPPSPPADRLLLSAAARLFPPLLPPAPPPPVDAALAARIVVVVTGFSSSLXPLPRSPPRRSPLHPSTADAALVGRNASSLSSPLAALPFVSVSVSVMGAVVMVMATPKYA

SEQ ID NO: 167159 - protein, 117 aa, Oryza sativa
  Clone ID: PAT_MRT4530_65798C.1.pep
LLTTVHNESEIVGETGEANPRCPLRYLRTTSRSTHVGSTKDDALQGRRASSRIGRPRHRRRPLSLGVPPGHDHTVDASSPFPEAAPAARPAPRTPSHHCRNPPTCVPPQPHDRTQQP

SEQ ID NO: 167160 - protein, 126 aa, Oryza sativa
  unsure (1)..(126): unsure at all Xaa locations
  Clone ID: PAT_MRT4530_65799C.1.pep
MSGEDGHHRLSLPEGSSAPTACPSPTPAASSAMAAGSGACQIEGIKNCETLSYLPPLTVEDLLKXIRYRVQSKWXVPCLEFXKVGFVYRENHRSPGYYDGRYWTMXKLSMFGCXXATQVLKELEEA

SEQ ID NO: 167161 - protein, 322 aa, Oryza sativa
  Clone ID: PAT_MRT4530_6579C.1.pep
MTATSRRGASARVVRASRRARGRRRPEVGPSGGGGLTSSDRFAGFAGVEKGEHGWSQARAWAVGGRAVPTSPAAWTPVALASTVGHMNVTVKLCPSLHYQLSWICLLKEPEGASSERTAPQNFGIRGFEVIDDAKSQLEAVCSGVTLITEFLVLYLLQDRWAKLRQKFAAQGLTDRELVTLVGAHTIGQTDCIFFRYRLYNFTATGNADPTISPSALPQLRALCPPAGDGSRRVALDLGSPGAFDVSFFKNVRDGGAVLESDQRLWGDAATQAAVQSFAGNVRGLFGLRFSYEFPKAMVRMSSIAVKTGSQGEIRRKCSKFN

SEQ ID NO: 167162 - protein, 1082 aa, Oryza sativa
  Clone ID: PAT_MRT4530_657C.1.pep
MTGGRRWNGRSRRYRQGVSTISQISSFKASLSGQALIALKKGTQLLKYGRKGKPKFTPFRLSNDESTLIWVSNNKEKSLKLSSVSRVLSGQRTLVFQRFLLPEKDHLSFSLIYNDGKRSLDLICKDKVEAEVWFAGLNVLISPGQHGSQHQHIDGIRNGALSFECGRDSSLSSSSAYTTDSFENKLSSANSAKDRSSGEFTYSERTDVSDMQVKGASSDIRISVSSALSTSSHGSGDDSESFGDVYVWGEVMCDTTCRQGSDSNAYSATAATDILVPKPLESNVMLDVSYVACGVKHAALVTRQAEVFTWGEECSGRLGHGAGTSIFQPRLVESLSICNVETIACGEFHTCAITATGDLYTWGDGTHNAGLLGHGSNVSHWIPKRVSGPLEGLQVSAVSCGTWHTALITSSGKLYTFGDGTFGVLGHGNRETISYPKEVESLKGLRTISVSCGVWHTAAVVEVIMAQSNTSSGKLFTWGDGDKYRLGHGDRSSKLKPTCVPSLIDYNFHKAVCGHTLTIGLTTSGHIFTAGSSVYGQLGNPNNDGRYPRLVEEKLGGGGVVEVACGAYHVAVLTQSGEVYTWGKGANGRLGHGDIADRKTPTFVEALRDRSVKRIACGSGFTAAICQHKSVSGMEQSQCSSCRQPFGFTRKRHNCYNCGLVHCHSCSSKKALRAALSPNPGKPYRVCDSCYLKLSKVLDSGIGHNKNNTPRIPGDSKADKMDSKGNRVASANSSDMIKNLDVKAAKQTKKYDYPPQFPAILQLKDIPFIGAADQQPNDSTYSSPLLRLPNLNSSSSLSSESFDILRDANELLKQEVQKLKEEVNSLRQQREQQDADLQKSEAKAHEAMTLASEEASKSKAAKDVIKSLTAQLKEMAERLPPASCDTKQTRQPYLPGGAVSPDTGRENQKRYEPGSFQYPQTPTSVASARFNGFLAQAHQISEPNGNTMVPHDSRHENNGNTKEFPVAQQMTNGGMTGYRPRTEDHDRRETERFQINLHGFNMRGSSSPSNQVEAEWIEQYEPGVYLTLVSLRDGTKELKRVRFSRRRFGEHQAESWWNDNREKVYDKYNVRGTDRISSVMTA

SEQ ID NO: 167163 - protein, 135 aa, Oryza sativa
  unsure (1)..(135): unsure at all Xaa locations
  Clone ID: PAT_MRT4530_65800C.1.pep
MAAVQAAISTCCSSSCLXRPPPPFARRRRFKVHAHGXLREKVAQATARSGPMQWFGAGIFGGGAXEVXVGRTCFKKLERRKLLSTVETAGLLSRAEELGVTLSSLEELGLHSKAEASPPQPREPPPPLPEPARCP

SEQ ID NO: 167164 - protein, 81 aa, Oryza sativa
  Clone ID: PAT_MRT4530_65801C.1.pep
YLSSWSEGVNSTDEPPLPPWSAFSPSSSLFPKATSPSPLFRRLPRLWWLPVARYGIIGCCRPPLPTPIPLSLGELPSSPAT

SEQ ID NO: 167165 - protein, 50 aa, Oryza sativa
  Clone ID: PAT_MRT4530_65802C.1.pep
CRFEMLEFDKDFCLWEWKCQMMEILVSEKMMGPHGSLTPKEALYEASREC

SEQ ID NO: 167166 - protein, 190 aa, Oryza sativa
  unsure (1)..(190): unsure at all Xaa locations
  Clone ID: PAT_MRT4530_65803C.1.pep
RRRRGGSGRRAGLGAARGSARGDGTARRGAGLSARRWDGDGDSGAGSRRRWNTRGDGMSGDGARGRAGWRDGGAAARGARHARXGEMGRARGGAGARGVRRRRDGDGARQQAAMATSARLGAARGRRRRRGRATEPHRARAAPPLHAVEPPREPDGPGEHPHDAEPVRLGAMHAPRVPVDVEHVAHHLPP

SEQ ID NO: 167167 - protein, 199 aa, Oryza sativa
  Clone ID: PAT_MRT4530_65804C.1.pep
MASSEALCAAAVRIIAAWLERSELPLGREVVRHMLDVDGHTWSVHRAKANWFRIMGVLTWAVGLARWLDGVQRWRSPLNKDKMKTSTVHCAEGARCGSVALPLLRRLPLAAPSRADVAIAACCRAPSPSRRRLTPRAPAPPRARPISPTARASRPEPPRRHPATPRAHAPRHRSSHRRACSIAASSPRRCRRRHPIAVR

SEQ ID NO: 167168 - protein, 187 aa, Oryza sativa
  Clone ID: PAT_MRT4530_65805C.1.pep
GNSVEFILSNIGYLRNLKILTLDRNKISVLPEELGSLSNLQQLSISQNSLSRLPKSVGDLRNMLLLNVSDNKLIALPESIGGCSSLEELQALGNSIEDVPSSICNLVCLKSLSLNGNKIRQLPQNLLKDCKALQNISLHDNPISMDQFQQMDGFTEFEARRRKKFDKQIDSNVMMSSTALDEGIDLN

SEQ ID NO: 167169 - protein, 233 aa, Oryza sativa
  Clone ID: PAT_MRT4530_65806C.1.pep
MGCCSSRSADSPASRVTRWRSTGIVALRDARLKVVPNEVLQVGNSLRILDLTNNKIAEIPQEVGTLVNMQRLVLAGNLVESIPANIGYLRNLKILTLDRNKISVLPEELGSLSNLQQLSISQNSLSRLPKSVGDLRNMLLLNVSDNKLIALPESIGGCSSLEELQANGNSIEDVPSSICNLVCLKSLSLNGNKIRQMDGFTEFEARRRKKFDKQIDSNVMMSSTALDEGIDLN

SEQ ID NO: 167170 - protein, 36 aa, Oryza sativa
  Clone ID: PAT_MRT4530_65807C.1.pep
SRSRASALLVLPPPERCKFQGTNRAKGDSLPNFLTC

SEQ ID NO: 167171 - protein, 239 aa, Oryza sativa
  Clone ID: PAT_MRT4530_65808C.1.pep
ILMEMGKKKNQSTGTFNLASRRATIPVERQRVTRLAGEEEEELGRLVDFGLTRALSRGRRGAPALLLLSPASPSPEPPSAKPGGCKDGGGGAPSPSLVVKPYGTPARQELRLGAGDEEKRPAAARSGAVEAESGPPWRDLLGGGVGRWVGGGDDLECSAAGFGDGSGAAATWRSWRRVVAGAGSPSCARTLSRWRLAVGRATAMAAGRATVKAGARGAGAPVVDSTAPAPVQRAAPLCF

SEQ ID NO: 167172 - protein, 79 aa, Oryza sativa
  Clone ID: PAT_MRT4530_65809C.1.pep
VSTAPARTPATRPRRPRRGRGSGSTSPTGSTARSGPRLPLPRATAPRPLLARPCFPVRSRMAYITLSRPTRADQAEAIT

SEQ ID NO: 167173 - protein, 217 aa, Oryza sativa
  unsure (1)..(217): unsure at all Xaa locations
  Clone ID: PAT_MRT4530_6580C.1.pep
MIASRTPVSLHSLLVAGGHGKRCVAGAGGRKRGRVQRRHLTQALESFWRHAPRPAPPAAAARGEANRSWQPPPLENPAFEEYYKEQRIVREEEWDDFISVLRKPLPATFRINASSQFFKDICSKLENDFKRYLESEVSDEYGEDAIRPLPWYPXNLAWHLNFSRKQLRKNQALESFHEFLKHESEAGNITRQEAVXMVPPLFLNXQPDHHVLDSMLL

SEQ ID NO: 167174 - protein, 149 aa, Oryza sativa
  unsure (1)..(149): unsure at all Xaa locations
  Clone ID: PAT_MRT4530_65810C.1.pep
APSASPSRRNPPPPPPPPAGSXQASSPPPSPSPPPRRRCLRRQRRRRRGKQNPPPVATARPFSRWNADGAAEFAASRALARARARPLSPRAPPRAAGAGKSRPPRRRLRPRWRPRRLIHRVGRSRSTLRSGRRRRRRSACRSDAASCLF

SEQ ID NO: 167175 - protein, 82 aa, Oryza sativa
  Clone ID: PAT_MRT4530_65811C.1.pep
MEVFIPILARLLMRLQHITITTVAITTSDELEVAIAAMMTSFSQSSAYDNDEQWRQSQVGACGCPDLVLVKLGATGFDGSIT

SEQ ID NO: 167176 - protein, 92 aa, Oryza sativa
  Clone ID: PAT_MRT4530_65812C.1.pep
QEKKNPNPLIIATAILLILPSLPPPSLASSSCRCCRQIQARKSHRHRIHTGDGLPPRHPPQPLLASTTGRGRAVPCALTAGGRGARCCRSSP

SEQ ID NO: 167177 - protein, 45 aa, Oryza sativa
  Clone ID: PAT_MRT4530_65813C.1.pep
EILTMLACNLLNLMLIISSASTTIFCDSFYLLRRFASFGIQFAIT

SEQ ID NO: 167178 - protein, 398 aa, Oryza sativa
  Clone ID: PAT_MRT4530_65814C.1.pep
MAAVEQDQEEEVIIVGAGPSGLAAAACLSVRGVTGCLVLERDDCVASLWRHRTYDRVRLHLAKRYCALPHAPHGEASPTYLPRDDFLRYLDAYASRFGVRARLRREVRSARYDAARARWLVDAVDLATGRAERYAARHLVAAAGENDERVVPEVPGMETFPGKVVHAADYRSAEGFKGKSVLVVGGGNSGMEIAYDLAVGGAATSIVIRSELHLVSKEIWNLAMTLYRYLPVWVIDKVVLLMCAAVFGDTARYGLRRPAVGPFTMKATTTMYPVVDVGTFAKIRSGEIRVLPAAIKGVRGRDVEFADGQRHAFDAVVFATGYRSTTKHWLKSDDGLIGDDGMAGRSYPDHWKGENGLYCAGMVRRGIYGSYEDAEHIADDISKQLRSSSKPTHNNGSA

SEQ ID NO: 167179 - protein, 283 aa, Oryza sativa
  Clone ID: PAT_MRT4530_65815C.1.pep
MGSDWNSLVRNPQVPPPFTGVNGSSPNFPGHRPLHRRVAIVTGGAGGIGAAVTAHLVSLGARVVVGYVGDPAPAEQLVASLNDSATAPRAVAVAADVSDHAQVSRLFDAAREAFGPDLHVLVAAAGVQDGAYPRIADTSPEQWDRAFAVNARGTFLCCREAARRLARGGGGRVVTFSSSNVGSLRPGYGAYVATKAAVEAMTKVLAKELAGTGITANSVAPGPVATPMFYAGKSEERVAAVAGECPMGRIGEPMDVAPVVGFLCTDAAGWINGQVIRVNGGYI

SEQ ID NO: 167180 - protein, 149 aa, Oryza sativa
  Clone ID: PAT_MRT4530_65816C.1.pep
MVRGSIVAGEEGAWIRRHRGGFHVDPSSLPPPVPLPSSPPRTVADLPASRRRRHDLLRLAPSPAGSSRSGAIVAAGRKARGSVVTGEDGNRRAPIADALKLNSQRKTCLQIMAVTPSEYTGKNRTRVASSGNWPINAREGDNMPWWTGD

SEQ ID NO: 167181 - protein, 35 aa, Oryza sativa
  Clone ID: PAT_MRT4530_65817C.1.pep
MAEFDGDFRCRAYRPSKGISSSEIRSLSGFEGGFG

SEQ ID NO: 167182 - protein, 46 aa, Oryza sativa
  Clone ID: PAT_MRT4530_65818C.1.pep
VMPQRKELDMSMAVWELIMTGMFTIIMTSWELVMPYSLSLVISMLA

SEQ ID NO: 167183 - protein, 49 aa, Oryza sativa
  Clone ID: PAT_MRT4530_65819C.1.pep
MCIKIPVQDRPRYTNDNEHHSTGILDGTDKAYSSEKPPSDTYSELSKES

SEQ ID NO: 167184 - protein, 431 aa, Oryza sativa
  Clone ID: PAT_MRT4530_6581C.1.pep
MQRNGVVECSVCRSRLVVPSPRSVSRAYDKHRSKISSKFRALNVLLVVGDCILVGLQPILVFMSKVDGKFQFSPISVNFLTEVTKVVFAIVMLIIQSRKQKVGEKPLLARSTFIQAARNNALLAVPALLYAINNYLKFIMQLYFNPSTVKMLSNLKVLVIAVLLKFIMKRRFSVIQNCHVLSFNVDDHNLQSGLLVTHYVTEWEALALLLIGISINQLRTVPAGNTAFGLPVTAIAYIYTLIFVTVPSLASVYNEYALKSQYDTSIYLQNLFLYGYGAIFNFLGILGTALFQGPESFNILRGHSRATMFLICNNAAQGILSSFFFKYADTILKKYSSTVATIFTGLASAAFLGHTLTINFLLGISVVFISMHQFFSPLAKAKDDKPAELLELEDTQNHRSSESSFVNMTAGAAEDASHRIGTDERQPLLPT

SEQ ID NO: 167185 - protein, 63 aa, Oryza sativa
  Clone ID: PAT_MRT4530_65820C.1.pep
NRRPDLSFKPTPKRDRRPTSPEWTQELRLIQPNLGGSFLTNTTGTYKKINPPPPFFFFGASAT

SEQ ID NO: 167186 - protein, 205 aa, Oryza sativa
  unsure (1)..(205): unsure at all Xaa locations
  Clone ID: PAT_MRT4530_65821C.1.pep
MAEGGGKALLEEDLVGRSSRSVAQACSGDIRGGGDSSNIMVWYIEAWGGSSSKLWGDEARIYPMGNGWQGGSTDHWSSVSRSHCSNGCCTTQKPSSRRVLPPPNPSSSSQYLLGIPIAASRCMATNEEARRRWWRGRQPAGANRSRIRRALGASLLARRVYFIGLFVTNPSTSXLVQGRGVSVSVINAQTWDMVKGHWQLGKYHS

SEQ ID NO: 167187 - protein, 47 aa, Oryza sativa
  Clone ID: PAT_MRT4530_65822C.1.pep
VALAVLILKRPLPFRQQHALRYKCRTAQTCIIHKIGYYLPALDGCLT

SEQ ID NO: 167188 - protein, 126 aa, Oryza sativa
  Clone ID: PAT_MRT4530_65823C.1.pep
IFIFFFFFFFFFFFFFFFFFFIFFFFFFSFFFFFLYTTGGDLGGGKVHKEGSQKKTGVKKNPLSNHCMWLLGPHRQGGENKEQNPGLKTACTRRKKKPWGGPPRLTKGRRQKKKTPFLCGGTGPRE

SEQ ID NO: 167189 - protein, 63 aa, Oryza sativa
  Clone ID: PAT_MRT4530_65824C.1.pep
EVLASAARPSSTAPSRSPAGLRRRSCRRTPSCSTSRRARVLRISQMGNIFSFCLIFLLFHPLF

SEQ ID NO: 167190 - protein, 104 aa, Oryza sativa
  Clone ID: PAT_MRT4530_65825C.1.pep
PTRPPTRPAPAAAAAAGLNATTATSGQDQVIQATLRSMKSPVRLLDISALSALRKDAHPSVYSGDLSPAQRANPGGGSADCSHWCLPGLPDTWNQLFYALLFYQ

SEQ ID NO: 167191 - protein, 442 aa, Oryza sativa
  Clone ID: PAT_MRT4530_65826C.1.pep
MEQTLDVPRSLRLLAPKAQQQMDEFWRDRQKEIETTKDFSEHAIPMARLKKIVSSQKGNMMMTFDMPAFLSKMCELFVQELAVRAWASAQSHNRCIILDTDIAKAIASTESYDFLVDILHNHRVKHKSTPCSTLTTKRCRLVDQPSTSHMPYQHQLPQFAPTYTPAIPITPSLMPPISHYIPFQYPSLSQEVSPMMASAPIVNRSMLLIHNIARGLGLQGNNISTFANNNIPDNIVGCSSPTVLASMMSPALLEVAGTSLNPPNSHSICTMNMINSSDPSGSSIGDINVANQASLAPSGRFNPAILRESSCPSFLYSNNDTIVAIPEGVDISGTMDVASDVAAIVINGQEEHERETNVEHHQQNEIYESIDIGIINASVADDNKYSISWDELGMADDSLLDKFLEEFQVRNDGVLRTGIELHEDPFLGDVMLANPSTSNANK

SEQ ID NO: 167192 - protein, 276 aa, Oryza sativa
  unsure (1)..(276): unsure at all Xaa locations
  Clone ID: PAT_MRT4530_65827C.1.pep
GRARPPYQHQLPLFAPTYTPAIPITPSLMPPISHYIPFQYPSLSQEVSTMMASAPIVNRSMLLIHNIARGLGLQGNNISTFANNNIPDNIIGCSSPAVLASMMSPALLDVAGASLNPPNSHSICTMNMINSSDPSGSSIGDINVANQASLAPSEHFNPAILQESSCPSFLYNNNNDTIVVVPEGVDISGTMDVAGLVINGQEEEHERKTNVEQNEIYESIDIGIINASVADGNKCSIRWDELGTADDSLLDKFLEEFQXRNDGVLHSGIVLHEDHS

SEQ ID NO: 167193 - protein, 74 aa, Oryza sativa
  Clone ID: PAT_MRT4530_65828C.1.pep
GGGHKSPGLLREQRVNSKEFDHPLLGDKGWKGLIKQLAMMMSFPGLRFPLFQKNKVPRGWFCFRRGSPPSLWGG

SEQ ID NO: 167194 - protein, 126 aa, Oryza sativa
  Clone ID: PAT_MRT4530_65829C.1.pep
KLFILKIMVKEQIYQSHQMQLSGTHGTPRILLVLLFHPQQTLRARFKIKQYGFQVRAALAASRSTNIIAPDRTPQEVLFKFCQISSELGLILKRDSVRSFLRLYGENLDCMAWGLIITPQTFDFIV

SEQ ID NO: 167195 - protein, 46 aa, Oryza sativa
  Clone ID: PAT_MRT4530_6582C.1.pep
KKKPLNKKILKGLLQRKKILPLHYGLILKKVFLNFFLIFKNQLQKF

SEQ ID NO: 167196 - protein, 118 aa, Oryza sativa
  Clone ID: PAT_MRT4530_65830C.1.pep
MAAGATWKKQGMSTMYHQQPVLVGIMPDTYGIADRYPVSCLVSGLIPVGIRLGTWVSWLGVRPGTRRYQTCYLISDLTFTERWIAIGSDRWMAAAMARRSPPEDEDYNGGGQATEFDD

SEQ ID NO: 167197 - protein, 52 aa, Oryza sativa
  Clone ID: PAT_MRT4530_65831C.1.pep
VVAELALGHCNNKPSTASVQALTSRPFSQPLAMLTLLTTTTTTARSVIVRVG

SEQ ID NO: 167198 - protein, 81 aa, Oryza sativa
  unsure (1)..(81): unsure at all Xaa locations
  Clone ID: PAT_MRT4530_65832C.1.pep
IXNVILGLXMKHSETFSIYSCGPIKEAITCGTIESKVLHPLWYIKPQQTKQKMFEHLMQTMTTHPNQKHHSISDPLLVQYL

SEQ ID NO: 167199 - protein, 44 aa, Oryza sativa
  Clone ID: PAT_MRT4530_65833C.1.pep
PLFSSLLTNLWHRPRELGEPTHTIVCQARRQVAGAGGMMLEDGG

SEQ ID NO: 167200 - protein, 38 aa, Oryza sativa
  Clone ID: PAT_MRT4530_65834C.1.pep
RSPPMLLGKKLLCHLIQTLRYHRNSIPKSLFVEDGPGA

SEQ ID NO: 167201 - protein, 77 aa, Oryza sativa
  unsure (1)..(77): unsure at all Xaa locations
  Clone ID: PAT_MRT4530_65835C.1.pep
TTPISLKPRQKEFLLXGNNNXXQQQQVYGXSIXQHSEQNIFXGFXGLADASESLGINXVAAKXLQSKMIKRRDHTVK

SEQ ID NO: 167202 - protein, 65 aa, Oryza sativa
  Clone ID: PAT_MRT4530_65836C.1.pep
KKNFSRAQKVHPNNLFPRGPPFDPFEYMRSNLGPVRKPLSNCGVHGLEGPGPQIASLRLLVLVVG

SEQ ID NO: 167203 - protein, 159 aa, Oryza sativa
  Clone ID: PAT_MRT4530_65837C.1.pep
MGPAGRATLVKSVLTAQPIYLLTALRVSKEALGQLDKQRRRFLWAGTGDITGGKCKINWTKTCMPTCHGGLGVLNLEKFTRALRLRWLWHEWKDPSKPWAGLETSCDEVDKVLFAASTKITVGDGNTTRFWYSAWIDGRRPKDLMPLVYAISKKKGKSL

SEQ ID NO: 167204 - protein, 377 aa, Oryza sativa
  Clone ID: PAT_MRT4530_65838C.1.pep
MDYFTKWAEAVPLENITCTEQDDLSVKDYKTLMGDNFEDVIDKRLKTLKEMETLQDEVPWPVIGLSSSDNMFYAFRFTMFIIKGRSDHGCVGGLTGLVGPVRPPGFESKESISAVQENLGSNGAAEVLDVRHTIDMMHLTKNLCVNLLEFLGVYGKSKDTMEARNDLKHMEQHDDLPLEPKEKRSHYLSPASYTLSKAQKENMFECLENIKEEHIRSVAAGTKHTAARTHREEEKQKGITVVTDDDGCGDRLQRRRRSGAGDRESSSGDTGTGTVPARAMARARANSDYYKLIVYFALLGELYAFTDMSSKGKKGKGPDEPKRHVVLLGKRKIVGVEDKTDEDYDQFDGQPPFAVTVDPSILLSNENTPYSRSDNKE

SEQ ID NO: 167205 - protein, 272 aa, Oryza sativa
  Clone ID: PAT_MRT4530_65839C.1.pep
MGLGLGPRRGVLAPNAAAEEAEADVAVAILPTPLPMVALLPPARANDDGAAGRWVGRKPVTGKQGNLLSVLADEEERRATAAAELEPHARQAEVSELLPSPNTAMRREERGENSWKRRRAPAGRRRRSWCGEGGEMVVRIRLARFGCRNRPFYRLMAADSRSPRDGKHLEVLGYYDPLPGKDGGKRMGLKFDRVKYWLSVGAQPSDPVQRILFRAGILPPPPMLAMAHKGGPRDRRPIDPMTGRPLDLEGVTVVDDSHTPKSGDGAPNEETA

SEQ ID NO: 167206 - protein, 102 aa, Oryza sativa
  unsure (1)..(102): unsure at all Xaa locations
  Clone ID: PAT_MRT4530_6583C.1.pep
AHRRRCRRRHRRRRRRRARRRRRRRTRRGPXKDHPHHCARDHQDRRRQLPGPRAAPHRQXSSSSSKNRQKRRCRRHRRWRCSTKRRRRSPPRRGRRRRRTRA

SEQ ID NO: 167207 - protein, 170 aa, Oryza sativa
  unsure (1)..(170): unsure at all Xaa locations
  Clone ID: PAT_MRT4530_65840C.1.pep
LEYRISHLWTTQPPKPAWYQSQGSPFTTTSNRTQRGFPFYYSLFFRGLFHFNRGSQQHLKGFIFRGGANATLLGWASTRAGGAGTGEVGGPGAGPGHEARGPPGGNPRGXGMPTGSDGPQGDGGTGPGGPTERGGNKSWQEGADGGQGGPPRTQTHHPEGVYIKYHSKEK

SEQ ID NO: 167208 - protein, 35 aa, Oryza sativa
  Clone ID: PAT_MRT4530_65841C.1.pep
HNTLMRFHQIIGHDRDVSYVSSHVDTQLTCVIKVL

SEQ ID NO: 167209 - protein, 142 aa, Oryza sativa
  Clone ID: PAT_MRT4530_65842C.1.pep
MSNAGRAFSLRAHGDAACLPIAWTSREPRMKKWPSATGSGRPRVPPFLTVQTNRSLLPPPRPSSREQTTTMNEMREAAGKFTGEKNREKKKNRRQRREEEDGEEGSNGDGKQSRGPNRGFIFSVLPVLPPATGGNSPFCHRF

SEQ ID NO: 167210 - protein, 158 aa, Oryza sativa
  Clone ID: PAT_MRT4530_65843C.1.pep
MAAPFVRRPTDDGTSGTREDIIKSLDMGKGKARDAVLARKKDGIGLLHAAACQGHLTVCKFLMEELGGFIAHLIHAQDAAGADVNNKGTGITPLMFAALQGCYTYFIKILLETGAIPNIPNVLGWLPVEHVASCDCREGVEMLFPFTSPNSKCPKLEC

SEQ ID NO: 167211 - protein, 609 aa, Oryza sativa
  Clone ID: PAT_MRT4530_65844C.1.pep
MEAAAAIGGARSPLSFSSSLCNAKVSCGLALHNVKIKSSRRLEVVCHGMLTTRKFMQKKKKEEVYKDAADEAEQKNWRMMMREIEESGSAVSILKTQRSKKEPLPRDAVLGTLMRFKQLKKWNLVSEILEWLRTQHWWNFSEMDFLMLVTAYGKLGDFSRAERVLKYMNKKGYKPSVISQTALMEAYGRAKQYRKAEAVFRRMQTSGPEPSAVTYQIILKSFVEGDKYKEAEAIFEDLLNEKRASFKPDQKMFHMMIYMYKKAGDYAQARKLFAQMSERGIPLSTVTFNSLMSFETNYKEVSSIYDQMQRTALKPDVVSYSLLIKAYGKARREEEALAVFEEMLDAGVRPTRKSYNILIDAFAISGLVEEAHTVFKAMRRHRVEPDLCSYTTMVLAYVNASDMDGAEKFFRRIKEDGLKPNVVVYGTLMKGYSKLNNVERVMRVYERMRMQGVEPNQTIYTTIMDVHGRNSDFGNAVIWFKEMEARGYPADKKAKNILLSLAKTPEEQEEANELTGNCAIQLEAKPDGTTYGLEINGTGNEYKHGQNDAGHDSLLDGACTTSNRNGKVEAGKGHFEEVNDDDDDDDDDDYDEELNFVSFKDKRELNFAT

SEQ ID NO: 167212 - protein, 335 aa, Oryza sativa
  Clone ID: PAT_MRT4530_65845C.1.pep
MSSRMAGATLLRHLGPRLFAAEPVYSGLAASARGVMPAAARIFPARMASTSSAGADVKEGAAEKLPEPAATAAAAATDPQNKKAVVSYWGIQPPKLVKEDGTEWKWLSFRPWDTYTSDTSIDVTKHHEPKGLPDKLAYWTVRSLAVPRDLFFQRRHASHALLLETVAGVPGMVGGMLLHLRSLRRFEQSGGWIRALLEEAENERMHLMTFLEVMQPRWWERALVLAAQGVFFNAYFVGYLVSPKFAHRFVGYLEEEAVSSYTEYLKDLEAGKIENTPAPAIAIDYWRLPADATLKDVVTVIRADEAHHRDLNHFASDIQQQGMKLKDTPAPIGYH

SEQ ID NO: 167213 - protein, 152 aa, Oryza sativa
  Clone ID: PAT_MRT4530_65846C.1.pep
MAAGRAGWHVPEHMMKVKLLTMFQDVAIVDKVTVIKDKASCGMVPKYPIPATQVSYTRYQGLVWYPSSTAPLENRLRRLGLERVPGVVLLELREAGIVARVLCPVAVGEERRRRRVGVVRSAVPGIAAAGLHNYVAGCDDPTKLESSEVEAI

SEQ ID NO: 167214 - protein, 109 aa, Oryza sativa
  Clone ID: PAT_MRT4530_65847C.1.pep
MQAYNLLRDQVFAHTRAYDPELLAKIGMNVDSATVWKAICWDDFALVDDSGSRFLTVRFLCMLRYVWEGITFRFFGTEYYLTRKDLSTHMGFNIRCFVDLESVTPDFNR

SEQ ID NO: 167215 - protein, 132 aa, Oryza sativa
  Clone ID: PAT_MRT4530_65848C.1.pep
MSDLPLLARMVIPYNEGAHGRHGGHVRTSFQPVAYELQNHAVSQQRTLQAHQPDYQDTKPVHDLAQQVQLHDPATVHTDPDDAQPQALAGLNPPFTYGLHPCAYSALQGITTLAPVSKCITICVSTTGKNEL

SEQ ID NO: 167216 - protein, 108 aa, Oryza sativa
  Clone ID: PAT_MRT4530_65849C.1.pep
PGCRLSSFYLIGYRDWLDIVLYTTQVAACHFLRTTGQLPCWTNKRIGLVIYTLRNVTWYILGVKPLWIPNLHWDKPSFLSYKKELSNIKVHLRQSNKQFKKIDMRHCQ

SEQ ID NO: 167217 - protein, 204 aa, Oryza sativa
  Clone ID: PAT_MRT4530_6584C.1.pep
AAPAVVGDRKGVSPPRRSELAGRSEVAPYRQIRVAGLRRRAARRRPWWRRRNYGRSHPRAAPGRAVATGSGELPRRRRDSSLPRRLRDSSPPCESRGGQEVRRRRAPSPPPRQDRRRRRLLAAERVASMPRPPPSSPPCRHRRRPQIHRRSARPPQRRLRSPLLRPAPSPSRPPLRSNASVPAPLEPGASQCSSAYVAAQVRHF

SEQ ID NO: 167218 - protein, 59 aa, Oryza sativa
  Clone ID: PAT_MRT4530_65850C.1.pep
MTSTLLSTANEHHAPPLQAPACDKGLGRLINEHLGPRAKPWDIVLKGKLEELKKTAESI

SEQ ID NO: 167219 - protein, 57 aa, Oryza sativa
  Clone ID: PAT_MRT4530_65851C.1.pep
MAMAPPAAVVGGSARHSPSCFVPKWAVLVVPYRASTAQNMWSREQLARTAPRRHAGD

SEQ ID NO: 167220 - protein, 239 aa, Oryza sativa
  unsure (1)..(239): unsure at all Xaa locations
  Clone ID: PAT_MRT4530_65852C.1.pep
SGGTRPAAGDRGGDAPPGGGSGTRVHAEHHPGSGGEGGRGLGAEAGGGPEPEAEAEAGDGPEPEAEAEARRPGDGPRPFPPRLRRVWSHFKIXAREEALDSVMREAEEERQAALIASSVLDEALGDIHLQYEAHAEDLAKRIRDARGILDAAAAHGRRASEADASLRAWTTALEAERRALDDRARSAQEFEATIRRRIXVLDRNQREQNARGEEQAQRARELEERVRLQDQRESTLATH

SEQ ID NO: 167221 - protein, 54 aa, Oryza sativa
  Clone ID: PAT_MRT4530_65853C.1.pep
IKAVLLNDQEKSEATLLELLRLLQQLEFTVDTLTVTEIGIHVAVRNYKTSHLLA

SEQ ID NO: 167222 - protein, 45 aa, Oryza sativa
  Clone ID: PAT_MRT4530_65854C.1.pep
KKKNLYSLINGRIFSICQIVSIGLVYEMLRLFNFLLSLTDLNEGM

SEQ ID NO: 167223 - protein, 673 aa, Oryza sativa
  unsure (1)..(673): unsure at all Xaa locations
  Clone ID: PAT_MRT4530_65855C.1.pep
AGGGGGFIEPPKWTFNRPPRRFSCSEIPSQGISGSDPPQGTKSERTRTGPDPERPSGGTRPTVGGRGGDAPPGGGSGTRVHAEHHQGSGDEGGRGLGAEAGGGPELEVEAGGGPEAEAEAEAGGGPEPEPEAEAESTRGPEAGGERDSRSPLRLGRPRGWSXQKGGREQPPVSRGIQQYPVVPGADRGLFLPNSGEYGATSAEGLNTQVQALAEERAALDAEWEQLAADRARVDEGRRAVDDMAREEALDSVMREAEEERQAALIASSVLDEARGDIRLQYEAHAEDLAKRIRDARGILDAAAAHERRASEADASLRARTMALEAERRALDDRARSAQEFEATIRRRIEVLDRNQREQNACGEEQARRARELEETAAEVEASLRLREEAAAERDRITLAAKASADRRAEELRLREEACRERDAALAEREAEVNRREVALRRLGEQLAKREEAVAGREARHLESARAERAAISAKVSELEAREKDLVAGGPPGGAGLASQLAMAQSTLADLERLVQDQAGEIAALRLTNELGPGQLSDTVDWLEHAGRRVGISVRRDSKLPPTQPALALRLDGLAVDLERLEEEVGETIKSSSVSLARAAVELVLASHQARDPEFMPWHALEDFPPGTEARAREQVREAANAIVSSFEGSAPRFTSGLTADEENGSGGDDGDDD

SEQ ID NO: 167224 - protein, 49 aa, Oryza sativa
  unsure (1)..(49): unsure at all Xaa locations
  Clone ID: PAT_MRT4530_65856C.1.pep
FFXXXXXXTSXIPKNFVWPXQTSMHMQXLITWXXYXSSWXIXTPFPYEM

SEQ ID NO: 167225 - protein, 108 aa, Oryza sativa
  Clone ID: PAT_MRT4530_65857C.1.pep
MSTPSSPPIFFVRRIVCADDALVAVLLPRCFRWIVAYAPAPPCSARCCCHTHCAIAATGLCPPSLSGYCCCRTFVALLLASASIPAVMEARDRGVVAWEFEEDHRGAR

SEQ ID NO: 167226 - protein, 106 aa, Oryza sativa
  unsure (1)..(106): unsure at all Xaa locations
  Clone ID: PAT_MRT4530_65858C.1.pep
TPFWKKXRFQLIKNQVMKKKFCQKLRVEGKKFSXKKIRIVKRILQKLKXKKLRGVYFDKIKIKTQILLTFNLKTKFGISPXSKRGPGKKKTVKGVGEQHVKKKMEC

SEQ ID NO: 167227 - protein, 140 aa, Oryza sativa
  unsure (1)..(140): unsure at all Xaa locations
  Clone ID: PAT_MRT4530_65859C.1.pep
KTRGMGAGGMLKTHRRNQRWSDKAYXKRHLGNECNKAFVASSHAKGIALEKIVIEAKXPNSAICKCARVQLVQNAKKIAAFVSDDGCLNFIEEHDEVVIDGFDRKGHAVTDIPGVRFKVXKASGVSLLALFKENKEKTTS

SEQ ID NO: 167228 - protein, 167 aa, Oryza sativa
  Clone ID: PAT_MRT4530_6585C.1.pep
FRGPRGPDPVGRTPWAGPTPFRSDPRNFFPRAGNWAGWGRPAPAGPKMAFGGQPRIFRGGRRPKVFRFRKHHSGFFRKWLKAGPEPPEFNGGLGPANGRGPHWLKDLMPNWPNQVQTTTASSSSRTPPQRHHRGIMSNRAWKDLILAKGWNLTWDFEMDYGSKDRPS

SEQ ID NO: 167229 - protein, 113 aa, Oryza sativa
  Clone ID: PAT_MRT4530_65860C.1.pep
MAWSPRFSNYQSTSLSPVSTVPFHGLARYVFAAKGVGLYKDQIIRVHRIRLLSLSFLVHVVTRHQGPQQKQSARIVIFTQRRLCTATTTSMARSAADSNHPIKEHALADENGS

SEQ ID NO: 167230 - protein, 110 aa, Oryza sativa
  Clone ID: PAT_MRT4530_65861C.1.pep
NRSFQPACEVCLQSKWGLIKGSFSEVVVDDPIVLVGSFVLWCNQWACDEASKSRSPLDSATTAQVRLPCRLVSMVQLLVVLQFPIYCESFWFPERKRISIETRQKTDYCS

SEQ ID NO: 167231 - protein, 58 aa, Oryza sativa
  unsure (1)..(58): unsure at all Xaa locations
  Clone ID: PAT_MRT4530_65862C.1.pep
FGGLYFDRNLAQAQALWAFNVPSRYGYLXPRYYGPPSTIDHPLPCLVMEFYQYSGFGS

SEQ ID NO: 167232 - protein, 263 aa, Oryza sativa
  Clone ID: PAT_MRT4530_65863C.1.pep
MALTTRLMALTGLPLDMDMETKSASAIHACAIDLRKGPLFATPSASLVLRELVHEQANDLNDDDMDTTEAGIGDENEAFIDDKNENYMDFEYICHQLLAQGQKHVIRTQCKSKENHVKENIKQYKENHAKVTQIRTCNAGTRLYILAMDGLPKLTAKELKSQRARERYTALSVEEKAALVQRNRENRERKNSASTSGTEVRNSLFKEPVLHDAIKIGVNFRNQELLQPAEQNNAPGEPEVVIVEDDEVVIEPLPKKKRTGDKG

SEQ ID NO: 167233 - protein, 152 aa, Oryza sativa
  Clone ID: PAT_MRT4530_65864C.1.pep
MDGLSKLTANELKSQRARERYTALSVEEKGALVQRNPENRERKNSASTSGTDVAAIVSDVGPIDHYANFPNSVRKHILFVIFVLMDAEVRNSLFKEPVLHDAIKIGVNFRNQELLQPAEQNNAPGEPEVVIVEDDEVVIEPLPKKERTGNKG

SEQ ID NO: 167234 - protein, 384 aa, Oryza sativa
  unsure (1)..(384): unsure at all Xaa locations
  Clone ID: PAT_MRT4530_65865C.1.pep
MSAAPAASGWLRPSATARLCEAGFFTDYANPATTRICIGRRRSGAPRNIAGLQVASSNLGRCKIAHVKSGDADGYPTTEDLSIDEETLQRNLQTAIQEEDYSRAAKIRDDLRILHEDTKASLLAANTRFYNAFKNGDLAAMYSLWAKGDHVYVIHPAAGRISGYDVVMQSWEMXSQQVMSXRNKLANPRRVSSSSSQPAARAPPTDHTNPTATSTPSPQRERARRRSKQREREGEGGVALRREVMVLPLVKLGSLAFRTLSKPIAARLKHNAGIHPKFRGFIIGLAQVAGTAIIYEVQRSARAEARKEEIRKQEIEARKQRIEELASEVQMMKKRISEIERQQDERRALPNSRGSTTATPMQAASAAAAAAAKAKHQQPTAAAA

SEQ ID NO: 167235 - protein, 117 aa, Oryza sativa
  Clone ID: PAT_MRT4530_65866C.1.pep
MWSERGGMPAAVWEKVDDDRPGVVIEVNFDQWRGSGLCSGRSRGLARSRSCDKIRTKLSEELRSRTIRKSCDKVEIKVTHGGQTPCREVIATGFAKSTASVEIRKEIGIKTYFVCSV

SEQ ID NO: 167236 - protein, 652 aa, Oryza sativa
  Clone ID: PAT_MRT4530_65867C.1.pep
MHAGIRRSRSEPHLRCSRRGGAAGAALTTSRSIGVFPFQFGAAPLRTPPLPDGGGDGSRLLTVAGPDDEPDDAPGPEMPAARRRPDAHWLDRLLELRSRFHDPTKRHSSDNNGLIFQDDDDDDDVYHLDGDDGCGVNYEDDDEQVDDRWDRESFSKLLARAPLGEARLFAQLAFLCNMAYVIPEIKVEELKKYYGLRFVTSSLEKKAEAGEIRSKLDVDSTRPRAAPACEAAAATTSGPQPRRPIRSHLAYEVAASAASYVHARARGLLSFGGAGGQQPRAEEGGHGRLYNSGVAAYVAASTVTAVVAAEDEARQEAARDLRSPLSSPCEWFVCDEADARTRCFVIQGSDSLASWQANLLFEPTMFEETGVLVHRGIYEAAKGIYEQLMPEIAAHLAAHGERARLRLTGHSLGGSLALLVSLMLVARGVVGPEALLPVVTFGAPSVFCGGQRVLDALGVGEGHVRSVAMHRDIVPRAFSCRYPGHAVALLKRLNGVLRNHPCLNNQRMLYTPMGTTYILQPDGAASPPHPFLPEGAALFRLDPEGRAERPARHVVASALRAFLNSPHPLETLSDLSAYGSEGAILRDHESSNYFRALNALTRVPRRRKQPEIVWQLPGVERLQQYWWPGIAGTVFPAAPPVSVRNKELVSEA

SEQ ID NO: 167237 - protein, 110 aa, Oryza sativa
  Clone ID: PAT_MRT4530_65868C.1.pep
MARKGSRRRRGVAELTSREADGFPTSIGDDEGAAKVQFNTAESWEGLERIGVALIASGERLVVAMAVAWECGEKGDPTTIVGNGVVDGDPLVAARLVAVSARCGGGSGYG

SEQ ID NO: 167238 - protein, 51 aa, Oryza sativa
  Clone ID: PAT_MRT4530_65869C.1.pep
LIFMEASAKTAQNVEEAFVKTAGAIYKRIQDGVFDLSNEVKFFRNVCNVLR

SEQ ID NO: 167239 - protein, 57 aa, Oryza sativa
  Clone ID: PAT_MRT4530_6586C.1.pep
KVKCHQKLSQKAFRLEATWLVTSQKLLVHFCLKPPSSFQKGSWFDICIYYFVYSESF

SEQ ID NO: 167240 - protein, 265 aa, Oryza sativa
  Clone ID: PAT_MRT4530_65870C.1.pep
MGESCYVRRLSDLLQEQQEPFLLAGGASLADACRRRLLAFCHRRAAVSNKSRALGGLGAAVFCGAAVRRALLAGCFSCGARQSFRRLRHAGAGDIAAGCDVDDDEEEECARQLSPMSVLDLDINSDDESSSMLGVGHREKDDESPSTSGKSSPPPPPEQNPLDAAAAPCFTFYEAGKNCKAETGDEEEYETTRSKLEEQMIISSWERISGDISRIPALVELDLTGSLQQWRRLREEEASQVGASIEAMIFEEMRVEAVRDMMLVA

SEQ ID NO: 167241 - protein, 283 aa, Oryza sativa
  Clone ID: PAT_MRT4530_65871C.1.pep
MGFISGEELAVTLAPVAVYWLYSGIYEALGSVRALDRYRLHSRRDEESNNMASKKEVVKGVLLQQAIQVAISLAVLKLTSEKDGGAGDVKAGHASAPAAAPSSSSAAAALLDVAARFGVAMFVLDAWQYFAHRLMHSSRYMYRRFHSWHHRVVAPYAFAAQYGHPVDGVLTEALSGAAAYLASGLPPRAAAFFLAFATVKGIDDHCGLLVPWNPLHAAFANNTAYHDVHHQLSGGRRNFSQPFFVVWDRLLGTHAGYTVTARERNNGGGLEAKPICNDRHVLL

SEQ ID NO: 167242 - protein, 163 aa, Oryza sativa
  Clone ID: PAT_MRT4530_65872C.1.pep
VVVSATAPLSAQFRPQSAKVLAAAPLPRSPVIKSIDSPSRRKSRSSPPVARHPCRPDLGRRPPHQRQSSSLIVAFSSSSGSSSEPVVLQFISNEQTNRSSNQPISAPVVGARPPPARPSSSIAASRCRPPIEPASRRCSSSSSSHRPRLFLNFRSTSTPLFVF

SEQ ID NO: 167243 - protein, 359 aa, Oryza sativa
  Clone ID: PAT_MRT4530_65873C.1.pep
AVEPEKPASEVEAEVVGRWSRRERDDGGEEAAVSRKPLAAAPVVVDEEVTPLQLLARGARSSSAARRVVQEEPQVVEAVAARPSSRRSRREGNGDAGVKAVVPDAAAEVEPEIAGRWSSRRSEDGSEEAAAVLPKPLAAIVTGARSRSNSPAISNVNDDSFLLLVQAIGRNGVDTGAANRPPSTGRSTFAPPVGVNIRPLQAVEMPNGTPRERRAIYPDPTFAQSTRSRDSHDSSTITEELEMLKDENVNLLEKLGLAEERFRQSEARTRELEKQVANLGDGLSMEVKLMKRREEMLVRKEQEIRKALISKNDKSEEIATLQKQLQSAREKEAAAVQKLQEAESETISGETKSHNGMSL

SEQ ID NO: 167244 - protein, 1160 aa, Oryza sativa
  Clone ID: PAT_MRT4530_65874C.1.pep
FLGSHPHPRRFHWAFLQMQVPHSTWILDSGASRHVTGMPSEFVSFTPYPPTYKETVQTADGTSQPIKGVGRVQCTPSITLSSVLYAPSFPVNLVSISSLVDHMDCRVTLDRENCLIEERRTGRKLGIGIRQNGLWYLDRSGTNKALCSALAVGTSEEEARLILQHCRLGHMCFETMRKIYPDEMSKVDRSKLVCDACEYGKHTRATYISRGLRSISPFMLIHSDVWTSPIVSVSGMKYFVTFIDCYSRMTWIYLMKHKNKVLKCFKDFYAFVRNQFNTCVKIIRTDNGKEYVNNEFGSFLSIEGILHQTSCPDTPPQNGVAERKNRHILEVARSLMYTMNVPKFLWSAAVMTATYLINRTPSRILGMKAPYEMVFGCNEFIVPPKVFGCVCFVRDHRPSVGKLDPRAIKCIFIGYSSGQKGYKCWSPSERQTFVSMDVTFRESIPFYGEMTDLSYLFSDLDNPIMSEVRYEGVNESLGMEEGDESKRTKVVIGSIPCPMGKLPHEQNWRKPHEEENLQVYTRRKPRSLETQQEINDQSSYQSDPIQENTETGGEESEISGEESNLPIANRKGIRSTAGKPPIRYGFEEVEEENGNDIANYVSYSSLSPAYRAFIASLQSIVIPKDWREAKNDPKWHEAMMEEMSALEKNKTWELVPFPTGKKVVSCKWVYAVKQDPLGKVERYKARLVAKGYSQTYGIDYDETFAPVAKMSTVRTLISCAANFDWPLYQLDVKNAFLHGDLQEEVYMEIPPGFSTSQTKGKVLRLKKSLYGLKQSPRAWFDRFRRAMCGMGYKQCNGDHTLFYRHRGKKIAILAVYVDDIIITGDDTQEIAQLKENISKEFEVKDLGQLKYFLGIEIARSPRGIVLSQRKYVLDLLCDTGMLGCRPASTPIEQNHKLCAELGDPVNKERYQRLVGRLIYLCHTRPDITYAVTVVSRYMHDPRSGHMDAVYRILRYLKGSPGKGLWFKKNGHLGVEGYCDADWASSLDDRRSTSGYCVFVGGNLVSWRSKKQPVVSRSTAEAEYRAMSVSLSELLWLRNLLSELKLLMNIPMKLWCDNKSAISIANNPVQHDRTKHVEIDRFFIKEKLDEGILKLGFVMSGEQVADCLTKALSVGECTSSCNKMGMIDIYRPSIQQIKRICIGVLDLDGLDMKYSKLMTKT

SEQ ID NO: 167245 - protein, 71 aa, Oryza sativa
  Clone ID: PAT_MRT4530_65875C.1.pep
MAERDRKTRPDVAKGDQRDRRGGQQADCVVVPLVVKLSMRIKARSPVKDVIGIAESLDSGGSSADLSGGLQ

SEQ ID NO: 167246 - protein, 115 aa, Oryza sativa
  Clone ID: PAT_MRT4530_65876C.1.pep
MVHWYGAPAMGDGLAIGERHAATSFMQHGGRGCAASFASVGGDSVKICGSCGFTELGSALATSWASNHHTHGTKSNPAPYGDIAIPTMNGHSHKEDAEEARIYHPLGTMRSGTAV

SEQ ID NO: 167247 - protein, 61 aa, Oryza sativa
  unsure (1)..(61): unsure at all Xaa locations
  Clone ID: PAT_MRT4530_65877C.1.pep
YATKIVEKAGLVGCNPCATPMEPRPXLAFAVGYVSWFMERPTDEHLAAVKRIVRYLAGTIH

SEQ ID NO: 167248 - protein, 79 aa, Oryza sativa
  Clone ID: PAT_MRT4530_65878C.1.pep
GRISWGGCCKVESDENEDGDEVPCNRGVGVGFPVVVPNGGGRLLFPVSYFRGRCWVQYVWGPGKHCISCPCELNRFECL

SEQ ID NO: 167249 - protein, 598 aa, Oryza sativa
  unsure (1)..(598): unsure at all Xaa locations
  Clone ID: PAT_MRT4530_65879C.1.pep
VKTVFSTLQYIDDRNHPMIFVGXEPRSKAXRAYDPGTRRVHISRDVMFDEASQWRWDGETASDLYTDFVIEYNTVYHPSAKAGQHQGHNGSPTPAATSSRTTSSSPARGXTPSVHRDASEVEFVSPPLGAKENLDADHDDVLLRYRTIENVLGSAAPLGLAXREVLEELMLVSGEEHVSFRQAEQEEASRRAMLDEIASIEENKTWRLVDLPPGHRPIRLKWVYKLKKDARGVVIKHKARLVAKGYVQXAGIDFDEVFALVTRLDSLRLLLALAAQEXWNVHHMDVKSAFLNGELAEEVYVAQPPGFEVEGEETKVYWLVKALYGLRQVPRAWNTKLDCTLKKLGFVQSPLEHGLYARGAGGSRLLVSVYVDDLVIFGADDAMIGDFNKQMMVEFKMSYLGPLSFYLGIQVXSEGGAISLNQAAYATKIVEKAGLVGCNPCATPMEPRLRLSKESTTPLVDATEYRSLVGSLCYLVNTRPDLAFAVGYVSWFMERPTDEHLAAVKRIVRYLAGTIHLGCRYTKGGEKKLQGYSDSDMASDIDTRKSITVXGVLFFLGENLISWQSQKQRVXLSSYESEYIATGTPSSNGFIFSQNMAL

SEQ ID NO: 167250 - protein, 49 aa, Oryza sativa
  Clone ID: PAT_MRT4530_6587C.1.pep
LVFARDSSPLGGAHFHSGTPANGLQHWLSPSTSMQHDCRSHQELITWHE

SEQ ID NO: 167251 - protein, 236 aa, Oryza sativa
  Clone ID: PAT_MRT4530_65880C.1.pep
MRKEKIPHQAPFAIQAAQLLGRAIGAGLFAITPAGERGMCCKAIMVGNPNPQTIIDMKALVEEYHISMVKRGIRNVDSSQYTQDSILVGPYHRNPDQRMEPVKLAALHGALPGDEQEQRSTLHRYLGEIAAANFLAEVRRYYADGANKFDDLTPSKLLLVDGFYILHCFGIGRFGGGSSSSGGEMCAQDNIEHIRDVFYLLENHIPFFVLVKIHDLFFPPETSPIKSTAEIVLDNL

SEQ ID NO: 167252 - protein, 94 aa, Oryza sativa
  unsure (1)..(94): unsure at all Xaa locations
  Clone ID: PAT_MRT4530_65881C.1.pep
ALQNKKTPPSWLKTSAXNGEEINMKAAKKGQMPSHIGVVLRDQHGIPHVKSMXSRMILRIXLRAHGLAPKIPEDLYLLIKKAVGNRKHSERNRK

SEQ ID NO: 167253 - protein, 31 aa, Oryza sativa
  Clone ID: PAT_MRT4530_65882C.1.pep
GWSGGDDGGSRLHGARALPTARDEGEGGGGM

SEQ ID NO: 167254 - protein, 384 aa, Oryza sativa
  Clone ID: PAT_MRT4530_65883C.1.pep
MQSRHRVFAEDLLLPREAEGEDHFDRVPDSLVLLIFNRLADARSLGRCSAVSKRFNSLVPLVDDACLRIDRVITDAADADDALGLAGPRPAGRGVLSHLLKAMLLAVLKPFGHCDAGVRGGGGGERAGKHGGGGGGCGAQQHHSPAQVLKNFSSIRNLRMELPVSDVGTDDGVLLRWKAVFGSTLQSCVILGGTRVDRAAAPAAAAATATAAGDSEASQGDDTGSIPESFYTNGGLKLRVVWTISSLIAAATRHYLLREIVKEHPTLERVALTDAHGQGTLSMGRDQIREFRDKPLAAAAAANRTQVPACNMKLRYAPMLELSDGTRIQGATLVVIKPVGEAGGIGGGRKELDEFVADAFDGPYREAVSALSKRRTYLLEMNGF

SEQ ID NO: 167255 - protein, 67 aa, Oryza sativa
  unsure (1)..(67): unsure at all Xaa locations
  Clone ID: PAT_MRT4530_65884C.1.pep
XXXXXXXXXPXXXFPTKRKPLXFXXPPXKQXQXXXXTXXXTXFXQXXXNPPXPXWXXXXSKTXXXPP

SEQ ID NO: 167256 - protein, 83 aa, Oryza sativa
  Clone ID: PAT_MRT4530_65885C.1.pep
EERNGGNLFIYLFSYSLSGWQLKRIPAHYKRLVSSVLEGSEWTESSPLCMVEPLSSSLEMGYGFGRTSVGRARKMDSFLECGV

SEQ ID NO: 167257 - protein, 177 aa, Oryza sativa
  Clone ID: PAT_MRT4530_65886C.1.pep
LLIQFYLYIASHKLAVYTMYIRRVSIGATLVTWATSYRRHPCPCRPAAGLRLRRRRQAPAVTTAWEDLVRWRRRRQHCPCGGAGFEALVEFSASLDAGGKILHRRPLPADRFDAGSNGTTDDLLDGLGQALSGGFQALQGRHGRDTIGAVEGGGDGEEEDGEREETTLRHALLCLYP

SEQ ID NO: 167258 - protein, 164 aa, Oryza sativa
  unsure (1)..(164): unsure at all Xaa locations
  Clone ID: PAT_MRT4530_65887C.1.pep
AAGSVRSRSTTRPGGKNGVAPPRPIQSPSARPVPRRRGXAXARRRSAMADDSVAPHXDSSSLPDLYCTPHRSRXELVLPGMAGDFSLSASLSACTLLYEGAVEPMQIDVDPQEDPQNAPDVNYVVENPSLNLEQYTVSYSDLMHMERVRIIGNDCPTLESEGPE

SEQ ID NO: 167259 - protein, 399 aa, Oryza sativa
  unsure (1)..(399): unsure at all Xaa locations
  Clone ID: PAT_MRT4530_65888C.1.pep
RRSRSALAVVPATPSPPSPPQLTSLLALLASSVSLALRFASDRDLLLHPSQTLELDPLVLAAARGVSXCSRCSRSTSTSWFLRLLSESHSLPDSAWRDAFRMSRPAFFQLLHSLALSDPAALGAALFRLAHAAPARAVARRFGLPSPAVAARAFYEVCRTIADRLAILLDLGAPDRIARAVPGFCALSLPNCCGALGYARIGDAVIAQALVDAEGRFLDVSVGWDTAMAPAEILPRTKLYSSQSLVLANAPHGELIGGSVPRYFLGPACCPMLPWLVTPYNDMDAKNGMSKESIFNNVHSHGMRLVRNAFGHVRSRWRLLDECWKGECQEALPYVVVAGCLLHNFLIKCVEPDPEEIQEGAAAELFSDFEGEKDKEGERIRDDGEDCTGKKKEAKISCK

SEQ ID NO: 167260 - protein, 240 aa, Oryza sativa
  Clone ID: PAT_MRT4530_65889C.1.pep
MKFEDYLKDSSLSEPHNRQNLEKEVVQLQAHLKCEEALNRVLRCALHGPVFSLPLIPPLFPPQVRGLLEELAMVEEEIIKLEKKVKELELRLFQERYQNIDLEIHHRRQSKLYKHFRGSSRYGSMITEQKSSSLHYEVISKGRKTSNRRASLGSALDFHSLFSTPRRSTEYEVPRRSSGKIAREYPMHIEDAIEKPNELSEELLKCLIGIFLELNRASLDREESETVPRLTLPCMKSTGL

SEQ ID NO: 167261 - protein, 105 aa, Oryza sativa
  Clone ID: PAT_MRT4530_6588C.1.pep
MGSGDGGCQPKPLSPMAEGLRHGPVKAVLHLPAEEALRNAEASGGGGSGRGVGGCEGGGGGKCEEEGGRVVEVAMEWHERQRRGKRLGPAAKYDHTPPHIIFYGQ

SEQ ID NO: 167262 - protein, 59 aa, Oryza sativa
  Clone ID: PAT_MRT4530_65890C.1.pep
KPDGSYNIHQSIIQYVQALLHRAIERESGLQWLLGHSRAQGELGDLDPCFKGDWVLQGV

SEQ ID NO: 167263 - protein, 435 aa, Oryza sativa
  Clone ID: PAT_MRT4530_65891C.1.pep
MVAAGRKRRSRSALAVVPATPSPPSPPQLTSLLALLASSVSLALRFASDRDLLLHPSQTLELDPLVLAAARGVSRLLAMLPLHLQTLTLTSMSLSPPAPSPPLPSSWFLRLLSESHSLPDSAWRDAFRMSRPAFFQLLHSLALSDPAAASSSSLALPPDHKLGAALFRLAHAAPARAVARRFGLPSPAVAARAFYEVCRTIADRLAILLDLGAPDRIARAVPGFCALSLPNCCGALGYARIGDAVIAQALVDAEGRFLDVSVGWDTAMAPAEILPRTKLYSSQSLVLANAPHGELIGGSVPRYFLGPACCPMLPWLVTPYNDMDAKNGMSKESIFNNVHSHGMRLVRNAFGHVRSRWRLLDECWKGECQEALPYVVVAGCLLHNFLIKCGEPDPEEIQEGAAAELFSDFEGEKDKEGERIRDVLAVHLSLVSRNQ

SEQ ID NO: 167264 - protein, 125 aa, Oryza sativa
  Clone ID: PAT_MRT4530_65892C.1.pep
MGRGAAAVMGRHRDGKRSSRRCNGQGRRRHDESRSSSRRYDGQGRCRCNEPPPGREAELPPPPPPTGYGSRRRRPPDADPTATTDRNRMHPYTKRQNYPSTPLSIPGLGDKSNSLLGPRVQHLQT

SEQ ID NO: 167265 - protein, 77 aa, Oryza sativa
  Clone ID: PAT_MRT4530_65893C.1.pep
MGGGNGQKSKMARERNMEKNKGAKGSQLEANKKAMNIQCKICMQTFICTTSETKCKEHAEAKHPKSDLTACFPHLKK

SEQ ID NO: 167266 - protein, 165 aa, Oryza sativa
  unsure (1)..(165): unsure at all Xaa locations
  Clone ID: PAT_MRT4530_65894C.1.pep
CPPTPPPPPPPRRRRRSFLRRHLPPLAAGAVASSRPRTPRSPRPRRRRHRRRRRRRRPASPSRSLPSRRRPRRSTTASSPRSAPPPCPSPGSTAQASPRRPRASTSTTAAAAAAGRSTPRRXPPAVPPLQQGGGRRRRPRRRRPPRRLRRRRRREGREEEESAAA

SEQ ID NO: 167267 - protein, 88 aa, Oryza sativa
  Clone ID: PAT_MRT4530_65895C.1.pep
SAAAARCSWARRSTCARAPARRPARRRRRRRRGPGTRRVAPRRTAGAAPSPPTPAPPGRAARRGRRGTPASRTRPAPPPSRSRTASSP

SEQ ID NO: 167268 - protein, 214 aa, Oryza sativa
  Clone ID: PAT_MRT4530_65896C.1.pep
MWSPHIIPSLFSFLLHLSLLSFISHGAIGGLGGDGGWELERAAVVGKGSPPASGAAEAKQSGARTKKPPPPLAAAAFLGPDSPIQETSQTAYISPTPQDPRPHGAGVAVAPMGVILGKEVDGFSPPPLVLPKSCFDTVRVVDAFPLPRCAGGAFIQAIDLRYIEGMLAMLNKTDRYGISIISTVAPETFAVNHQSLLKDNNPSASKLIMPRPAE

SEQ ID NO: 167269 - protein, 94 aa, Oryza sativa
  Clone ID: PAT_MRT4530_65897C.1.pep
VHAYAHAFGSSSGSGFAVDMAYGDHIELLQKRHVRRLDYNERMRRAGGARGAQATHGCDESCLELRIGCYSRLTLPRQHRCRRPCICTTSQLLS

SEQ ID NO: 167270 - protein, 170 aa, Oryza sativa
  Clone ID: PAT_MRT4530_65898C.1.pep
MATLARVSLPSVLLTLRHGATTQGFAAARPAAVVAKRLLGSVRCGGAAEALGADMAVPRSVPVRVAHELQQAGHRYLDVRTEGEFAGGHPVGAVNIPYMYKTGSGLTKNTHFLEKVSTTFGKEDEIIVGCQSGKRSLMAASELCSAGFTAVTDIAGGFSAWKENELPTNK

SEQ ID NO: 167271 - protein, 73 aa, Oryza sativa
  Clone ID: PAT_MRT4530_65899C.1.pep
MEVEGGGTGSFPRLKGMAPKEDGGLAMGVSEAPVATLKPLGWRRVTNKVDAGVKGGGGNDILHKHAHIGEERH

SEQ ID NO: 167272 - protein, 175 aa, Oryza sativa
  Clone ID: PAT_MRT4530_6589C.1.pep
RQPFRGHHVERERERERARRRRRRRRRRSHGACGAGHLHPRGAQVHHRLRRGVPRSSAWGRVPRGGHHHVPYAGRRRAVPRLGVPPTEQAGPRRRHRRGGGPRHRRVGSQPPGGRREQGPDASPEECGLVYPEQRQVGRRGRRRHLPRQDAPHRQPHPQGRTPLPHRALHPNRSP

SEQ ID NO: 167273 - protein, 450 aa, Oryza sativa
  Clone ID: PAT_MRT4530_658C.1.pep
SIDRFDPGGGGEGGSSAEAMEEDPLIPLVHVWNNAAFDDSSCSRSAWLPQSPAVAAVRKGDKENHRPEVVDVAAGYDVEAEIGHIEAEILRLSSRLHHLRVSKQPEPNRDDAPMGEMVAKVRPRPRGLSLGPLDVISIVNREKHPLRTKKPPATRGRGLSLGPMEIAAANPRVPAAAQHQQQQRAGTARILKPIKEPPVQRRRGVSLGPLEIHHGVGSKAPAAARAKPFTTKLNAIREETRPSKQFAVPAKPWPSSNTRQTLDSRQGTAASRAKARSPSPRPRRQSNGKATDTRGGNKVVDELKPKGASSSQSGSAAAAATAKRMAGSSKMRVIPSRYSLTPGASLGSSGAQERRRKQSLPGSSGDANQNEEIRAKVIEPSNDPLSPQTISKVAEMLPKIRTMPPPDESPRDSGCAKRVAELVGKRSFFTAAAEDGRALDVEAPEAVAEA

SEQ ID NO: 167274 - protein, 103 aa, Oryza sativa
  Clone ID: PAT_MRT4530_65900C.1.pep
LPHHRPQLPRAPAISGVSGGPVPPHLLLHPPAPDAGGPLPPSSPCPVGCSSASNIRHASSSGHIAKMKALLSPSQVCWPASSSRRTNSSSSSTSTLDHAVLLI

SEQ ID NO: 167275 - protein, 173 aa, Oryza sativa
  Clone ID: PAT_MRT4530_65901C.1.pep
MRWFDVPGCFCFHIWNAWDEPAVVIVCSCITPPDALLSSVRAVLSEVRLDLRTGRYSRRELVPGLNLEAGTVNRSLLGRRTRFTYLAVAEPWPRCRGVAKVDLGTGELAAVHEYGEGRFSGEPTFVPATSATSGTGTGGREDDGHVVVMVHDEAAGTAELVVLDAGKMEVAAT

SEQ ID NO: 167276 - protein, 104 aa, Oryza sativa
  unsure (1)..(104): unsure at all Xaa locations
  Clone ID: PAT_MRT4530_65902C.1.pep
MESVSESETTLGSSMNMXTLTMRGIIKMIEXNLXLHYLENYELIKDNRIALLLALSGTGAXSYYXDMQNRFLPHSQIYIPTPTXSIHHIIWRDAXLPQKTFTYY

SEQ ID NO: 167277 - protein, 192 aa, Oryza sativa
  unsure (1)..(192): unsure at all Xaa locations
  Clone ID: PAT_MRT4530_65903C.1.pep
LAAQRILAVAVFGSPTKPSPHRQPSASSSVISPLPXEHRRLLRRHGQERRAVTKPFHPASLPSLVRPLRRHVRPRAPXTGFLPARRALGPAGAALGSLEPPQTVALPDSLPPRMTARRRRPSPRRILSSPPSWSPLDSPRTAALAAGLLSCSHVVPPDSPPRHTAALCRRFPPXSSNPLATTFLGPLLTSPL

SEQ ID NO: 167278 - protein, 442 aa, Oryza sativa
  unsure (1)..(442): unsure at all Xaa locations
  Clone ID: PAT_MRT4530_65904C.1.pep
QPPLSTASSSLFPSRARPLSLCPRLFARGGREPLTPVRQLAAPTLTAPARAPRSNSTARSTDPAAQRILAVAIFGSPTKPSPHRQPSASSCAISPLPXLLRRHGQERRADTKPFHPTSPPSLVRPLRRRIRPRAPPTAFLPFPSSNRRRRHSSPIGELPVPFPLPYAVLLRSRFHSSRHRPPRHALFPPPLRSAERRHWPPSRRLPAPPPALSSLEPPQTVAPAAGLPSNSGTMSPDLPPPRMTARRRRXIPSPYPLVSTLLLATTFLGPLLTSPLLPRGRRPPLQLSRRAALFAAAQRRRASNTGDHRPPRPMRVRRNTTPIRSNHSPRPLFPSHRVSTSAIRRASPPSPAAVAPLLSDLIRGTDSPPPPLASSACRPLRFAAVRRSAPSAVGRPMSRPASSPFPVRRGVHVDATSAATSVDRKPWLSAVRKVSAAGIAQE

SEQ ID NO: 167279 - protein, 512 aa, Oryza sativa
  Clone ID: PAT_MRT4530_65905C.1.pep
MWSHMSSSLFPPPLLSFSPLHCKRWVEELGADVGDGFSPNPPPLSTIDELGQRLAAAFSFPSFRRAARPLSLCPRLFARGGREPLTPVRQLAAPTLTAPARAPRSNSTARSTDPAAQRILAVAIFGSPTKPSPHRQPSASSCAISPLPINPTHRAPNPPSTSVAVARSTPEHRRLLRRHGQERRADTKPFHPTSPPSLVRPLRRRIRPRAPPTAFLPFPSSNRRRRHSSPIVAPAAGLPSNSGTMSPDLPPPRMTARRRRPSPRRILSSPPSWSPLDSPRTAALAAGLLSCSRVVPPDSPPRHTATLCRRFPPPPPLSSNLLATTFLGPLLTSPLLPRGRRPPLQLSRRAALFAAAQRRRASNTGDHRPPRPMRVRRNTTPIRSNHSPRPLFPSHRVSTSAIRRASPPSPAAVAPLLSDLIRGTDSPPPPLASSACRPLRFAAVRRSAPSAVGRPMSRPASSPFPVRRGVHVDATSAADPTRPSQPLPSQPPPFSLPVRGPGPSTSSPSSAH

SEQ ID NO: 167280 - protein, 71 aa, Oryza sativa
  Clone ID: PAT_MRT4530_65906C.1.pep
MAAHLLLLTSPSCMVTMTTASAGALPAVGHLATARSTWHISFPSFGFARLAEKKDQKAKTGLIDRNRSLHF

SEQ ID NO: 167281 - protein, 238 aa, Oryza sativa
  unsure (1)..(238): unsure at all Xaa locations
  Clone ID: PAT_MRT4530_65907C.1.pep
LAAQRILAVAVFGSPTKPSPHRQPSASSSVISPLPXEHRRLLRRHGQERRAVTKPSHPASLPSLVRPLRRHVRPRAPPTAFLPVRRTSSHPAVLCSRRRRARLSATVXPPSRRLPAPPPALSSLEPPQTVALPDSLPPRMTARRRRPSPRRILSSPPSWSPLDSSRTAALAAGLLSFSHVVPPDSPPRHTGALCRRFPPXSSNPLATTFLGPLLTSPLLPRGHRAPXQXSRRAALFVA

SEQ ID NO: 167282 - protein, 110 aa, Oryza sativa
  Clone ID: PAT_MRT4530_65908C.1.pep
MDSRWEQPGLCIFANHRPPALGGAALLADTRTRDGSGRKGKGRLMVGAARRKGEKWKAAWFIALDFSSAATRTDPSCYCGGRRRKLMAVTGEGVRKVGPEAAEGAVHLRD

SEQ ID NO: 167283 - protein, 91 aa, Oryza sativa
  Clone ID: PAT_MRT4530_65909C.1.pep
FKLLGTSNNTGLHSIKIPMGGGRTKLLAGYLNLLLLPSFFFFFFFFWGGSLLRPLKGGGGKKNEGPPPLEAPPLNDQKYRAGEGYFSPSTD

SEQ ID NO: 167284 - protein, 95 aa, Oryza sativa
  unsure (1)..(95): unsure at all Xaa locations
  Clone ID: PAT_MRT4530_6590C.1.pep
KVVLPEGSPSPQAVVPFLMEQYFEASYSSPYVVGRTXVVLKKRNVVGEPNVPFPGYLEFNPIFMLAEPLMLISPVFLFFVACLAYLPMDLSLGKS

SEQ ID NO: 167285 - protein, 137 aa, Oryza sativa
  Clone ID: PAT_MRT4530_65910C.1.pep
MRSYGMEQDDSSGGDKDGMVEGIGGDGEHAPSRHSSSRLRIVDGGSRRLRSSPLRPAPPPPPPVPHPSVCAPGVGATRSYTWSGHSCAIPAALTLRTADSHGFLSTLVGCNSGQPEITTDDTDEATPTTAAAAETTD

SEQ ID NO: 167286 - protein, 52 aa, Oryza sativa
  Clone ID: PAT_MRT4530_65911C.1.pep
IRVIQPGHFQMAKGHIVDSQLGAGDAFYGLLDSPVSSCRANAVRCTLEFCSA

SEQ ID NO: 167287 - protein, 451 aa, Oryza sativa
  unsure (1)..(451): unsure at all Xaa locations
  Clone ID: PAT_MRT4530_65912C.1.pep
MKPNSRVFPLSLKPHLQIQFPNLVSSPAPNPAAPTLTVPARAPRSNSTAXSTDLAAQRILAVAVFGSPTKPSPHRQPSASSSVISPLPINPTHRAPNPPSTSVAVARPTPEHRRLLRRHGQERRAVTKPSHPASLPSLVRPLRRHVRPRAPPTAFLPFPSSNRRRHHSSPIGEPLSSLEPPQTVALPDSLPPRMTARRRRPSPRRILSSPPSWSPLDSPRTAGLAAGLLFCSHVVPPDSPPRHTGALWRRFPPFXSNPLGNTFLGPLLTSPLLARGHRLSLQFSRGARLLVARAXRRTSNTGDHQPSRPTRVRRNTTPIRSNHSPRPLFPXHRVSTSAIRRASPPSPAAVAPLLSGPIRGTDSPLPPLAFSACRPLRFATVRWSAPSAVGHPMSRPASSPFPVRRGVHLDATSAADPTRPSQPLPSQPPPPXFSLPARGPGPSTSSPSSAH

SEQ ID NO: 167288 - protein, 162 aa, Oryza sativa
  Clone ID: PAT_MRT4530_65913C.1.pep
MSTSTSPPSASATEYVEFPMFRRRAFTLRKVGYEHMVLMVVLMTIKDQFASYCCETLTVPTTSQCGQQLDEDIPSSHSSPPPNKRASDIVGPITRSRAKQLEKEIHSQVNANLVLTNQITLDEPMLLSTCFNVLRNDGVHERTWDDDGFYPPNIWTKEPGRA

SEQ ID NO: 167289 - protein, 96 aa, Oryza sativa
  Clone ID: PAT_MRT4530_65914C.1.pep
MVMVPAAHTECVHWHGKCTLSLDDRCPQHHNVKTHVPVILDMKSLNYTKWRIFFIVAFLGKFGHRGRWSSRKGDEDGYVLLHPVPVASIGGGSSST

SEQ ID NO: 167290 - protein, 337 aa, Oryza sativa
  Clone ID: PAT_MRT4530_65915C.1.pep
MSGPGGGGHGLYEDHPAAAGFLPFDHDDDVVASFFFGRSAASGGGAGAGAGAGDDDGVGLITPYSSITDYLQGFLQDPVYASSPLGGDAAVKHETVVDHPSQAGGVAAAPATPNSSVLSSSSEAAGGDDLRRCKKGRRPEDEEEEEIDDEGSAVQSCKTNKMKNKKGAKKEREPRVAFMTKSEVDHLEDGYRWRKYGQKAVKNSSYPRSYYRCTAPRCGVKKRVERSEQDPSMVITTYEGQHTHPSPVSYHMHRQQGLMHVSARGVMPGAAGAYQFGAPPPPLLGFDEALAARVRMTMNQQQQQQQLGFVPSIHAAAARPTMPPLHLYTAQQDLFLP

SEQ ID NO: 167291 - protein, 162 aa, Oryza sativa
  Clone ID: PAT_MRT4530_65916C.1.pep
MGTPRQVPSRLGHRFLRGHGDRPRKARVLQQGCAAVLGFAMVDDCNVSIAALGVQVDQGPPVRPPPSDLGPHETRLRRQPVKIVVLFGSHTADNTHYSFFPELSRPLTQPLPRLGSERQRKPANRGARHGARPALQLRAITLFPFCPSSALLPPQPRPPARH

SEQ ID NO: 167292 - protein, 267 aa, Oryza sativa
  Clone ID: PAT_MRT4530_65917C.1.pep
NGNAALLGRARRFRGFADCVARTVRDEGVLSLWRGNGTAVIRYYPSVALNFSLKDLYRSILKDAGTSADNKFSSIALTNFIAGAAAGCTTLVLIYPLDIAHTRLAADIGRTDTRQFRGICHFVQTIYNKNGIRGIYRGLPASLQGMVVHRGLYFGGFDTAKDVMVPLDSPLWQRWVTAQAVTSMAGLISYPLDTVRRRMMMQSGMDVQMYSSTLDCWRKIYKVEGIKSFYRGALSNMFRSTGAAAILVLYDEVKKFMDRDFWIQYGD

SEQ ID NO: 167293 - protein, 91 aa, Oryza sativa
  Clone ID: PAT_MRT4530_65918C.1.pep
MEEDDEESSLSAPSPEPERPRHLHAADLPRRADRVSFTTMMTDPKSTLDTRNTPHLLEALVRTDIPMAEGSHVTIKKATKLQIASIFHGYG

SEQ ID NO: 167294 - protein, 127 aa, Oryza sativa
  Clone ID: PAT_MRT4530_65919C.1.pep
KKTQKKPQKKKQKRENPRNGPGRKGGKRKDRHQRGRKKKKKQRTKQNTPREKKTATKRTPKHKKEGKKIEKAKGAGPAKTPAGEKGMDRKANKVGNPTDFPGKTMENGHPPHTKGTPKKSKKKASTR

SEQ ID NO: 167295 - protein, 350 aa, Oryza sativa
  unsure (1)..(350): unsure at all Xaa locations
  Clone ID: PAT_MRT4530_6591C.1.pep
MFGFGHHGHHGQDQPPQHHGGGGGGAHQPTFKIFCRADEGYCVAVREGNVVLAPTNPRDEHQHWYKDMRFSAKIKDEEGNPAFALVNKATGLAIKHSLGQGXHPVKLAPVQPXETPDESVLWTESGDVGKSFRCIRMLNNIRLNFDAFHGDKDHGGVHDGTTIVLWEWAKGDNQCWKILPWGDEAYAGGSANAPRGGNEPTVRIFCKADEGFSVTVRGGSVCLAPTNPRDEYQHWIKDMRHSNSIKDEEGYPAFALVNRVTGEAIKHSQGEGHPVKLVPYNPGYQDESVLWTESRDVGHGFRCIRMVNNIYLNFDALHGDKDHGGVRDGTTVALWKWCEGDNQRWKIVPW

SEQ ID NO: 167296 - protein, 70 aa, Oryza sativa
  unsure (1)..(70): unsure at all Xaa locations
  Clone ID: PAT_MRT4530_65920C.1.pep
KCGCPRWWPDGIFTCLTTTXHGTPVGWYELCDHVTGWLRTTDGCHASRNFGXAPFPKIXXISLLFYLDFI

SEQ ID NO: 167297 - protein, 413 aa, Oryza sativa
  Clone ID: PAT_MRT4530_65921C.1.pep
MRRCGSSSGGRFTGGGGQKGRWPGFEGKRAAPVVKWSHAEAMKKKPSGRGDAAVTGDGGGWMRRLEEEEAGLELDGSCWGSWSEAAATRASGTATGGAGKHVRFRPEAEAEAKRERPFDAGEWGGGGGGEVGGDGGEGRMYEWRWTEAVSPEILALILRGRVDADEVARGAARVCRAWREAAAAPDVWGDVDIEAWCRRVNCRPRADAAVRRLVALARGTLRQLSAYRVGDAALAYVAASGKLLNVLQIPMSEISDQAVKKYAEFLPALRVLDISNCLKISSSGIEALGRHCKLLVQLKRNMPPPDVPHGYNAVPNVVNDEALAIANTMPVLEHLELAYGLFSDTGLGAILTRCPRLQTLDILGCWNVRLEGDIELRCCALESFREPWEPMYSDCSSTGSDNDDDDEDNDSDN

SEQ ID NO: 167298 - protein, 101 aa, Oryza sativa
  Clone ID: PAT_MRT4530_65922C.1.pep
LSLSGTPPGAPRLVSPVVGPSRTEQQGRAGTKPFRKVGASSDRASRKEPGGGGGVTRRRRARSSIGWKDQHDYIRTSRRRLTRRRRSRPRGRAGSHTAGVR

SEQ ID NO: 167299 - protein, 66 aa, Oryza sativa
  unsure (1)..(66): unsure at all Xaa locations
  Clone ID: PAT_MRT4530_65923C.1.pep
MRLSSYDPSMEDEANLRQSFTEVVDYVNXRCSRTHQDNECIMCAHNLERHWILIVTAPKSSMVTYL

SEQ ID NO: 167300 - protein, 144 aa, Oryza sativa
  unsure (1)..(144): unsure at all Xaa locations
  Clone ID: PAT_MRT4530_65924C.1.pep
DAVLDACLARGHLTAGLXETCTATNMXVGLWGDDHTQLTMTTEKTARDTCRTSHLRHDDDGLDADLCVELVNCELPTLYLGQGVHGHCTHRPEEIGAGDHRHLFVYATAETPELMLLRLVLATKLRRSSYGEVARMGPAHVLRL

SEQ ID NO: 167301 - protein, 187 aa, Oryza sativa
  Clone ID: PAT_MRT4530_65925C.1.pep
MPAVFTIGLCDIKKFNSGWIPFDVISEEVAGGGDSDCRSSRSRKRWEAGKQRAEEDDGVAEGYGGGRGGGGWVGWRRRRWWRWRRGKGERGTAPSRSAATYPTQNQKLHPFAVHACLLMTKPDDHDARAHDASCVVYLHRVVERCDGGTYASGRTARGCRTAGGVRCRTDAEPLADLSAREPIGRLV

SEQ ID NO: 167302 - protein, 225 aa, Oryza sativa
  Clone ID: PAT_MRT4530_65926C.1.pep
MPYETPTNIPDGMDIDAPSVAPMGGNVHFSEENTFVEPPENDDVGDTLYDEDTNEVENRIGNGTENTIADDDVRLPDEIVIGYSDNEDSVNTLIEYVFPSLDDERNTTSVEYMSTRAILSTKNDFVDKLNTKMIDRFPGKEKIYLSFDSVDDDPQNSYSLDFLNTITPNGLPPHELKVKGRAPRISSIKTFLTGEQSTPSSARCVPNSSSKGTRSQYTGKIFEAE

SEQ ID NO: 167303 - protein, 77 aa, Oryza sativa
  Clone ID: PAT_MRT4530_65927C.1.pep
MGRDRISTRARAFVRVRRSVSLETVGDRVRPILSVQHPVTPWRLIRGRLQKRRAFIIKNLPPALLLHTDAVPVLSLC

SEQ ID NO: 167304 - protein, 1967 aa, Oryza sativa
  Clone ID: PAT_MRT4530_65928C.1.pep
MVVQNGWAYATGVDATRPQTEERIAFGDITNRLDVLQTTPLTPSNEVLHKREAANRRQRECRARKKAAAITPCSGTLMQPTTASLSMGSEVVNARLAETTKDAREERNRKQREYRQKKKLGLTNLDGSVSSLTPVQPANEERNRKQREYRARKKAESNIVSGSNSESTNHNVSPYGTTYSTVLQATSVLDKEAVDLDDPVDWLHRNDTYQRQCRKRKVVSIEHDQHSPILDGVTQDESIPVQAVHQDVPSSDYIEFDSRLFEPLLNNYDDEGNVELTQTCDVVDSDDEELQNKDDSYESYRLDIKGVNSVDTEDPYDYVYHNLPKKHHVLKKVANCKYCGAIRFQYEPPGFCCRQGKITVATPLVPLELVRLFTSQVDNDANYFRKHIRYFNSHFSFTSLGVTLDHNVSTAAGTGVYTFQVHGALYHRLDNLVPGSHGPRHMQLYFYDTEEDTDLAHRANRSPDLDINLVRIILRILADNPYVETFNRVGSMPNLDDYKIEINTNVTPDQRRYNAPTTSQVAAIWLEGDDPVRTFDRHVMVHAKGEKPSYIKAYNGCYDLLAYPLFNPNGETGWNVKMPYETPNNIPDGMNIDAPSAAPMGGNVHVSEENTFGEPPENDDVGNTLYDEDTNEVDNRSCKRKKDRFVTAREYYCFRLQGVVNVINSGETRGKEVGKRIVLPRSFPGGDRDMQRWFLNAMALVQRFGRPYYFITMTCNPNWEEITENLYPGQQPQDRPDLVARVFRAKLRDMLDLFTKKKYYGEVQAYAHVTEFQKRGLPHEHILLIMKPENDDVGNTLYDEDTNEVDNRSCKRKKDRFVTAREYYCFRLQGVVNVINSGETRGKEVGKRIVLPRSFPGGDRDMQRWFLNAMALVQRFGRPYYFITMTCNPNWEEITENLYPGQQPQDRPDLVARVFRAKLRDMLDLFTKKKYYGEVQAYAHVTEFQKRGLPHEHILLIMKPENDDVGNTLYDEDTNEVDNRSCKRKKDRFVTAREYYCFRLQGVVNVINSGETRGKEVGKRIVLPRSFPGGDRDMQRWFLNAMALVQRFGRPYYFITMTCNPNWEEITENLYPGQQPQDRPDLVARVFRAKLRDMLDLFTKKKYYGEVQAYAHVTEFQKRGLPHEHILLIMKPATQQGKDSYPSYRRRDDGWHVKIRGAVLDNRWVVPYNPGLLMRYNCHINVEACASIKSVKYLYKYVYKGHDCASFSVDPSGEINEIRQYRDARYVSPPEAIYRILGFPLFGIYPAVLQLQLHLPNMQYVAYDESGNLEDVVNKPSNKKTTLTEFFEMNRKDPKARKLLYKEFLEHYRWVAGKNVWQKRKTKTCQVGRIVYAHPAEGERYYLRVLLNHVRGPTSHEHLRTVCGITYSTCREACEKSGLVETDMSHDDCLSEAATFQMPYALRRLFVTILAYCEVTDICALWHKHKESMSEDYARDNPNPMSVEQMVLRDIRDTLHSMGKDISDYGLPELTDTYVFSNDTPIKVREEQSVPIDPEHLDIYKSLNDEQRAGFDDIIQHVIKKKSQVFFVDGPGGTGKTFLYKALLARVRSDGLIAIATATSGIAASILLGGRTAHSRFKIPIKLAHNSMCNFTKQSGTADLLRRASLIIWDEAAMTKRQAVETLDRSLQDIMDNTLPFGGKVIVFGGDFRQVLPVVTRGTRAQITDATLQRSYLWKNIRKISLSHNMRAQSDPWFSDYLLRIGNGTKNTIVDDYVRLPDEIVIGYLDNEDSVNTLIEYVFPSLDDERNTTSVEYMSTRAILSTKNDFVDKLNMKMIDRFPGKEKIYHSFDSIDDDTQNSYPLDFLNTITPNGLPPHELKVKVNCPVILLRNLDPNNGLCNRTRLMVRTFQDNVIDAEIVGGQRANKRVFIPRIPLSPSDDISLPFKFKRKQFPIRLSFAMTINKSQGQTIPNVGIYLPEPIFSHGQLYIAFSRGVSRQTTRILAKPKKEVDLAGKSTRNIVYKDILDW

SEQ ID NO: 167305 - protein, 72 aa, Oryza sativa
  Clone ID: PAT_MRT4530_6592C.1.pep
MPVGSNSKCMSNNTSYIVLCARCTGARRLPGGTRALPEMGRLTHVARAVGGRDVDARAQLLHAYAYAYAYDS

SEQ ID NO: 167306 - protein, 39 aa, Oryza sativa
  Clone ID: PAT_MRT4530_65930C.1.pep
VTHYLPADKQEGINLARRGEKLTKPRANDQYGSSHEITI

SEQ ID NO: 167307 - protein, 93 aa, Oryza sativa
  unsure (1)..(93): unsure at all Xaa locations
  Clone ID: PAT_MRT4530_65931C.1.pep
MEEDDDTVAVDGGGRXNGGRRRLRRRHCFRPHCSNICFRSMLKRRLAHGKRGGRHEDVYDSEAVTTATTTSIFGSVAGSGSYRGRSDLPVRCL

SEQ ID NO: 167308 - protein, 50 aa, Oryza sativa
  Clone ID: PAT_MRT4530_65932C.1.pep
MARVLLGRAWAVCAARVSKTNTLPPPPSGSCQPPNIGTRLAISSAPSSGG

SEQ ID NO: 167309 - protein, 142 aa, Oryza sativa
  unsure (1)..(142): unsure at all Xaa locations
  Clone ID: PAT_MRT4530_65933C.1.pep
INKINHVFDXRVDALRTLMELMLPRHLLHANDNDLKDIMMPEHKRCSKDVYLGNELIDTYLHQTIESSQPVYNDHXQYILFQLLRGLKCLHSDXILHRDXLKPPHLLDNANCDLQMXNXGLRRTDNTXGLFMTEYAVTRRYK

SEQ ID NO: 167310 - protein, 205 aa, Oryza sativa
  Clone ID: PAT_MRT4530_65934C.1.pep
MRERDDDRSTWCTCTKTRTREKTDRLENLQSVFKFPRPLLCCAGNRASCATIDDDRWRNGKTIHFHFNPLFLHQWQRGATRAVRCAPWFLDAQVAHPGWRRTHEPYYHHDVDYIYMLHPGILYGTNRACMVDRHAHTLLDEPEQGDGGRIGACMYMVGSRKYQVQHHTYISMDSIIMRRAKHRIASCTSTTFQHHPSAPQPQHDK

SEQ ID NO: 167311 - protein, 349 aa, Oryza sativa
  Clone ID: PAT_MRT4530_65935C.1.pep
MPFRGMTSLKCHCQDWAYICFAIWIISFHFHLISYPGYQKCPSVCHQWRPSSWWRRPRRKRSSPWHELHAPLLLPLHRAGQAAFLLLLAISPATPLTHASSCPASFAASMSDGKVTAASRGQGEASVGRGGSTAGGRGVGTVEEARRKEKRKSGYPKEKLLESSMPSSLPPALHEKLPMGDAVYYYFKDIYDALRIAQVGVRLIFLDHDYSEFRPVVPDEECFYRSFIFSYLEQVVDRIDTLWEDRLLAALRELDRRAERFQRASEFSRRRKVFVKLIAKIKGWKRMRDYPPSRVSFCFPQISSSYLDLHAQREIWTALVLDAGYSSPCAGRPDHTNSLSGSTTMMELV

SEQ ID NO: 167312 - protein, 88 aa, Oryza sativa
  unsure (1)..(88): unsure at all Xaa locations
  Clone ID: PAT_MRT4530_65936C.1.pep
AACILLRDRRQTTPAGYRVEGDSSDTIGLRCGSLKCLNGEDTRRYLRELLLTTLGALQHLIGANLSGVTLYXSTKDGKPIAGVLKEGG

SEQ ID NO: 167313 - protein, 68 aa, Oryza sativa
  Clone ID: PAT_MRT4530_65937C.1.pep
FTTWCILLGCLGIVDGDRVELDNLHRQIIHIEAYVGQPKVKSAAASCRAINSSIKVFEYHITLNASNA

SEQ ID NO: 167314 - protein, 118 aa, Oryza sativa
  unsure (1)..(118): unsure at all Xaa locations
  Clone ID: PAT_MRT4530_65938C.1.pep
PPPHRSPPPXPDRSPSPPPPAPPPPLPTASSRPPPPPLCATPAATLASRRRLRPPTGAAPFSYPSLPPXRPRAIAAFSTARYPPPLPPPXPPSPPPPPPRRSLPPRPHWPPPPPPLLK

SEQ ID NO: 167315 - protein, 35 aa, Oryza sativa
  Clone ID: PAT_MRT4530_65939C.1.pep
MAMSRSTGAELDDTKLGTVAYNYCADGWCGYMKSH

SEQ ID NO: 167316 - protein, 173 aa, Oryza sativa
  Clone ID: PAT_MRT4530_6593C.1.pep
MSRSVEPLVVGRVIGEVLDTFNPCMKMIVTYNSNKLVFNGHELYPSAVVSKPRVEVQGGDLRSFFTLVMTDPDVPGPSDPYLREHLHWIVTDIPGTTDASFGREVISYESPKPNIGIHRFIFVLFKQKRRQTVIVPSFRDHFNTRRFAEENDLGLPVAAVYFNAQRETAARRR

SEQ ID NO: 167317 - protein, 313 aa, Oryza sativa
  Clone ID: PAT_MRT4530_65940C.1.pep
MEKEQQAGHGKLPHEQLLLQASTELMNLSLGYARSMALGCAAKLGVADAIHRAGGRATLHDLHAALSLHPTKLPFLRRVMRVLVASGVFAQVEEEEEEEDHYRLTPVSSLLVTAGDGRGRSLLPLVLFQLSPLCVTPATSMAEWLRSGGEEETAFEMVHGVGLWGACSRAPDLGVDKITSMVDVAGGTGAAARAVAAAFPHIKCTVLDLPHVIDSIPADHGDVVQFVAGDMMDFIPKADALLLKVFGECFPHDCSVRCCLVVHHVYAWTPGAGAAAGAGAAVSGDGTPGAGAVANVNTNGGNSASQSSGGPFS

SEQ ID NO: 167318 - protein, 353 aa, Oryza sativa
  unsure (1)..(353): unsure at all Xaa locations
  Clone ID: PAT_MRT4530_65941C.1.pep
MEKEQQAGHGKLPHEQLLLQASTELMNLSLGYARSMALGCAAKLGVADAIHRAGGRATLHDLHAALSLHPTKLPFLRRVMRVLVASGVFAQVEEEEEEEDHYRLTPVSSLLVTAGDGRGRSLLPLVLFQLSPLCVTPATSMAEWLRSGGEEETAFEMVHGVGLWGACSRAPDLGEHFNDAMAADSRFIMDMAINGSGRQVFDKITSMVDVAGGTGAAARAVAAAFPHIKCTVLDLPHVIDSIPADHGDVVQFVAGDMMDFIPKADALLLKFVLHDWSDEDCIKILKRCKEAIIPSRAAGGKIIILDVVVGSSSEAICQGTQQLFDLIISVXEEEWCKIFKEAGFTKYKISPVL

SEQ ID NO: 167319 - protein, 130 aa, Oryza sativa
  Clone ID: PAT_MRT4530_65942C.1.pep
MAAVSLRKSNARLPPEVNRVLYVRNLPFNISSEEMYDIFGKYGAIRQIRLGNAKDTRGTAFVVYEDIYDAKNAVDHLSGFNVANRYLIVLYYQPAKMSKKSDVKKKEEEITRLQEKYGLGSKTPSSAPDA

SEQ ID NO: 167320 - protein, 54 aa, Oryza sativa
  Clone ID: PAT_MRT4530_65943C.1.pep
MIQATVKCQCHERCRRLSCNTHSMPLSSLAHIRNKVMGEGAKLAVGAEKRKTAS

SEQ ID NO: 167321 - protein, 113 aa, Oryza sativa
  Clone ID: PAT_MRT4530_65944C.1.pep
QAFQSDPFPVLDNRIHNFHSISMLTNQAISSLLTELCTVDCILFSQCNSKQEHDDLKLFIPPLFMQCCWDNWLEPWSRHRHRHLEPRRRHRNRHQWHRDGERPEPAGHEQLRR

SEQ ID NO: 167322 - protein, 416 aa, Oryza sativa
  Clone ID: PAT_MRT4530_65945C.1.pep
VDSRGSPDDESLRSYIQRFCQVRNTIPCIPAHAVVYAFRNGVRHNRMLEKIASKEPMTTAELFELADKEKATGDKPSSTAPSGEGRSADKWCSVHNTYRHSLADCRSVKNLAERFRKADEEKRQSRWEGKAPATPANDRRGEAKKKAPADDGDDSKDLEFQIHQGTVATLDGGACAHTSRRGFKTMRRELLAAVPTHEAARKARWSEVKLTFDQSDHPTVLTRGGKLALVVSPTIHNVKMKRVLVDEGASLSIISPATFDALKAPGMKLQPSLPIIGVTPGHRWPLGHVELPLTFGDSTNFRTERIDFDVADLNLPYNAVLGRPSLVKFMAAYLQMKMPGPSDPITVFDDVKVALACAEQRADNLVAATEPQPSESSASRASKKRLASADEVPVKDISLGDDPSKTAKIDGTLDAK

SEQ ID NO: 167323 - protein, 1507 aa, Oryza sativa
  unsure (1)..(1507): unsure at all Xaa locations
  Clone ID: PAT_MRT4530_65946C.1.pep
MPVSTVYWRRIRTHGDFECFVPDSEKEMLWTIMLETFTLHEGTEDKVKEWTLKKVTEQFQNYKGDLYKKCIMKGQTMNFNSFPKLRDHWDDFVAYKTGNQIREAANRLTEAVEASSQGMFRPDREKDELTLALQTPEYPGQTRGKGVVPWKIGFKEDIHMYRSWMRSKRDTEAKIADLEDRVSNYELSMQEEVARKVDESMAAQRSHEPQPYIPPVMVSPSGNHSGCTSTGPIPPGYSRVGVELVEAVYEDLELDYLGGDGETHLRDTSHVIILWRKRYIIFLGRQAASRAPSPPAPPPRAPSLLPPTPSPQAPAPCPSAPSKLRSCQAPPLVRTRATKKAKVQDQPLAENKEDLDAYVVGEVKRQFKPRSLEKKIPIDPSVKYFFKKMSTTNKEVLKITDYERTLKKAYYKMSKPVPQLGEQPNQEIEPLVTGQEIGIKEFISDTVLARDQLLKGAPIPTAEMKYQFELGKPLVKPEQLKSLSTQMYRFHERYMEMSANGKQMFGARIRNSDFFQGEDVLWILFEDVFDLYYLDAHDVSLLSTWILXDNLIHLLTQQHFKMFILLSYSTEFHWVLLLFDLEACXVNVYDSMNKEESTFDQVFQLIDRAWDRFRQLVHGTWKEKLGRRFNFPCAKQTQGTNLCGYYVCEYTHCLSTQIYTTRELNLYMYTMLKKRKAHKNQVLQGCPYLRPYIQRFYQVRNTIPCIPAHAVVYAFRNSVRHNRMLEKIASKELKTTAKLFELEDKVARKEEAWAWNSPGTGAAAAAPPKSVPRSKRRDRRRKRKSARSDDEGHVLAADGPSRAPHKEKATGDKPSSTAPSGEGRSADKWSSVHNTYWHSLADCCSVKNLAERFRKADEKQQSRREGKALATPANDQRGRPRRRPPPMTARIWNSRYLREPSPLSTGGLGRPALVKFMAATHYAYLQMKMPGPSGPIIVFGDVKVALACAEQRADNLAAATEPQPPEASVSRASKRRLASADEVPVKEIPLGDDPSKTAKIGAGKLLGFLVFSRGIKANPEKIRVIERMRPPPSKLRDVQCVTGCMAALSRFISRLGERVLPLFKLLKRPGPFVWTEEVEQALNQLKAYLTPPILVAPGPEEPLLLYLAATPHAVSAALIVERDEGDPRREPGHEKGPGAPLIGDGPSSPDGPVPEAPNPWEGPEAPVGGIEALAGGPEAYNPDMARDPPGAPEHGRPRPAAPDNKDRPHRKVQRPVCFVSEALRDVKTQYPQAQKMLYAVLMASRKLATTSKRIRCAEAEKLARISKQYELVEGALYRRAANGILLKCISREQGVELIADAHHGECGAHSASRTLVGKAFQQGFYLPTALQDAQEWVWRCKACQFHAKQTHQPPQALQVIPLSWPFAVWGLDILGPFKAARGGFTKWPEAYPVVKIDKHSALKFIRGITSRFGVPNRIITDNGTQFTSELFGDYCDDMGIKLCFASPAHPKSNDQVERANAEILKGLKTKTYNVLKKHWDSWLEELPQCCGRIGPLRVAPQGKHPVS

SEQ ID NO: 167324 - protein, 649 aa, Oryza sativa
  unsure (1)..(649): unsure at all Xaa locations
  Clone ID: PAT_MRT4530_65947C.1.pep
KIRAIERMRPPSKLRDVQCVTGCMAALSRFISRLGERALPLIKLLKRPGPFVWTEEAEQALNXLKAYLTSPPXLVALGPEEPLLLYLAATPHAVSAALVVERDEGNTRREPGHQKGPGAPFTGXAPRPPTTFRDAKTRYPQAQXMLYAVLIASRKLRHYFQAHRVFVVTSYPLGLILHNQEGTGRVVKWAIELAXVDLHFEPQHAIKSXVMADFIAEWTSADDPVPSKVPSLLGDGGDPNADICAVHXVMHFDGSLNLQGAGAGVTLTSPSGDVLKYVVRLDFRATNNMVEYEGLLVGLRAVARVGIRRLIVLGDSQLVVNQVSKEYQCTDPQMDAYVREVRRMERHFDGLELRHIPRRDKGIAEESTXQACKHEYSIVSTFEERLAQPSARVGPXQGTPAPRFPPRPLTTHGSRGXEGVDPDPPRQVVWMTDIRAYPLLEDGTEDEKLAHISKRYVLVEETLYRCAANGILLKCISREQGIELIADAHQGECRAHSASRTLVCKAFRQGFYWPTALQDAQEWDRRCKACQFHAKQTHQPAQALQVIPLSWPFAVWGLDILGPFKAARGGYQHLYVAIDKFTKWPEAYPVVKIDEHSALKFIRGIMSRFEVPNRFIIDNNTQFTSELFGDYSCPGAWRCLPSAPRAPAV

SEQ ID NO: 167325 - protein, 119 aa, Oryza sativa
  unsure (1)..(119): unsure at all Xaa locations
  Clone ID: PAT_MRT4530_65948C.1.pep
NKIQTRGWQNNGQCPLCXWREGETALHLITTCRYTKRIWHLVSSWVGYQXMEPGQWEGPVSAXWWENLANTSAVPEKGLRSLILLVVWEIWKERNRQIFDHKEMAMSFLLTKIKEEASL

SEQ ID NO: 167326 - protein, 107 aa, Oryza sativa
  unsure (1)..(107): unsure at all Xaa locations
  Clone ID: PAT_MRT4530_65949C.1.pep
VILADRMCRVLGYVGTRIYIVRHRADKRQGLYWFKPLIRIDDDEXQITKRVVEIDVTDEIVIEGFDEISQRLGSMYSGFVKFGGGPFYTVDHLAPQERFEDTGPGTV

SEQ ID NO: 167327 - protein, 281 aa, Oryza sativa
  Clone ID: PAT_MRT4530_6594C.1.pep
LLSKAVIGTVQRHRGTLYVHEHGSIGCSDERWTDDGWIRYSTRKRGVALIRTSCAGVARAPGGGGRAGGAPRGRVGAYRFDGGRTDGMGGCLGGVTRYPLGFLLPPSNSSSSSSPMAMVAARRTDGTSSPADGGEENQGSSVVGCGEENLGSELGDWRWERVGGGGRCTRLREHMGDGGSAGDGSAIGGGGRHTLWQECVGSGDRCTRWLSTAVVARGRLEHVHLRCPHQPHRAPPALPQALRTATQGCLCHHCSCWPHATTAAGRRARSLGSPRRNHSQQ

SEQ ID NO: 167328 - protein, 218 aa, Oryza sativa
  Clone ID: PAT_MRT4530_65950C.1.pep
MARRSGLMLLLLAAAAVASAAVPPSCERIECPSYEVVDSANGFEIRRYSDAMWASTAPIEDISFVAATRTGFLQLFNYIQGKNAYNETIEMTAPVLTQVAPSDGPFCVSSFVVSFYVPAKNQPDPPPAEGLHVQRWAGARYAAVRRFGGFVADSDVGEQAALLDASLQGTRWAAAVSDGRRADPTSSYTVAQYNSPFEFSGRVNEIWMLFDAKDASDM

SEQ ID NO: 167329 - protein, 366 aa, Oryza sativa
  unsure (1)..(366): unsure at all Xaa locations
  Clone ID: PAT_MRT4530_65951C.1.pep
MAAIGALSKRSAVLQILPLKDLVAVVLCSGLSFLLSRVTNKMISILNRYDDEIIVSIFYNKEDKSVITTSSRLFDGCMSRQVTSTPLECIRSNKQNNGQQIFESENIKXPDSVDFDAPNARALIQQRSCSTYRVFDLKDYSLLYQIPDVNVHQVVFRPSLFLIKLEQTHNVYPFRIFCAQNFEETHSFVLVASSKRPDIQPLHDKMIIKQNFANENGNLQILDVRXYLVLITLLFILLCTPDPFHALHGRNLFLSFQNNSTELRDLQGDIVRNFEDHVLDELNCVDDKLFITKDEDVIISGCKSEGKDININXGIGAVHISSIESGKCITDINTSSGSQLVTASRCRNSSGSKAKDPRNALAHVPA

SEQ ID NO: 167330 - protein, 150 aa, Oryza sativa
  Clone ID: PAT_MRT4530_65952C.1.pep
CCVVLRIKLPAAWTPEEDAALERLAVENGSRHWRRVAAQMPRKRSPVQCRDRWRDHLARDVFHRPYTAADDDELTRLVLRPGGGGDRWKDISRAVHGRSSRSVKRRWMEIGTSDELLRKLAPPVIDAVSGHGGGRRRLMRPNQAFGWRRC

SEQ ID NO: 167331 - protein, 140 aa, Oryza sativa
  unsure (1)..(140): unsure at all Xaa locations
  Clone ID: PAT_MRT4530_65953C.1.pep
DYFXXXEVXKTHDXXPPLDXFXESXXRLXSXXXXLNGALXSDSXNPEVNMDQDXXDTCGFPLYFSHGLQDDXGLPSFAKGMVAANTSSMDKAGASATGDPGSSPGFQTVLELEVMVPWRHRFSATLLAGRRGFAPPGPRG

SEQ ID NO: 167332 - protein, 107 aa, Oryza sativa
  Clone ID: PAT_MRT4530_65954C.1.pep
YAARINHGRALYKKQPYFLMGGSLAPVEPQRALEKLAFFLVKAEKTPAGDRVQAPLLPPPQKPRNRFNSGGYDPPVATPEPQEARMPWGWKTPGPHPEGLDPQTLGP

SEQ ID NO: 167333 - protein, 62 aa, Oryza sativa
  Clone ID: PAT_MRT4530_65955C.1.pep
SLYFRIEKKILSSNRKILLDLYDKYYYYICYYYILVLLPCPTKTNFLVFMSNVDYLFYLLFF

SEQ ID NO: 167334 - protein, 99 aa, Oryza sativa
  Clone ID: PAT_MRT4530_65956C.1.pep
DVCVPTVVELCYEHDAVNNSAAAAAAAGRQSDLNLILLNLSNAGDMRNKGSKIVFAFELPTKDRPEWMRLSPDTKDNSNVLVQLNKSVATVFHGSIITR

SEQ ID NO: 167335 - protein, 113 aa, Oryza sativa
  unsure (1)..(113): unsure at all Xaa locations
  Clone ID: PAT_MRT4530_65957C.1.pep
CSRRPGALGPRMQXVCHNCMDVTASARCASHPARMVRXYEESIARCPGARLSSSSSEYLSGGEGXRQDQGYYGEGSXEEGYYGEQQQQPGMTRVRLTRARQYAAQLXPSMCRG

SEQ ID NO: 167336 - protein, 168 aa, Oryza sativa
  unsure (1)..(168): unsure at all Xaa locations
  Clone ID: PAT_MRT4530_65958C.1.pep
KELITGEESFFFRKTGLCLKENLPVEIRGVLKGVIKKRHWHXKHREVVKLITKQKTLPFVKKTARLXKYKRGGILVAIERVTKGXALIFSRGKNYRGPINIRPRNFLTKAKALKGAVAMKGHEALSQQKVELENNIRQMKMGLVRQNNDRVGVGSPKKMKKKMMFLQK

SEQ ID NO: 167337 - protein, 53 aa, Oryza sativa
  Clone ID: PAT_MRT4530_65959C.1.pep
LFDTYNIGSLIKWQNKKKKHRAARVYDTSFCTRASYAFSELYWNLDLIWWSVV

SEQ ID NO: 167338 - protein, 40 aa, Oryza sativa
  Clone ID: PAT_MRT4530_6595C.1.pep
IFSFFNHYISLSNNQITNPTPVLGKIFKHITFIRTYYLGK

SEQ ID NO: 167339 - protein, 426 aa, Oryza sativa
  Clone ID: PAT_MRT4530_65960C.1.pep
MLLGLEKNQHNGEDTSPEANDSGELDDQSKSTTPEMVLHSSIILIYGFTISLIPSTWGMECSTPTEVSSNSGHGSINRAQDDDRFGSQGGSWVPPLEQKPEAVTALIPPLSRPTRSIWDDAEKWISSPTANRGGRVGSAAGAAPKKSALAFPEHVSRPPAVAKVVAEVPINTGTLVKNSVALAQPISFNPAQSASIVDEPAPAVRSVSMRDMGTEMTPIASQEPSRTGTPIIASSPTSSRTPTPQRNAEISIGEFGPNKMEMSEEELQMNTRKEIMDLGQRLGKTTIAAWASKEEKSTTSFANVITDKAVEIDREARAADWEEAEKAKYLARFQREEVKIQAWENHQKAKIEAEMKRMEAKIEIKRAREQDRLSSKLAAARHKAEARREAAESRKNQEAARTEEQAAQIRKTGHIPSSISCWCWCL

SEQ ID NO: 167340 - protein, 332 aa, Oryza sativa
  Clone ID: PAT_MRT4530_65961C.1.pep
HRPGVRSVVQPLVSTSAAAAAMPSPPPPALTLPPPRQRIPPPRAAGALLCNRTGSGHASTRVIRHLPPPAMSHPLSSEPHALEQRAVVVTNKHGEKLVGVLHHTGSSKIVVLCHGFISTKNDSLILDLMAALTKKGISVFRFDFSGNGESEGEFEYGNYRKEADDLHSVVSYLCKEKYDVTAIVGHSKGGDVVTLYASIYDDVRLVINVSGRFDLEKGIEERIGEGSIDRINKEGYLDVKDKSGNVQYRVTKESLMERLNTDIRAVSMSITKECRFFTVHGSADETIPVEDAYKFAKHIPNHKLQVIEGANHNYTAHREELADAVVDFITSN

SEQ ID NO: 167341 - protein, 246 aa, Oryza sativa
  Clone ID: PAT_MRT4530_65962C.1.pep
MARVSRWDGRQHAPPTPAAGKPAAWTQRRRRLRRLPAAAFLRVIRDAVQYIWSADSEPDLSEGSTVLITAREWLDSLPTAGSGEAPARRKRTPGRWRRIPRTLPHPCLRKRLMTWEELLADSLDMSDEAHCFSEEDKPAFRECKAHMARFYRRMIDIEKNNIKQISRPRVLSDTPRLAGGPALGLFGQLLGDRRAAPIKGVAPIPEGAGYYPEPLNSSGGSRRLWSPWMAPEPTDSSGGLDRPQSP

SEQ ID NO: 167342 - protein, 170 aa, Oryza sativa
  unsure (1)..(170): unsure at all Xaa locations
  Clone ID: PAT_MRT4530_65963C.1.pep
MALVSASSSXTAVXALPGAARAXSFLGGXGXSXXLLLKQAESSSARASXAVRAAAPXKPIWFPGSTPXPWLDXSLPGXFXFNPLGLGSDPESLRWXVXAELVHCRWXILGXXXXFXPXFLXXXXILNTPXWXTXGEXXXFTDTTTLFIXQLXLIAWXXGPRWGXXSSTPV

SEQ ID NO: 167343 - protein, 171 aa, Oryza sativa
  Clone ID: PAT_MRT4530_65964C.1.pep
MTWEELLADSLDISDEAHCFSEEDKPAFRECKVHMARFYRRMIDIEKNNIKQISRPRVLSDTPRRQMLGQNPTSVCVSLLYSLCPNVSNVYIFIQGCTRGNYIATLIANLSSRLAGGPALGLFGQLLGDRRAAPIKGVAPIPEGAGYYPGIWVIACAVCPHQQRQRWLADV

SEQ ID NO: 167344 - protein, 130 aa, Oryza sativa
  Clone ID: PAT_MRT4530_65965C.1.pep
MERVAAGYNAADRRRRLAEDEEEPLSSAVPISLADDDGVLGRPRRSPPPPSTLVPRCAATHMQLADDGGGLPRRQWHGPRHPGATALRWRACRGGTAGSTLRRRQRPGNPPRGHNVAVVCAGCRPPLFSG

SEQ ID NO: 167345 - protein, 165 aa, Oryza sativa
  Clone ID: PAT_MRT4530_65966C.1.pep
MADPYCDCDCPQQCEVKLHYYLHQFRAGANHPNRNEEFVTSGGPSGLGAGLIHDWSLTTGLDPNVMGIIEGSEEKVGEWSIVGGTGEFTNARGNIKYRAIKKEDVEWIRELDIQVFYTPNTPSDYMFFAHCLEGKERFYTTQGNRDRLEDTIYKQPLRPPTKQSN

SEQ ID NO: 167346 - protein, 145 aa, Oryza sativa
  Clone ID: PAT_MRT4530_65967C.1.pep
MLTLWIHHWAKAQLVSSSGDGCFGLRIDDDNGCFGWWRCVKLQVIVTTESMAVAAYRSGGSGIKDLGYGGSGASELGDGGFGPPDSINFKRIQAKGVCALEIPFEVDAVKRPDLGISLLGEVNRVFDRIDNKRKCGAAIAGFGSC

SEQ ID NO: 167347 - protein, 165 aa, Oryza sativa
  Clone ID: PAT_MRT4530_65968C.1.pep
QQCEVKLHYYLHQFRAGANHPNRNEEFVTSGGPSGLGAGLIHDWSLTTGLDPNVNIVGRAQGWHIVASQSSPANWYLSQNIVFQDSKYAGSTLQVMGIIEGSEEKVGEWSIVGGTGEFTNARGNIKYRAIKKEDVEWIRELDIQVFYTPNTPSDVQVAKNITKGN

SEQ ID NO: 167348 - protein, 809 aa, Oryza sativa
  Clone ID: PAT_MRT4530_65969C.1.pep
MSGPKLDRTPSIRDRVEDTLHAHRNELVALLSKYVSQGKGILQPHHILDALDEVQSSGGRALVEGPFLDVLRSAQEAIVLPPFVAIAVRPRPGVWEYVRVNVHELSVEQLTVSEYLRFKEELVDGQYNDPYILELDFEPFNASVPRPNRSSSIGNGVQFLNRHLSSIMFRNKDCLEPLLDFLRGHRHKGHVMMLNDRIQSLGRLQSVLTKAEEHLSKLPADTPYSQFAYKFQEWGLEKGWGDTAGYVLEMIHLLLDVLQAPDPSTLETFLGRIPMIFNVVVVSPHGYFGQANVLGLPDTGGQIVYILDQVRALENEMVLRLKKQGLDFTPKILIVTRLIPEAKGTSCNQRLERISGTQHTYILRVPFRNENGILRKWISRFDVWPYLEKFAEDAAGEIAAELQGTPDFIIGNYSDGNLVASLLSYKMGITQCNIAHALEKTKYPDSDIYWTKYDEKYHFSCQFTADIIAMNNADFIITSTYQEIAGSKNTVGQYESHTAFTLPGLYRIVHGIDVFDPKFNIVSPGADMSIYFPYTEKAKRLTSLHGSLENLISDPEQNDEHIGHLDDRSKPILFSMARLDRVKNITGLVEAYAKNARLRELVNLVVVAGYNDVKKSKDREEIAEIEKMHELIKTYNLFGQFRWISAQTNRARNGELYRYIADTHGAFVQPAFYEAFGLTVVEAMTCGLPTFATVHGGPAEIIEHGISGFHIDPYHPDQAANLIADFFEQCKQDPNHWVEVSNRGLQRIYEKYTWKIYSERLMTLAGVYGFWKYVSKLERRETRRYLEMFYILKFRELAKTVPLAVDEAH

SEQ ID NO: 167349 - protein, 45 aa, Oryza sativa
  Clone ID: PAT_MRT4530_6596C.1.pep
LKYSHNKTGLTGMEEIITYVLRPNAIEMVHNQTVKYKYFTYYILI

SEQ ID NO: 167350 - protein, 69 aa, Oryza sativa
  Clone ID: PAT_MRT4530_65970C.1.pep
TRRAPDWAAPPPLRWRRRHPPRRAAKLVTILLSTPPTSSPSAPPSSTPVSSVSSAPPERTSSRRPAPPR

SEQ ID NO: 167351 - protein, 86 aa, Oryza sativa
  Clone ID: PAT_MRT4530_65971C.1.pep
GNSTRMNPCDVYMVHPLHSSWHLRPSPTQVRSGSHIMPEAYMLTYTGRYTSVTSPPHAQGESAERGTGKVGRPQSRLRGHDHMGPP

SEQ ID NO: 167352 - protein, 98 aa, Oryza sativa
  Clone ID: PAT_MRT4530_65972C.1.pep
MAARRLIPSMNRVLVEKLLQPNKSAGGILLPETTKQLNSAKVVAVGPGERDRDGKLIPVSLKEGDTVLLPEYGGTEVKLAEKEYLLFREHDILGRLEE

SEQ ID NO: 167353 - protein, 87 aa, Oryza sativa
  Clone ID: PAT_MRT4530_65973C.1.pep
PEGNLNAMHLHASQVTESHTHRRDMFIFEPAPNFMDQQQTFQTNRWLYDYRALPNKTNHLAWFSQSTTPACPFMEQWDFVLFHKPPS

SEQ ID NO: 167354 - protein, 1707 aa, Oryza sativa
  Clone ID: PAT_MRT4530_65974C.1.pep
MSYILAGLDDDYEPVVSSLVGKTKPVHIFVVYSQLLCFEYRAKLRQSAANQVYSSANSTKCGGGRGGYNNNDNNNSNCGGCDGNSGGGCGDRGHGRGNGGDRYNSKPHMVCQLCGNTGHLAGDCWYRFDDTFVLDLEVTMAASYNVDPNCARKQAIVSKSSTEVEYKAVANTTTEDLSSLKYDFISELIDWSEPPLSPCFFLCRQAISSIAAAVWMTPTPTNLSGLQAGMKQRRSNLTMKQQASRTSYRTATGQSQSWVVGCATRRPILELLDRCGPREGLGLFFGTDPTKRQLAFLRLTGFGSKVRGYQGVEEVMAQDGKLDLLLKTMAENEKKREEAEARTRADFAELKLSLDVRLPAVEKKVETLNTVCKTLSAKVEQLEGSIALQRKDDEFAGKVTTAVYPEAHKEEPQDSRNFQSTPLHHGMRDSTLISPIPFPHDDSAFQSSSHGQSSALVYSIPPMTFPQFNGDNPQMWKANCEIYFDVYGIHPRNWVKVATLNFCGNAAFWLQSVRSQLAGATWFELCERVCARFSRDRQQTLIRQWIRISQSSTISDYVERFDSIMHQLLAYRGANEPIYFVTKFVDGLKDNIRLAVMMLRPQDLDTACSLALLQEEALEGVVQSGVRRQDSGVYVKSRPTPTPVLPTRTTSEDKVGAKSVRTREDKLLALKSYRRSKGLCFKSGERWGKDHKCAASIQLHVVEELLNALQFNTEEEKFSGDIPETADDALMSISYQSLNGIDSSTSIRLRGWVQGTELLMLVDSGSTHSFVDERIGSTFIGLKHLPQPLKVQIADGGQLSCSQVIPKCDWWIQGHNFSSDFRLLPLGSYDAILGMDWLQQFSPMQIEWNHKWLEFSHLGKVVKLQGITPQTSQCATISGEQLQEPTGLPPKRMCDHHIPLVEGAKPVNLRPYRYKPALKDEIERQVSEMLRSGVIQPSQSSFSSPTLLVKKKDGTWRLCIDYRQLNSITVKTFQTHSGHYEFKVMSFGLTGAPATFLGAMNDTMSPVLRKFVLVFFDDILIYSPDKESHLQHLKIVLQLLADNKWQVKLSKCSFAQQELSYLGHIIGVLGVSTDPSKIQDVLNWPQPTTLKKLRGFLGLAGYYRRFVKNFGVISKPLTMLLRKGVPFKWTAETKSAFQQLKHALVAAPVLALPDFSKPFTIETDASDQGIGAVLSQDKHPIAFLSKALGPKTKGLSTYEKEYLAILLAMENWRPYIQQGEFVILTNHHSLMHLSEQWLHTPWQQKAFTKLLGLQYRICYRKGLSNAAADALSRKELPDSAELAAISECIPLWAKPDRSKYPGLLQPLPVPEGAWQTLSLDFIEGLPRSGHYNCILVVVDKFSKYSHFIPLTHPFTANGVATEFMKHIYKLHGLPKVIISDRDKIFTNQFWDQLFSRSGTKLHMSSAYHPQTDGQTERVNQCLEIYLRCFVHATPTKWATWLYLAEFWYNSSYHSTLGKTLFEVLYGYTPAHFGISSDDCQIADLKIWLQERQFMQQLLQQHLNRAQQQMKSQADKKRSFKEFNVGDWVYLKLQPYIQTSVTKRANHKLEFRYFGPFQVLDRVGAVAYRLQLPSYSAIHPVFHVSQLRAAAGFSKPVMSQLPSSLGELQIPLQFLDKRLTKKEEATWEDMEELRARFPGALAWGQASHQEWGIVRSASRAEAEEEQPDDETASVPDELQDGDRTKPKLGRGLRNKKANTRIAGPMWAK

SEQ ID NO: 167355 - protein, 456 aa, Oryza sativa
  Clone ID: PAT_MRT4530_65975C.1.pep
MASHDAIAPEKTTNYEPSVWGDFFINYRPQPLQRSEEWMRQRAKRLKMNVRTLFWTSNDVVVRMNLVDAVQRLGIGHLFKDEIRRTLNDIHQSEFTSSSLHEVALRFRLLREHGLWVSPVTFNKFKGDDGRFMNGIADEPRGLLSLYNAAYLLVHDEPELEEAISFSRYHLKSMMQGNNLKHPLSDQVKRALNTPLPRTSKRTETLHYLSEYGQEEGHMSILLDLAKVEFNLLQGVHLKELKAISEWWRDLNEHVELSYLRDRVVESYTCSHMLFYEEGLAFTRITFTKIIVLIIMMDDTYDSHATIQECRKLNEAIQRWNESAVSVLPEYLKNFYHKLLNNFKEFENQVVVSEKYRVAHAKKEEAEWSHNNYKPSFEEQLALSTKTSTVQLLCVSTTVGRGDAITNEAFMWAASSTTVTSCAKIMRFMNDIASFENNIVPEWPQYLFKLIIIEKR

SEQ ID NO: 167356 - protein, 146 aa, Oryza sativa
  unsure (1)..(146): unsure at all Xaa locations
  Clone ID: PAT_MRT4530_65976C.1.pep
QEGGYQQSQDGRGXPNGLKDTFSTMRVRQNIDNPNRADTYNPRAGRLTNMITQNYPILNLVQMSAREVDLYQNALLSPSWNINAHKIVYITHGTSHVQALNNNGXTALNGKLYRGQLLIAPQHYAVVXTHIQARCAYIAFKTNPNS

SEQ ID NO: 167357 - protein, 579 aa, Oryza sativa
  Clone ID: PAT_MRT4530_65977C.1.pep
MGSAGKCAPSLAPTHIGLGMMGKIAVSPSSVRPTPRAMASHDAIAPEKTTNYEPSVWGDFFINYRPQPLQRSEEWMRQRAKRLKMNVRTLFWTSNDVVVRMNLVDAVQRLGIGHLFKDEIRRTLNDIHQSEFTSSSLHEVALRFRLLREHGLWVSPVTFNKFKGDDGRFMNGIADEPRGLLSLYNAAYLLVHDEPELEEAISFSRYHLKSMMQGNNLKHPLSDQVKRALNTPLPRTSKRTETLHYLSEYGQEEGHMSILLDLAKVEFNLLQGVHLKELKAISEWWRDLNEHVELSYLRDRVVESYTCSHMLFYEEGLAFTRITFTKIIVLIIMMDDTYDSHATIQECRKLNEAIQRWNESAVSVLPEYLKNFYHKLLNNFKEFENQVVVSEKYRVAHAKKEFQILSHYFLQEAEWSHNNYKPSFEEQLALSTKTSTVQLLCVSTTVGRGDAITNEAFMWAASSTTVTSCAKIMRFMNDIASFERGKNKGEIASTVECYMNEHNIISEVAFAKLDSLVEDEWRTINQARCEHHQLLPVVQRVVNLAICIMFFYDKRKDAYTFSTHLQEIVRNLFINPITM

SEQ ID NO: 167358 - protein, 81 aa, Oryza sativa
  Clone ID: PAT_MRT4530_65978C.1.pep
MYFTVISHTIMRATILLKPLPLTSKWRLPEELVHRGILTHVKNRRGRGWIKTEMEESGKKTTEGMECIKKTGPRPCRGYLG

SEQ ID NO: 167359 - protein, 55 aa, Oryza sativa
  unsure (1)..(55): unsure at all Xaa locations
  Clone ID: PAT_MRT4530_65979C.1.pep
MASRHIGGDLTCRKAAFALVRDEXRQLLYLAAIRRVARCPKLEQQALMVLSAIQL

SEQ ID NO: 167360 - protein, 218 aa, Oryza sativa
  Clone ID: PAT_MRT4530_6597C.1.pep
MAGFCYPFLSGVGGTGEAPADRGGSLAVDQADIHTVVPRVLRLSNKQTASPTASPSGNTTDHLPALQPPRQATMPATFPSSSLAKTTIFCSTAAYSNLPPPHPPATYDLPTSSSTPPPATYSPTSPPSPPPAPITSTGHQPPNRHRPPHLFCVLFNETPRCLNANSFRKIRCGRRPTGRRHRVAGAVVQRDDALPCHLSADLPRLLEDGAREAATLAP

SEQ ID NO: 167361 - protein, 63 aa, Oryza sativa
  Clone ID: PAT_MRT4530_65980C.1.pep
RCVIPIPKLANQPFRSSNLFDCVIPIPKLADHSFRSSNLTEQVRESKRVICKFRDRDDTVQQV

SEQ ID NO: 167362 - protein, 139 aa, Oryza sativa
  Clone ID: PAT_MRT4530_65981C.1.pep
RAAGETRLAFSELDSSDGPSVSGGTKNLLKPSNRSEPQTDPTLTMIRNMDAVSRAATLRNYIDRIQSLDKLSRNDCLWLFSLCVPVDTPLDAETCASLRSLLRKCANVLAAKLEMDDEVAMLNILITISGRFFGQYDNH

SEQ ID NO: 167363 - protein, 166 aa, Oryza sativa
  unsure (1)..(166): unsure at all Xaa locations
  Clone ID: PAT_MRT4530_65982C.1.pep
DGKPEPQFSSGGYMXLYTRRNNMCTQKTEHDYLXSIYEKYCESFEEYITYRVLPSLREKHDEFMLXELAKRWSNXHIVMASWLSRYPHNVDRYFILRRFLTQLSELGLTXSGNRCNKRIXGQVQSAVTFLNDPEREGEQKDRDLIKKVLEISVENGVNIMAFSKND

SEQ ID NO: 167364 - protein, 582 aa, Oryza sativa
  Clone ID: PAT_MRT4530_65983C.1.pep
MASCDDDFGLLGDGPVPEEEAAAAAASSQAAPPPPQQQAQAFCFGDAASVAGAGAGVGPFAPMGQEEGNHSAERGKAAAAAAHHSKRGRDRAEEFSDGGEYCSYLNSGGGGGGAGKKGRGGGGGGGGGVAAGSSEYRKDREEWTDGAISSLLDSYTDRFEQLNRGNLRGRDWEDVAAAVTDGQGKSSGGKSVEQCKNKIDNLKKRYKVECQRLAGSGASAVSHWPWFKKMEQIVGNSSSPASSKALVASDDDNKPRQPQQHSSKRHAPSGSSTPTFGGSSRLAPPSNPKWKRVLLKIGGTALAGAPPQNVDPKVIMLIAREVQVACRHGVEVSIVVGGRNIFCGDTWVSATGTDRASTYSIGHADAALVPNSPFDSCMMFCILIFTMHIPYMYLMNTRIGSSSSSTCVSLNFVRMMASVMNAVLLQASLEKIGVETRVQTALMMQEVAEPYIRRRAIRHLEKGRVVIFAGIGAGIGNPLFTTDTAAALRASEINADVVLKGTAGDDDYGCPPRGNNNPPFEHISFRELAARGFSRMDMTAITCCQENNIPVVIFNMLEPGNISKAICGDQVGTLVDQSGRIT

SEQ ID NO: 167365 - protein, 122 aa, Oryza sativa
  unsure (1)..(122): unsure at all Xaa locations
  Clone ID: PAT_MRT4530_65984C.1.pep
MELRGRDVELRRAAVAASAWSYEGRGCGIGVQLRGHRLWRRRVVVRAXAWSCEGGGCGVSVELRGRRRCHGRGGSRQRKALHAVASEESGNSGGPCCPARKRRTSPEPHAWGGVLLWNAATA

SEQ ID NO: 167366 - protein, 116 aa, Oryza sativa
  Clone ID: PAT_MRT4530_65985C.1.pep
MADEEAIEDVDHEDVRRAGPHHIDRWLDLTDGKTTHAARLRGGRTSSPNHARCRASSRSTSCPSGSSPSCCGDATTTPPMTAVTAKKEDGPIGTRTIYNDICREREKGPKHLMENG

SEQ ID NO: 167367 - protein, 1516 aa, Oryza sativa
  Clone ID: PAT_MRT4530_65986C.1.pep
MAADDPSVGFFSGVWSRLRAAWRRTGAAHHPAGPGDDDDGQNEETVVRSRLVRRAAAARRLAHKLAFLSFNLEVLVFVYAFWRARRRNLSWRQPIQALPVLVIPALATLIYAAFIRFTRRLDLKDHRRLKRIQEQKQANDGEPRKPNQNDLISAQKQNCGDVDDASNSLPATDSNSTFLPATHSENRTSKPKKRRQPSISSRGDGEADMSWGHSKDFQPMPLDGLRKRRFSSEKTYRTTSIATESIEEDTQNTMSSSVAGSICGKEFPELSDSSISQSNNIKPICGSSAPLIGYPGILLRDGNEEVPAASTHLDQQGGAHDPIEDTVFSPLDYRNHSGPVIFVKLTEPPTIHHESPVGGGEDKVFDRLLDIVNTNFSSCKENLICPVNSHDSSFDRGDSCLTEHGMSSLMTVFREMPVKVSEESSPSQPEKLESYPVSINEPPASPSDYIVAYGSLNDVSQDPSDPVLSALENFEQVPPEGGKEDSLLEPHKLTALQTDTVTPEKVPTSHAIDDNEVIINPDEVTNALACICTDANIIAAVADIDTGVSPRLNLPAFQESHCEEFEDPEVRFSSSAELAMKGDEDTWEKEPCGFNGQEGNDVFICSEEEALLGPLAVSTTEQYMKTSGFPLCCQDANMMEIPRIVAVNPELNNPTSGELLTDSDEVSKEELSYIRFFLCNGVETTITEAHEAVKKSLSESQDEGPFNPIKAAVNPSCDDSNPAHFVPDTNVRKKIQGGQEKTQEAFSNQLDQITCNFEGILLSSDNPIFLDEVTRAENWTNNTGSSQCISDRHEIRSFHDGKQVPSETIQGLTLGVEGSFVSPEESINSEKYSLYSRSSSCVSEVNIMHATGGGALAEPGNNQNFNLDDKNTMMFQSVNSTENYGNNRSVEFIPETNMIETLEVAGESIDGLLHEVSSNVVNAFVTPDTGNDMGKSDDYLDLPSFSSVHTVQNSKAENNPYKTTSSLFSADVNLTGCLGSGQQGNQQGEETALCFENLYMALQDDNSKDHFTNLGSQDIPDASISDILQVEEKLSSDRLHDGIFSIEGTLISLDDGNIADSNNSSFVFHNTQINRNLLGLQKGSFKLQDEHTMTPISRNKVDIAEKSTCYVAGESMVADLQDTNKTPSDPRDGSISSFSGACNLLDESKYSTDHPYYSRSMSSGPECSLIETPEAARGESVETDDENFSFEETLTPEISSNRSASYNCTEEAVRSSGKGSTDPLMVDVHSFDMIPAGEERENETLNEIAYNSEQAAIITEDVKYTESFLNKPGSLPYAPNDNCPIATENFDKGFSEPQYQDGPEVAVRLAGMPLFVDNGTEAEKSHDNTRCSSSSHSELNITEAVQELSIDVGNKVSPKGSELPDWHRMDKEAKDSRLDDVKEDLEDLDEDHENSPIDPPKVAGITPSLAPTPSLKLYAQDASWRDSSMGVSNDFEVARAAGLRQRKQVFTISSGTGSGTMSELTDTQYTELVDDVIDSLNAPLPSSAVINTKKGPNGMAAYFLEQSATEQPRKNI

SEQ ID NO: 167368 - protein, 99 aa, Oryza sativa
  Clone ID: PAT_MRT4530_65987C.1.pep
PVRFTSIMHTHGHLTSPQTPAHSGGALVATSWHFTTPTHIITSSPCPATLAHQLHAQACINKSPSALKTYNPKPCLARQGVVLATLFPFSSLFHQILPG

SEQ ID NO: 167369 - protein, 181 aa, Oryza sativa
  Clone ID: PAT_MRT4530_65988C.1.pep
MVLEPPKSGDKSSSAAMAGSSSSATAIRGSRLDGHLTGAAAALAAEIECVTDGKSEKIANPAFQEWFTSDQQVLGFLLSTLSRDVLTQVATASSAMQAWQQICAMFTAQTKARSLNVRLTLTNTLLPTFCDKLTSTIATPKRLAVIWSRQPPRSSQRAKSRRVLQKEKLNRLAPFSMSNSG

SEQ ID NO: 167370 - protein, 219 aa, Oryza sativa
  unsure (1)..(219): unsure at all Xaa locations
  Clone ID: PAT_MRT4530_65989C.1.pep
MAKSRRIAAAHLTCMEIFNRALDWALERELHTSRRGADDDRQILKLVHAATARGRRSRGRGSTSPPRKGGMESSVPMIMADKKASAFHIRRTGKNIWKKPDRDFSKIPFPMAGVHQGSHPEAGANKHTEVEEEQEDRLRADTRVINMVTVREEIRKGPWTEQEDLXTGLNRTGKSCRLRWVNYLHPGLKRGRMSPHEERLILELHARWGNRDPVNDHWN

SEQ ID NO: 167371 - protein, 93 aa, Oryza sativa
  Clone ID: PAT_MRT4530_6598C.1.pep
MEMHRSINNVKPSGMSFEEQQNFMNAEYLSVRCGVEGEEEMGMERALVFIEEEEMGGVERKESGAEKRKRIACGLGPTALRPHMELHDPNTPI

SEQ ID NO: 167372 - protein, 65 aa, Oryza sativa
  Clone ID: PAT_MRT4530_65990C.1.pep
MIAAMRCEMPKAQAYLALFRVADEEEEDPDSCSLGDCCTREATTMLGAFLAAGMCAADAKLRLGH

SEQ ID NO: 167373 - protein, 105 aa, Oryza sativa
  Clone ID: PAT_MRT4530_65991C.1.pep
HPLRVGAEVERTLRAGNLKYRRGNPTVDVDLVARDGRLHRSVEPSGAYTEIYEALELRHGDGTGYAWKGELNALRNINEVIEPKLLHLDDRNQSDVHASMLDIAG

SEQ ID NO: 167374 - protein, 132 aa, Oryza sativa
  unsure (1)..(132): unsure at all Xaa locations
  Clone ID: PAT_MRT4530_65992C.1.pep
MVKLATARECRAYGLGGGGRAARGRWEYINAGAYVFAAVLLAGGFGWHLSAWSATTRSGLAAAALGLLLLLAVNAHDLLAHAAGVXLQPRTRRRATASSLFRGRRPRRSTSGTVLTLIAAHLSRFQIARGTG

SEQ ID NO: 167375 - protein, 56 aa, Oryza sativa
  Clone ID: PAT_MRT4530_65993C.1.pep
YPTRLPVSLINCEANLLSLINWALANVYLSPPLSNQDGIRPQRFVSPFTCQLGHWV

SEQ ID NO: 167376 - protein, 123 aa, Oryza sativa
  unsure (1)..(123): unsure at all Xaa locations
  Clone ID: PAT_MRT4530_65994C.1.pep
IQLTSVRRLTPFLSWETPDFTQVGGVEPLPVCDSWGFPELARSGGLSLLSSCLNGEWAAPCGPSLNLGTLVVTGNEPGTLAXSLAPGPFPFLASFLLFFAVFPLHSLIWGLLLAVQFGFSRYL

SEQ ID NO: 167377 - protein, 143 aa, Oryza sativa
  Clone ID: PAT_MRT4530_65995C.1.pep
LIGGPTCRALPLPPASAVPLPVSQPPPCSYCYKKPPRDPLFLFAHSRAVAAIGITRPRAASSAGHSPPSLPGTHPLLAVVVVAVVVISSAPSVRPSSSSLPCRCVAAVLPLYHADGRCRQPSGSVRRCLPVRTAGRRPLRPSH

SEQ ID NO: 167378 - protein, 301 aa, Oryza sativa
  Clone ID: PAT_MRT4530_65996C.1.pep
MTRVYPISEKVETTPKDNPEERRKKSRRDECNHVLGHERTTDILDIDRSLSCELKNDFFYTVKTDFRRQLGNSHIDFYMRPPPPLPLLRMPLAAAPHRAVAAIGITRPRAASSAGHSPPSAVGSRCPPLAGEPPLMANSGQLSPVVPLPLSLSNLPLPGTHPLLAVVVVAVVVISSAPSVRPSSSSLPCRCVAAVLPLYHADGRCRQPSGSVRRCLPVRTAGRRPLRPSHPIYPLADRGRPRPCRVAATSVPRVRHVVHSPQSCGLGPPWAEPPCVTDRWDPSVGAGSIPSLTSAPSFVAQ

SEQ ID NO: 167379 - protein, 79 aa, Oryza sativa
  Clone ID: PAT_MRT4530_65997C.1.pep
MLRRGREKRIGDDSKGLTGRSSGDDVCSLSHSEAALAAAPAHAPSAPETRINSEITLTLRTTDPALPLAVENAKGCHID

SEQ ID NO: 167380 - protein, 78 aa, Oryza sativa
  Clone ID: PAT_MRT4530_65998C.1.pep
PLLFFAFENSLALSSPASSYYYIAVALSSTTSTVSSSVSSGTGAQPQACTLIIPAVVLYTPVPVLYHPFVHIKQMARD

SEQ ID NO: 167381 - protein, 510 aa, Oryza sativa
  Clone ID: PAT_MRT4530_65999C.1.pep
MISWHELYMVLSAVVPLYVAMMVAYGSVRWWGVLTPEQCSGINRFVAVIAVPLLSFHFISSSDPYAMNLRFVAADTLQKIVVLQSIVWYTLLLFLFEFRAARVLIAAQFPDTAASIAAVHVDPDVVSLEGSQAEAHAEVAPDGRLRMVVCRSSVSRRSAAAAATPRASNLTGVEIYSISSSRNATPRGSTFTLADIPGHQPPNSALRASSFGAADLFSLHSSSRQHTPRPSSFDEHAAARARASATVAPTNDLKDTHMIEWSSGASAASEVTGLPVFRSGRETRRLVPSDAPSIASSRVIRPPPGATGGERAASFNKAVGGQDELAKLEAGAKTEQQTTAVTTTTKGGGAAGAERARGQQNAPAGVMLRLILTTVWRRLIRNPNTYASLIGLTWSLIAFRFHITMPIIVAKSISILSDAGLGMAMFSLGLFMATQPKIIACGYSVAAASMGVRFFFGPAIMAAASAAVGIRGTLLRIAIVQAALPQGIVPFVFAKEYNLHATILCTFCSC

SEQ ID NO: 167382 - protein, 190 aa, Oryza sativa
  unsure (1)..(190): unsure at all Xaa locations
  Clone ID: PAT_MRT4530_6599C.1.pep
KTFSSRVASSPIELWCEVFGFGHHHSQSTGXAPSDPNQIFKIFWRANEIYXLTVRDXAFDLGPDYPKDYHQHWFXDMKFSTNVKDXEVMPLFALFNIDTGLCGKHSLXQSHPLMFVPLNLYYEDAXMLWTDSNVMSEGLRCMRMVNITRLRLNAFHLDLYHSGVRDLTTVVLWKWLKGNKPSWKILPWLP

SEQ ID NO: 167383 - protein, 104 aa, Oryza sativa
  unsure (1)..(104): unsure at all Xaa locations
  Clone ID: PAT_MRT4530_659C.1.pep
RKPRHLASSSPVFIFSKTYCGFCDRVKPAVQAAWCIIPPLLNMDKEQDGDAIQAALHEWTGQRTRPNVFIGXKHIGGCDAVTAKHSXGQLVPLLTEALPITREI

SEQ ID NO: 167384 - protein, 140 aa, Oryza sativa
  Clone ID: PAT_MRT4530_65C.1.pep
MSPPAMSLPNQPPSSRHIFPFAYDSSPGAAAPRLLPLLQYSSLYPQPLLPQQQSPLQNQQMISFGSSQQQQQPQFGAASPLFPPQFLPPEEQQRLLLRYWSEALNLSPRGVRGGALRPSLYQHLLRAPGPPKLYRGVRQR

SEQ ID NO: 167385 - protein, 572 aa, Oryza sativa
  Clone ID: PAT_MRT4530_66000C.1.pep
MISWHELYMVLSAVVPLYVAMMVAYGSVRWWGVLTPEQCSGINRFVAVIAVPLLSFHFISSSDPYAMNLRFVAADTLQKVLVLAALAAWSRFPARFVPPAWPPLDCSITLFSVSTLPNTLVMGIPLLVSMYGPYSGDLMVQIVVLQSIVWYTLLLFLFEFRAARVLIAAQFPDTAASIAAVHVDPDVVSLEGSQAEAHAEVAPDGRLRMVVCRSSVSRRSAAAAATPRASNLTGVEIYSISSSRNATPRGSTFTLADIPGHQPPNSALRAFSFGAADLFSLHSSSRQHTPRPSSFDEHAAARARASATVAPTNDLKDTHMIEWSSGASAASEVTGLPVFRSGRETRRLVPSDAPSIASSRVIRPPPGATGGERAASFNKAVGGQDELAKLEAGAKTEQQTTAVTTTTKGGGAAGAERARGQQNAPAGVMLRLILTTVWRRLIRNPNTYASLIGLTWSLIAFRFHITMPIIVAKSISILSDAGLGMAMFSLGLFMATQPKIIACGYSVAAASMGVRFFFGPAIMAAASAAVGIRGTLLRIAIVQAALPQGIVPFVFAKEYNLHATILCTFCSC

SEQ ID NO: 167386 - protein, 85 aa, Oryza sativa
  unsure (1)..(85): unsure at all Xaa locations
  Clone ID: PAT_MRT4530_66001C.1.pep
KKEKNSTNHTPTSPTHKPRRRLAPDRPPLSVTDRHXNQQRDTDEIAPLGDAXTMSSRRQATEKPPPPSVGAQRSQDWAFARQPPL

SEQ ID NO: 167387 - protein, 79 aa, Oryza sativa
  Clone ID: PAT_MRT4530_66002C.1.pep
MCRQGTCRWRGEHTRRIQNGKMFYTGNLRATFDNCEYDKFINYYVMEKFTLRYIGGKVFGDNHIKNEEIGIFTNVTCTT

SEQ ID NO: 167388 - protein, 147 aa, Oryza sativa
  unsure (1)..(147): unsure at all Xaa locations
  Clone ID: PAT_MRT4530_66003C.1.pep
SSTIIDFQQIXMAAAFSSTRWSSGRPLXXTSWGKKLKKQVEHPAGELXMAKNSHIXXFXXDXPXELGTKGRXXXPXNKLEXFSPYPTSPQLTTRNITXGEXFSFQLPFSKLXXGXXHPPRPSSSPTNYLXXGLXNXXXPQHXGXXSS

SEQ ID NO: 167389 - protein, 985 aa, Oryza sativa
  Clone ID: PAT_MRT4530_66004C.1.pep
MARRREGGYSLMGCIKDIPTLKGDNYAEWKRKLDLAFILGKVDWVLTTPCPMEPAALVRGANESDADWQKRQRDNGPLVMSYDIEQKKWSLANKKCLAVVKNTIEPTLLGSIPECDAVSEYLERIKSQFNGSSKTYATQLIKQLVTERYHGGGVRDHILRMSNMASKLKPMDLGITDDFLVHLVMASLPKQFDNFIVNYDISLEKWNFEKLIANCVQEKERIKESNGGSINYVKDNKKKNHKSPTSKAKQSQHLPQQQQFAVEKDQTTQRRESSIRVANGVEEKVEAVGDLLLELANGFALLLRDVFYVPSLQRNLISVSKLDFDGYDCRFGSGKCELWYNNECIGLAVLRDELYLLSLSENIFKAEVENQHDIKIKVVRSDRGGEYYGRHTPYGQVPRPFARFLLENGIVAQYSTPGKPQQNGVAERRNRTLMDMVRSMMSYSTLPLGLWMEALKTAIHILNRVPSKSVPKTPYELWTGRVPSLAHLRVWGSPVEAKVFNPNIGKLDPKTDSTEIVATPEEELQQPQIDNVPVQETQQEPQGQDVPNVQAPRRSERVRRSAIRDDYKVYNIEELHMEDDPTSYEEAMRSARSSEWLEAMKDEMKSMKLNDVWDLEEIPKGAKIVGYSFRIIMALVAHYDLELHQMDVKMAFLNGDLEEKVYMAQPKGFVMKGNENMGCRLKRSIYGLKQASRQWYLKFDGTIKKFGFQENVEDNCIYSKFKNGRFIFLILCNATPAPIVKGKKYGASQCRRNQYELNEMKTKPYASAVGSLQYAQVCTRPDLAFVTRLLGRFQSNPGPEHWKLVKKVLRYLQGTKGLMLSYRRSESLQIVGYSDSDFAKDNTKSTSGYVFTLPGGAISWKSSKQTIIAGSTMYAEFIACYEATGQVNWLKKFIRGLKVVDSIEKPLKLYCDNEPAVMYAHNNQSSGAAKHIDIKYYVVKDKVRDQTISLEYIRTERMLADPLTKGLPPNVFKEHVAGMGLREAL

SEQ ID NO: 167390 - protein, 65 aa, Oryza sativa
  unsure (1)..(65): unsure at all Xaa locations
  Clone ID: PAT_MRT4530_66005C.1.pep
WTNRAEYRTVANEVAEVTXLHQLLHELHSPPPKATLVYCDNVSAVYLSSDLVQHQPTMHVEINLH

SEQ ID NO: 167391 - protein, 1234 aa, Oryza sativa
  Clone ID: PAT_MRT4530_66006C.1.pep
MAGTSSSSNTSTGGYSLMGCIKDIPTLKGDNYAEWKRKLDLAFILGEVDWVLTTPCPIEPADLVRGENESDADWQKRQRDNAPLVMSYDIEQKKWSLANKKCLAVVKNTIEPTILGSIPECDAVSEYLERIKSQFTGSSKTYATQLIKQLVTERYHGGGVRDHILRMSNMASKLKPMDLGITDDFLVHLVMASLPKQFDNFIVNYNISPEKWNFEKLIANCVQEEERIKESNGGSINYVKDKKKNHKSPTSKDELYLLSLSENVNVVSSLTKENKKRKRTPDVSSKLWHCRLGHISRGRIERLVKNEILPPLEFSDLEQCIECIKGKFVKSIKKGAKRSAGILEIIHTDICGPFPVKSVDGYDSFITFTDDYSRYGYIYPIKERSEALDKFKIFKAEVENQHDIKIKVVRSDRGGEYYGRHTPYGQVPGPFARFLLENGIVAQYSTPGEPQQNGVAERRNRTLMDMVRSMMSYSTLPLGLWMEALKTAIHILNRVPSKSVPKTPYELWTGRVPSLTHLRVWGSPAEAKVFNPNIGKLDPKTVSCHFIGYPERSKGYRFYCPNSYTKFVETRHAVFLEDEMIRGSSVVREIDLEERRVSVPAPSTQEPFFSLPADVVPAMPVIEVPAPVVTPPVATMNESEEPVIQDSTEMVATPEEELQQPQIDNVPVQETHQEPQVQDVPNVQAPRRSERVRRSAIRDDYKVYNIEESHMEDDPTSYEEAMRSARSSEWLEAMKDEMESMKLNDVWDLEEIPKGAKTVGCKWVYKTKYDSRGNIEKFKARLVAKGFTQREGIDYNETFSPVSCKDSFRIIMALVAHYDLELHQMDVKTAFLNGDLEEKVYMAQPKGFVMKGNENMGCRLKRSIYGLKQASRQWYLKFDGTIKKFGFQENVEDNCIYSKFKNGRFIFLILYVDDILLASSDVSLLQETKKFLSSNFDMKDLGEASYVLGIEIHRDRTKYALGLSQKTYIEKVLKKFNMYRCSATPAPIMKGEKYGASQCPRNQFELNEMKTKPYASAVGSLQYAQVCTRPDLAFVTGLLGRFQSNPGLEHWKLVKKVLRYLQGTKGLMLSYRRSESLQIVGYSDSDFAKDNTKSTSGYVFTLAGGAISWKSSKQTITAGSTMYAEFIACYEATGQVNWLKKFIPGLKVVDSIEKPLKLYCDNEPAVMYAHNNQSSGAAKHIDIKYYVVKDKVRDQTISLEHIKTERMLADPLTKGLPPNVFKEHVAGMGLREAL

SEQ ID NO: 167392 - protein, 164 aa, Oryza sativa
  Clone ID: PAT_MRT4530_66007C.1.pep
SKASAAPPSRGGGGGGGGGGGLCPFGYPPPSVFSLPLLLRLLRLSFYRSRCVGVLLSRPFSCCAFLIVCSSSRFLKLLSRLLSLCLFFLPFCDLISPLSVPFPFCIRRMLSHSSISFSLFISVCFFLLTSVSLIFFLSPCFFFFHFSSFLPFSIIFSLSFLSFF

SEQ ID NO: 167393 - protein, 211 aa, Oryza sativa
  Clone ID: PAT_MRT4530_66008C.1.pep
ISDQMPTPGHRRKLPPAPPIGLNLGEWSSTSRRSSHRRMPPPSPADGHSVGGEHHQPSECIMRTVLSRHHHSEIFAKSMGVSEKRRKENEDEQEKEDDQIDGVDARRTEETLHCSITGIPFFSLFVSLRGEKKQEAPGSGPPHHWCGYGAGNDQSSHPFDGIVAHLDGSDCTSHRMEEVNRTPGCGLLSAAVDSVISALSRTSTTIGRAGD

SEQ ID NO: 167394 - protein, 485 aa, Oryza sativa
  Clone ID: PAT_MRT4530_66009C.1.pep
MSHDIEHAKWSLANKKCLAVVKNTVEPSILGSIPECDAVSEYLERIKTDQAVRDHILRMSNMASKLKPMDLGITDDFLVHLVMASLPKHFDNFIVNYNISPEKWNFEKLIANCVSTWRIDSGATIHACNCLKAFCSMRTTQRSESSIGVANGVEEKVEAAGDLCLELTNGFTLLLRDVFYVPSFQRNLISVSKLDFDGYDCRFGSGKCELWYYNACIGLVVLQDELYLLSLSQNVNVVFSLTKENKKRKSTPDVSSKLWHCHLGHISRGRIERLVKNEILPPLEFSDLEQCIECIKYYGQHTPYGQVPRPFARFLLENGIVAQYSTPSEPQQNGVAERHNRTLMDMVRSMMSYSTLPLGLWMEALKTAIHILNRVPSKSVPKTPYELWTGRVPSLAHLRVWGSPAEAKVFNPNIGKLDPVGGMAMRATNSPIGHEALRPNLPKPCEQWGFKPETSRLVRAKSPHGEDYGITTARGGESHGYLAKP

SEQ ID NO: 167395 - protein, 222 aa, Oryza sativa
  unsure (1)..(222): unsure at all Xaa locations
  Clone ID: PAT_MRT4530_6600C.1.pep
MLPQQVMMKTSSRLVHPSGAASMDQRSAKRVISTGETVFTWYTSNVTSICQQCEREGRRCGFSSQRNQAFCQHHSPRVTIIAATSSVGTFIVLSLIVATALYISLKSRYNEEIHLKVEMFLKTYGTSKPTRYTFSEVKKIARRFKDKLGHGAFGTVYKGELPNGVPVAVKMLENSVGEGPEFINEVATIGRIHHAXIVRXXRLCSEGXRRAXIYELMPHESL

SEQ ID NO: 167396 - protein, 695 aa, Oryza sativa
  Clone ID: PAT_MRT4530_66010C.1.pep
MVRGKRKDGGGARRCPDAGGARRGDAKVAGGGDLRVARSCAREKREARVATPMGCIKDIPTLKGDNYAEWKKKLDLAFILGKVDWVLTTPYPIEPAALVRGEKESDADWQKRERDNAPLIMSYDIEHAKWSLANKKCLAAVKNTIEPTILGLIPKCDTVFEYLKIIKSQFTGSSKIYATQLIKQLVTERYHGGGVRDHILRMSNMASKLKPMDLGILDYFLIHLVMASLPKHFDNFVVNYKISPKKWNFEKLIANYNKEKNYKTPSSKAKQPQHLPQQQQFTVEKDQCLHCKKRNYYKDYPDFLKMIMAKKEREAQQESQVQNVPNEEAPRRSERVRRLAIRDNYEVYNIEESHIEDDPTSYEEAMRSARSSEWLEDMKDEMKSMKLNDVWDLEEIPKGAKTLGCKWVYKTKYDSRGNIEKFKARLVAKGFTQREGIDYNETFSPVSCKDSFRIIMALMDVKTVFLNGDLEEKVYMAQLKGFVVKGNDNMGCRLKRCIYGLKFQSNPGPEHWKLVKKVLRYLQGTKGLMLSYRRSESLQIVGYSDSDFAKDNAKSTSGYVFTLAGGAISWKSSKQTITGGSTMYVEFIACYEATGQVNWLKKFIPGLKVVDSIEKPLKLYCDNEPAVMYAHNNQSSGAAKHIDIKYYVVKDKVRDQTISLELIRIERMLADPLTKGLPPNVFKEHVAGMGLREAL

SEQ ID NO: 167397 - protein, 111 aa, Oryza sativa
  unsure (1)..(111): unsure at all Xaa locations
  Clone ID: PAT_MRT4530_66011C.1.pep
KTSGTSTSPVPLERHSFITRVGGYLPTPIRIALLTNKPNEKAQHNHTRNIGDTQATPVADTRNYLTTTPGPTQRPRQHRGTPHSLTKXRGQVVCGIYPPPRGAHHGGIHXS

SEQ ID NO: 167398 - protein, 956 aa, Oryza sativa
  Clone ID: PAT_MRT4530_66012C.1.pep
MELSGETASPAPEPEPPGQPEVSPRGAGMFEDAVEGSSTATESPVAVARPDGEATTESSSPSASRTLAGDEPAAAGAGEVEAYGGDESPSVSEPREESGSVDTGSAASPSVLRSEQRARGAEEQENSMAAQLGEGSPAREETKSRISSAPSSPVLSGTSTSSSSPLSQIKHQARHVRTGSFQRFRQQMQRAWKWGPIGSGGGGERSPREQLLRTTVNFEAMAHQKRQWYQIQSKSRDNKQYKEPTTLFEHFFVVGLHSYANVGVIEDAFAKKKAWESNVEHSEIVDLRKIQYHGPIPTMEPQILFKYPPGKKAEIREIDLPSFCFPEGVKLCFIKRRSERKIQLRARLIERTPSMSDLNEVVFGQEHLCRDDLSFIFSMKVSDNAPLYGVCLHVQEIVQRAPGILGMVSPLNPTSYKPSRFLVSAPRCYCLLTKVPFFELHYEMLNSIIAQERLDRITQFASEIALAEPIPRSMKEQSQVNGEDFESANELSYNDWTEYAVPVNSISGLISSSGLPSEGEIPSYLFRSWEPNSPESMSASETSDSSYIRELEKEGRHSFQQYEDCISENLGSRCDSFGRTSYTYENGHTSPDLLSTHSPISRRIMRAQSMESLHSSVKGVGSDEEEELNMKQEIVVDDEKVMGWAKVHNNEPLQIVCGYHALALPPRGGELVFHPLEHLQPVKYSRPGLSLLGLGDTISDNGLTSVEKTEVNARLAAAEEAIALSIWTTATICRALSLESVLELFAAALLEKQIVVICSNLGVLSAIVLSVMPMIRPFQWQSLLLPVLPRKLVDFLDAPVPFIAGVQHKPPDIKMKASSIVRINVDKDQVKACSLPQLPRFKELVSDLSPIHARLSCENALAKRHPIYKCNEVQAEAAWQFLNVMRSYLESLCSDLPSHTITNVQSNNDRVSLLLKDSFIDSFPSKDRPFVKLFVETQMFSVLSDSRLSTFENELT

SEQ ID NO: 167399 - protein, 1197 aa, Oryza sativa
  Clone ID: PAT_MRT4530_66013C.1.pep
VDCVLTTPCPIEPAELVRGENESDADWQKRQRDNAPLVMSYDIEQKKWSLANKKCLAVVKNTIEPTILGSIPECDAVSEYLEKIKSQFTGSSKTYATQLIKQLVTERYHGGGVRDHILRMSNMASKLKPMDLGITDDFLEERIKGSNGGSINYVKDKKKNHKSPASKAKQSQHLPQQQQFAVEKDQCLHCKKTGHYKKDCPDFLKMIMARKGENIITFVNESYYVGYSRSTWWIDSGATIHACNCLKAFRSTRTTQRRESSIRVANGVEEKVEAVGDLPLELANGFMLLLRDVFYVPSLQRNLISVSKLDFDGYDCRFGSGKCELWHNNACIGLAVLRDEFYLLSLSENVNVVSSLTKENKKRKRTPDVSSKLWHRRLGHISRGRIERLVKNEILPPLEFSDLEQCIECIKGKFVKSIKKGAKRSARILEIIHTDICGPFPVKSVDGYDSFITFTDDYSRYCYIYPIKERSEALDKFKIFKAEVENQHDIKIKVVRSDRGGEYYGRHTPYGQVPGPFARFLLENGIVAQYSTPGEPQQNGVAKRRNRTLMDMVRSMMSYSTLPLGLWMEALKTTIHILNRIPSKSVPKTPYELWTGRVPSLAHLRVWGSSAEAKVFNPNIGKLDPKTVGCHFIGYPERSKGYRFYCPNSYTKFVEMRHAVFLEDEMIRGSSDSTEMVATPEEELQQPQIDNVPVQETQQEPQVQDVPNMQAPRRSERVRRSAIRDDYKIYNIEESHMEDDPTSYEEAMRSARSSEWLEAMKDEMKSMKLNNVWDLEEIPKRAKTDLMALVAHYDLELHQMDVKTAFLNGDLEEIVYMVQPKGFVMKGNENMGCRLKRSIYGLKQASRQWYLKFDGTIKKFGFQENVEDNCIYSKFKNGRFIFLILYVDDILLASSDVSLLQETKKFLSSNFDMKDLGEASYVLGIEIHRDRTKYALGLSQKTYIEKVLKKFNMYRCSATPAPIVKGEKYGASQCPRNQYELNEMKTKPYASAVGSLQYAQVCTRPDLAFVTGLLGRFQSNPGLEHWKLVKKVLRYLQGTKGLMLSYRRSESLQIVGYSDSDFAKDNTKSTSGYVFTLAGGAISWKSSKQTITAGSTMYAEFIACYEATGQVIDSIEKPLKLYCDNEPAVMYAHNNQSSGAAKHIDIKYYVVKDKVRDQTISLEHIKTERMLADPLTKGLPPNVFKEHVAGMGLREAL

SEQ ID NO: 167400 - protein, 108 aa, Oryza sativa
  Clone ID: PAT_MRT4530_66014C.1.pep
MVLRRSFIIRLFSFRSIEAHPAKVAKVFGGYNKWLFLDECPYIQRTHPTKSFPRPEAFRRKRTWDQDQTEIEEPTLHHLVTVIIKRFRWARLRGCSCWTATELVTFFR

SEQ ID NO: 167401 - protein, 932 aa, Oryza sativa
  unsure (1)..(932): unsure at all Xaa locations
  Clone ID: PAT_MRT4530_66015C.1.pep
MLLTLLLPSLERLGRGGGEKLSGERDVVKNERTNASDATVPGFLPQQTTVXLRQDQCLHCKKTRHSKKDHPDFLIVIMAKKGENIFTFVNESHYXGYSRSTXWIYSRATIHMCNCLKGFRSVRTTQKXERSIRVANGVEAKVEAVGDLRLELVNGFTLLLPDVFMSLLCKEISVSKLDFDIYDCHFGNGKCELWYNNACIGLVLQDQLYLLSLSENVNVVSSLTKEXRKRTPDVSSKLWYXRLGHISRGRIKRPVKNIILPPLEFSVLEQCIQAYNASVPKTPYDLWILRVWGSLAKDKVFNPNLRKLDPKTVSCHFIGYSERSKGYHFYYPNSCAKFVETKHAVFLEDEMIRXSSVVREIDLEERRVSVPAKSTQEPFFSLPADVVLAMHDVAVPTHVAISPVATMNESEEPVLQDSTEIIATSGEELQQPQIDNVPEXEAPRRSERVXHMEDDPTSYEEAMRSDRSPEWLETMKDEMKSMKLNDVWDLEEIPKGAKTVGCKWVYKTKYDSXGNIEKFKARLVAKGFTQREXDYNETFFPVSCKDSFMIIVAHYDLELHXMDVKTEFLNGDLKKKVYMAQPKGFVMKGNENIGXCIKRSIYGLXKASRQCYLKFDGTIKKFXGFQENVEDNYIHSKXKNGRFIFLLASSDVSLLQETKKLLSSNFDIKDLSESSYVLGIEFHRDRIEYALGLSQKAYIEKVLKKFNMYRCSATPAPIVKGEKYGGXQCPRNQYELNEMKTKPYASAVGSLQYAQVCTRPDLAFVTGIFGRFQSNPGLEHXRISKDYLQRTKGLMLSYRKSEXLQIVGYSDSDSAKDNTKSTLGYVFTLAVGAISWKSSKQTITAGSTMIEKPLKLYCDKEPTVMYSHNNQSSGAAKHIDIKYYVVKDKVWDQTINLEHIRTERMLTDPLMKGLPPNMFKEHVACMGLREAL

SEQ ID NO: 167402 - protein, 897 aa, Oryza sativa
  unsure (1)..(897): unsure at all Xaa locations
  Clone ID: PAT_MRT4530_66016C.1.pep
MAPFPVAGPQKENKWRGRWFYLQIEDSDPVFIVPEEQPNKIPSWTTKPALISSLQSFIDVINDLREQGLSGYEVTADFIGLDSATVERRVSQLVISGPTTASNVPVPLCEKGAAERDAAINALPLTDIIGPLVDHQVAALLKEKVAKEASDAAAAAATTSGGNVPKKGRKFSSMVGHRRKTPTPSASDASPPPPRRQRLVMLSENLAARAKVAQDGSGGTSSASPAMASTDVVVVPRSREATPSGPISDLAAGRGSPAAVLTWEELQVEMGRLLEASARGXARAAAASSANERADRLARDLAEVCEDLQKMQELVAGNERQRQGLEHRMSELENRLSEIRGSLRVTYTGLHQLAGEYGVKATIPANPDEFSLTSSLEELAAAMEAIPSKHAARVGEETSNGIYTGACHVLACKILDQGAASDVRKDEMEEDHRIQYWRTKFEVAELKRTMLEVRKDQAVETLRGREVWFNSYLKSCCTSMSRVCKELRVPRGDPEESAAGYISWLNGASTQLEGIGQRIDEALKQECRRSSRYAGGHDSTEIIATPEEELQQPQTDNVPEQQAPRRSERVRRSAIRDDYQVYSIEESHMEADPTSYEEAMRSARSSEWLEAIGNIENLKARLVAKGFTQRERIDYNETFSLVYCKDSFRIIMALVAHYDLELHQMDVKTAFLNGDLEEKVYMAQTKGFVMKGNKNMGCRLKRSIYGLKQASRQWYLKFDGTIKKFGFQENVEDNCIYSKFKNGIFIFLILYVDDILPSSSDVSPLQETKKSLSSNFDMKDLGSTMYAKFIACYEATRQVNWLKKFIPGLKVVDSIEKPLKLYCDNEPAVLYAHNNQSSGAAKQIDIKYYVVKDKVWDQTISLEHIRTERMLADPLTKGLSLNVFKKHVVGMGLREAL

SEQ ID NO: 167403 - protein, 271 aa, Oryza sativa
  Clone ID: PAT_MRT4530_66017C.1.pep
MGALPRALVLGVCAAVLLVNVLAVAADGDAAAAASMVVGLAKCADCTRKNMKAEAVFKGVRVAIKCKNSNGEYETKATGEVGKSGAFAVPLAADLLGDDGELRQQCFAQLHSAASNQPCPGQEPSWIVNAAADKKKTFVAVAGDTHFPSSECASAFLCDPFHKKDFFFHYKNPSPPAPAAYHKPPPSYTHPAPPVYSYPTPAYSHPTPVYKQPLPTPSPPIYHPPAEEKKVAMQDDAEADPELFKKLLPLIKKNPFLKFPKLPPVEVEAKP

SEQ ID NO: 167404 - protein, 222 aa, Oryza sativa
  unsure (1)..(222): unsure at all Xaa locations
  Clone ID: PAT_MRT4530_66018C.1.pep
MSYDIEHAKWSLANKNCLAAVKNMIEPTIFGSIIEYDTVSKYLECIKSQFTGSSKFHATQLIKQLVTERYHGGGVKDHILRMSNMASKLKQKDLGISDDFLVHLVMSSLPKNFDNLVVNYKISLEKWDIEEHISNCVQEEERLKEINGGSINLVKDNKEKSXRSSSSKAKQPQHLPQQXQFTVETGSVSPLQEDKTFQERSSXLPDSDHGKERGGAATASNR

SEQ ID NO: 167405 - protein, 1296 aa, Oryza sativa
  Clone ID: PAT_MRT4530_66019C.1.pep
MATPSTRSRGYSLMGCIKDIPTLKGDNYAEWKRKLDLAFILGEVDWVLTTPCPIELAELIRGENESDADWQKRQRDNAPLVMSYDIEQKKWSLANKKCLAVVKNTIEPTILGSIPECDAVSEYLERIKSQFTGSSKTYATQLIKQLVTERYHGGGVRDHILRISNMASKLKPMDLGITDDFLVHLVMASLPKQFDNFIVNYNISPEKWNFEKLIANCVQEEERINESNGGSINYVKDKKKNHKSPTSKGKQSQHLPQQQQFAVEKDQCLHCKKTGHYKRDCPDFLKMIMAKKGENIITFVNESHYVGYSRSTWWIDSGATIHACNCLKAFRSTRTTQRRESTIRVANGVEEKVEAVGDLPLELANGFILLLRDVFYVPSLQRNLISVSKLDFDGYDCRFGSGKCELWHNNACIGLAVLRDELYLLSLSENVNVVSSLTKENKKRKGRIERLVKNEILPPLGFSEQCIECIKGKFVKSIKKGAKRSAGILEIIHTDICGPFPVKSVDGYDSFITFTDDYSRYGYIYPIKERSEALDKFKIFKAEVENQHDIKIKVVRSNRGGEYYGRHTPYGQVPGPFARFLLENGIVAQYSTPGEPQQNGVAERRNRTLMDMVRSIMSYSTLPLGLWMEALKTAIHILNRVPSKSVPKTPYELWIGRVPSLTHLRVWGSPTEAKVFNPNIGKLDPKTVSCHFIGYPERSKGYRFYCPNSYTKFVETRHAVFLEDEMIRGSSVVREIDLEERRVSVPAPSTQEPFFSLPADVVPAMPVIEVPTPVVTPPVATMNESEEPVIQDSTEMVATPEEELQQPQIDNVPVQETHQEPQVQDVPNVQAPRRGNIEKFKARLVAKGFTQREGIDYNETFSPVSCKDSFRIIMALVAHYDLELHQLDVKTAFLNGDLEEKVYMAQPKGFVMKGNENMGCRLKRSIYGLKQASRQWYLKFDGTIKKFGFQENVEDNCIYSKFKNGRFIFLILYVDDILLASSDVSLLQETKKFLSSNFDMKDLGEASYVLGIEIHRDRTKYALGLSQKTYIEKVLKKFNMYRCSATPAPIMKGEKYGASQCPRNQYELNEMKTKPYASAVGSLQYAQVCTRPDLAFVTGLLGRFQSNPGLEHWKLVKKVLRYLQGTKGLMLSYKRSESLQIVGYSDSDFAKDNTKSTSGYVFTLAGGAISWKSSKQTITAGSTMYAEFIACYEATGQVNWLKKFIPGLKVVDSIEKPLKLYCDNEPAVMYAHNNQSSGAAKHIDIKYYVVKDKVRDQTISLEHIKTERMLADPLTKGLPPNVFKEHVAGMGLREAL

SEQ ID NO: 167406 - protein, 600 aa, Oryza sativa
  Clone ID: PAT_MRT4530_6601C.1.pep
MDFTNLLITVLLLLAPLKYKSDVATASDDEDFFKTCSSHRCSKHGPEIRYPFRLSTQPPSCGAPGMQLSCSGQDTILDHPVLGSCKVTMIYYRHVIMNAIPLVDSSPHCLLHKFISVNQSTAVYRPHTLKAASLVGCSRDSIDTNQYNSIVGPTSCLSLANNASQFWYLAYPYEYMSILPLGCTIVSKDIPMPYSYDKNGPNFDISIFTETAKRVISTGETVFTWYSSNVTSICQQCEHEGPRVTIIAGTFIVLSLIVATALYISLKSRYNEEIHLKVEMFLKTYGTSKPTRYTFSEVKKIARRFKDKLGHGAFGTVYKGELLNGVPVAVKMLENSVGEGQEFINEVATIGRIHHANIVRLLGFCSEGTRQALIYEFMPNESLEKYIFPHGSNISRELLVPDKMLDIALGIARGMEYLHQGCNQRILHFDIKPHNILLDYSFNPKISDFGLAKLCARDQSIVTLTAARGTMGYIAPELYSRNFGAISYKSDVYSFGMLVLEMVSGRRNTEPTVENQNEFYFPEWIYERVMNGQDLVLTMETTQGEKEMVRQLAIVALWCIQWNPKNRPSMTKVVNMLTGRLQNLQVPPKPFTSSQNQLVI

SEQ ID NO: 167407 - protein, 73 aa, Oryza sativa
  Clone ID: PAT_MRT4530_66020C.1.pep
MGEPAGGIPQPAPAATEAFAGRRWPRAMKSVDETANPGVSVTALLSSQSLLLAHAHAHAAPNPESVARRPEKA

SEQ ID NO: 167408 - protein, 86 aa, Oryza sativa
  Clone ID: PAT_MRT4530_66021C.1.pep
LSLTCSGYAKNTQSVDEVSHLSPLDEHLTAASNTCMRSMLATQDFMDTRLRNVPRPTTKLPIINPRRMRASCRSSSATSSCKVLAR

SEQ ID NO: 167409 - protein, 71 aa, Oryza sativa
  Clone ID: PAT_MRT4530_66022C.1.pep
GQRFLKMDKGSYAKDKGFLRTNVSCQGPHLLCVGGCSGAATCTPQNISDPLSIEILENIKMEFFIKKKKKK

SEQ ID NO: 167410 - protein, 83 aa, Oryza sativa
  Clone ID: PAT_MRT4530_66023C.1.pep
MMSGRMNAAGDESPFPFGAMQAPGPGAYVGFDHGAAAVAAAAAAAHGAGMLQHHHHHMYDGFDFAAAMQFGGGDAPHPQLACR

SEQ ID NO: 167411 - protein, 117 aa, Oryza sativa
  unsure (1)..(117): unsure at all Xaa locations
  Clone ID: PAT_MRT4530_66024C.1.pep
NENPSRRAVVGYLLHHPSIQARRVLQRREGGEGKATAPMNLYGSTLSWNVTRCVPELEEAGSYNEIAXLDYCKGEHIAPDHLDRNPCSXVPALQRRDLCLXESRAIASEXCRENKTE

SEQ ID NO: 167412 - protein, 56 aa, Oryza sativa
  Clone ID: PAT_MRT4530_66025C.1.pep
HVFCIQILMFFAVNLDKNANAFFSPWISFLYYNLMWNMGMATFYIVNIYVPLLARR

SEQ ID NO: 167413 - protein, 181 aa, Oryza sativa
  unsure (1)..(181): unsure at all Xaa locations
  Clone ID: PAT_MRT4530_66027C.1.pep
MAHEGSVFPEKSKGEPPGWHVHGDLHGRSFVARACHNYGPRDGGMTKFRGGGGAGKKLRHAHKVFDEMCSREKKRQRGADELVGARRSFIGGXGLWWHGARRGATXGRRRSSGTRLAGAGREARRDGARRGSEADATARGAAMMSMRRRRRRHARRSGAREDATVDGDGARRDGDGAATAT

SEQ ID NO: 167414 - protein, 417 aa, Oryza sativa
  Clone ID: PAT_MRT4530_66028C.1.pep
MDIAGGGSPEGQQPETLTTAAGGAQDGGQDWRKAELGTSSGTSSSPSPRGSGRGGARDDGGDGRKAELGTSGGTSIYPSLRSSGGGGAREQWRAELGARRARDGGGDGWQVKLGTSGGTPPISVTERQQRRRSSRLPRMLDHFLGTGDKGGRDGVGSAGVSGCPAAGFTAAHEGTAHCLLRGIERRRRLLLGLCRHTPPPRPPRELAATVSYTRGCSQPAAHGSSSASVGAWGSSSVEGKRYLMTSQPTKPNTTSSGGNQLPAAPPQDLFIPNPHLMRISEDCKFPHRAAPQRPATAMCCPCRRRISPLTPKPTTPAAAACLGALWRMPASHTSWRPCAGAGDLGDGDVGHEQKDGSRSNNNGRRRWDGWDLGPWSHMEKVIAEIDGEYQFAFSFLFLQNPIDLLFFSFSLELCSIC

SEQ ID NO: 167415 - protein, 1179 aa, Oryza sativa
  Clone ID: PAT_MRT4530_66029C.1.pep
MATDLSQSLDLSIYRHKDYLLLTSTADRVDLVLIYLFTIADRFTYDIGSKKYKLKVVAADEVGSSSSQGDKGAAAGSGDKGDVPQDGTVEDLGADDNQEPLQFNNFQDRIDYAVQHALINQSGVLAFGDSKPAECYTAGSADGTSFNYCTSCVIIGTKTDMMREQFGLKPKDTGNMYRHPYPSQYKKVILHEQRFAEAKKNFKKINHVYPYMYDSEEYDDSEVAAAEWIQLPAGHVIPSAEELGKRRYCKWHNSGSHSTNDCKVFRQQIQVAIEGGKIKFDDSKKPMMVDGNPFPVNMTHTSGRTADGGKNRNFQMNSARIINKYQRRYEKQQERYYEEENDGGFDPHWNCDFFRFCWNKGMRLPSIEDYPGCSEDTGSSSRSYNRGNRLTQKRVPVHQRLGPVNQDYYHDEDESRKAQWCSTVIFTKNQKRRVQRLRNRERFQEVQQEISHRLRKIKTKQEWRVKSTVTTADEVEADKAKRLLKGKAVFEKPEGTENRHLKPLYINGFVNGKLMSKMMVDGGAAVNLMPYATFKKLGRNSDDLIKTNMCLIQWQGDKIEIMPADSQLKMENPNYCFEGIVEGSNVYTKDTVDDLDDKQGQGFMSANDLEEIDIGPGDRPWPTFISKNLSPEFRTKLIELLKEYRDCFAWEYYEMPGLSRSIVEHRLPIKHGVRPYQQPPRRCKADMLEAVKAEVTRLYDVGFIRPCRYAEWVSNIVPVIKKNGKVRVCIDFWDLNKATPKDKYPMPVADQLVDAASGHKILSFMDGNAGYNQIFMAEEDIHKTAFRCTGAISLFEWVVMPFGLKSIGATYQRAMNYIFHDLIGWLVEVYIDDVVVKPKEIENHIADLRKVFERTRKYGLKMNPIKCAFGVLAGQFLGFLVHEKGIEVTQRSINAIQKIQPPEDKAKLQELISKINFVRRFISNLSGRLEPFIPLLRLKADQKFTWGAEQQKALENIKEYLSSPTSFNSSKKGIPFRLYLSAGDKSIGSVLIQELEGKERVVFYLSRRLLDAETRYYKGCQDCQKFGAIQRAPASAMNPIIKLWPFRGWGMDMIGQINPPFSKGHKFILVATDYFTKWVEAIPLKKVDPGDAIQFVKEHIIYRFGIPQTITTDQGSIFVSDEFVQFADSMGIKLLNSSPYYAQANGQAEVSNKSLIKLIKRKIFDYPRQWHTSSLWNIS

SEQ ID NO: 167416 - protein, 581 aa, Oryza sativa
  Clone ID: PAT_MRT4530_6602C.1.pep
MDLPKLLFTVLILSLLNYESSSATAWDDEDFFKTCSSHRCSKHGPEIRFPFRLSTQPPSCGAPGMHLSCSGQDTILNHPVLGPCKVTEISYSYATMNVIPPVDSSPHCPLQKLMSKNQSTSVYKPQGPQSQGATLVVCSRDPIPANQYDIVGPISCLGHNNQFWYLADPYTYMSVLPLDCTVISKGIPMPYSYDKKGRINWDTSNFKETANRVINDGPRVTLVAATSSVATFVILSLVVATAFYISLKSRYNKEIHLKVEMFLKTYGTSKPMRYTFSDVKKITRRFKNKLGHGGFGSVYKGELPNGVPVAVKMLENSLGEGEEFINEVATIGRIHHANIVRLLGFCSEGTRRALIYEFMPNESLEKYIFSNGSNISREFLVPKKMLDIALGIARGMEYLHQGCNQRILHFDIKPHNILLDYSFSPKISDFGLAKLCARDQSIVTLTAARGTMGYIAPELYSRSFGAISYKSDVYSFGMLVLEMVSGRRNTDPTVENQNEFYFPEWIYERVINGQELVLNMETTQGEKETVRQLAIVALWCIQWNPTNRPSMTKVVNMLTGRLQKLQVPPKPFISSENHLAT

SEQ ID NO: 167417 - protein, 305 aa, Oryza sativa
  Clone ID: PAT_MRT4530_66030C.1.pep
MGCLSRHQLCLGGNRGLPFLRKFKHKEIEAATNGFSAILEAGPGGRAAYRARFADGLVATVRRAGGDGDQDREAFYRELQLLARLNHRHIVRLHGYSDGHSRFLVFDQMENRSLKECLHDPLRTPLNWRTRLQVAIDVAAALEYLYYFCDPPVFHVSVNSSNVMMDANFVAKLSDISVIGYDPKRTVESNAASFEDEIQQRRRDLVFQYGVLILELVTGQSPGGEGELVQWVQEPGFACTMYKMVDADLGNIYDSKELRNLVIIARLCTRPGNDAMVSIPLILRYLQGKVANLGCESENICELSV

SEQ ID NO: 167418 - protein, 478 aa, Oryza sativa
  Clone ID: PAT_MRT4530_66031C.1.pep
MRIPTETETETGTGARIPSHRRRKGSSDGSRAVHRRKPTPTKETEIPGGHGRPKRSSSALSLDGAGDSNPTWVILNRVGARRDSFRGDRTTSVASRTSGGKEISVSFELAPPPETSLLTLDWPQGPRPSEGTTSYPYVIAAHGNVVLLEIISTAKCPRPIDIDYFVYKAKPNGEPSLTRLPVCYWKGASGRDNPRPRIMSRVAMGVLSCSKDSFVVAEMERRSYQPSAANIYMFFSGSDGWRVFRDVRIDHINGAGWWSTDAVLSYRRRYLIWVDYLRGMIVAKLAHPGGGDPQEPALWYVPLPVDPVMGNPYDSERGRGCPEASRNVCATHHGIKFVNIINQCGGSFSITLWSWCEDGTWREDATLDAAQLWDLDCENRLPNVQPEFPIVDMENPYTVCFLLNEGNYIVPEATTWMIKVHMKKKILLGCTSYSKNGSLSHQNTTYMTARRMSERLSFISSEMPYYLSGQTMKRIFLV

SEQ ID NO: 167419 - protein, 128 aa, Oryza sativa
  Clone ID: PAT_MRT4530_66032C.1.pep
MVVIRELAAVGRFPRCRSSAGEAQAADAMPPSPGFSFGQNWRGGRRVVEQRGLGPALRGGGSMKSADGGASVRRKPSPVVHRAGSGYVFGRRNLFGALSRMGDGGILDVVTTLVASFSEPRLCVFDDL

SEQ ID NO: 167420 - protein, 59 aa, Oryza sativa
  Clone ID: PAT_MRT4530_66033C.1.pep
MEGMKADPLLTKTMSVASSPMAAANDFFAAMVVAPCPIAERRWSKSQEVHTKGGSGARV

SEQ ID NO: 167421 - protein, 219 aa, Oryza sativa
  unsure (1)..(219): unsure at all Xaa locations
  Clone ID: PAT_MRT4530_66034C.1.pep
ITHSTLSGPTATPQRRGXRKRCHQGGHDIQDAAIAHLXKRCGFHPEKLVEKGRGNSPQRRGGAPGRARVPTGNEENDPPPPAPLXLPSGRRWRCRSKPAPPASAPVIRPRASPXPPRRHLGCPARTSGVAAAASGRLRCQPGTPPPPPRAGSXHAELRLSAATAPGPASPSHSQPPPCRLAAGRTPXHHDRTPPRWAPLPLWQPAGPPPLCARVGQGGP

SEQ ID NO: 167422 - protein, 131 aa, Oryza sativa
  Clone ID: PAT_MRT4530_66035C.1.pep
MGGLNFGLKWHVFQIAKRRFKVVFEYLPPPRGKVDRSVATVKMMLDFFILEMMPTQIGEAIHTYCLAPSTNLRAEDIPDPHPDLLPAILSAFLAPVVDSIRTPHTPLPSSLPTSAASWGGVFAGMLSADGV

SEQ ID NO: 167423 - protein, 272 aa, Oryza sativa
  Clone ID: PAT_MRT4530_66036C.1.pep
MSKLQTEALKEAISQVVADCKEKNRKFTETVDLNRRLLSSRAVSLPDPPPPPPPIIMSKLQSEVLKEAISQVVGESKEKGRKFTETVELQIGLKNYDPQKDKRFSGSVKLPHIPRPKMKVCMLGDAQHVEEAEKIGLDYMDVEALKKMNKNKKLVKKLAKKYHAFLASEAIIKQIPRLLGPGLNKAGKFPTLVTHQESLESKVNETKATVKFQLKKVLCMGVAVGNLSMEEKQIQQNIQMSVNFLVSLLKKNWQNVRCLYIKSTMGKPIRVF

SEQ ID NO: 167424 - protein, 98 aa, Oryza sativa
  unsure (1)..(98): unsure at all Xaa locations
  Clone ID: PAT_MRT4530_66037C.1.pep
RPKPVKWTSYSRRTSSSGQRAVGGTTETGRWAKGWRSAGGGRSRGAAGGXERRRAVDGATTGSEQRDESAAREEASSSGRPAXKRQRAPADWREGEER

SEQ ID NO: 167425 - protein, 53 aa, Oryza sativa
  Clone ID: PAT_MRT4530_66038C.1.pep
SNRFRSEAMSRVQPIVQGLHLQKEGVVFFAQTLALDRSAPTLSLPSICGIYRK

SEQ ID NO: 167426 - protein, 98 aa, Oryza sativa
  Clone ID: PAT_MRT4530_66039C.1.pep
EGVLAGSFGAHDVKELAGAGATVDVRKTWRGDGVGACPRLVLVFLPAPSLHHHDRVSALANMNGYGYAVVDASSLHLTDSFFHAPHYVLLLVPADSCS

SEQ ID NO: 167427 - protein, 159 aa, Oryza sativa
  unsure (1)..(159): unsure at all Xaa locations
  Clone ID: PAT_MRT4530_6603C.1.pep
MASLNRPIVFLQFARLLLCNGSLAQQLLGHSTSQWQSSRRGXSRECRLDRLQAFEPIRSVRPQAGTTEFFDVSNEQFQCTGVSADRGVIEPTILLLPHYTNGASLVHMIQRRGITGPTSPRSPESYLEQVQQSGQAQLTDSQSQSPKLRDEHGKIHRFT

SEQ ID NO: 167428 - protein, 80 aa, Oryza sativa
  Clone ID: PAT_MRT4530_66040C.1.pep
MAVWQAIAPPKSMGPGHTLRCDLLTSRTHKRGSIRIPAIGAPHPNNHIDYFLYVMAGGDNMVGGKKSNGDGSIGRNGHGN

SEQ ID NO: 167429 - protein, 507 aa, Oryza sativa
  Clone ID: PAT_MRT4530_66041C.1.pep
MEINSAATLTLVSLLTLPILLALLTRKSSSKKRRPPGPWNLPLVGGLLHLLRSHPQVALRELASKYGPVMFLRMGQIDTVVVSSPAAAQEVLRDKDVMFASRPSLLVSEIFCYDNLDVGFAPYGAYWRMLRKLCTVELLSTKVVRQLAPVRNDETLTLVRNIKAASSGHGGGGGKKPVTLARLLTTCTNTITAKAAFGQACGVELQEQFLTALDVGLKFSGGFCFGDLFPSLRFIDAMTGLRSRLWRARGQLDSVFDKIIAQCEEHQGDSLVNVLLRIRDQGDLEFPFGTTNIKAIILDMFTGGTETTSSAAEWVMSELMRNPEVMAKVQAEVRRVFDNKSPQDHEGLIDNLRYMKMVIKETMRLNPVLPLLMPHLCRETCDIGGYEVVEGTRVVINSWAMARSPEYWDDAEEFKPERFEDGMADYKGSRFEYLPFGTGRRRCPGDTFGMVLLELIVARLLYYFDWSLPAGMQPDDVDMDFVVTATTRRKNHLQLVASPYKLAPIQI

SEQ ID NO: 167430 - protein, 625 aa, Oryza sativa
  Clone ID: PAT_MRT4530_66042C.1.pep
MKRKRRRRRSGKGNVPPSSPPTAILAAVFVDSDQTVDLVHPSLGVRKLHAVVADRVSLVPQQILASLARPRRARRVPHNEGTDLTATIAREGFDSYVLAVLRRSHRECRGGRSRPGKKAVAATAGDRARHPEAPPPDGSGLPGLDPLAGGDIDECALPGIMSNCSFNSVCVNRPGGFDCPCKRGMTGDGKRGTCTENFPPAAKAAVGLSSFIVFIVLIFMVKQHLKLKKFYEQNGGPVLKGVRNIKIYTKKELKQITSNYSSDIGEGASGKVYMGTLKGGQQVAIKKSKKVDEERKSEFTQEVILQSEMKHKNIIQLFGCCLEVDVPMLVYEFTVKGSLHDVLFKCDENMKGNLHDVLPKYNDNKKGKGKGKGKVHDALVECDGNKNVSLHDVLFKCGDKIAIDTLLEIAIGSAEGLTYMHTARETPIRHGDLKSGNILIDNNFVPKISDFGTSRSLVAGHKFRPDKFIPADMNYIDPVYMEDGMLTEKSDIYSFGIVLIELVTRKPAKYDDDRSYVRNFIQAYLDKREREKCHKEITPDVEINILEMVSEVAVACLEPVQDKRPDMIEVERQLHRIRHIAGQRIEEKKEEFQRAFPRTGSVISNGFKASSLSGRVPVTKQRSLM

SEQ ID NO: 167431 - protein, 123 aa, Oryza sativa
  Clone ID: PAT_MRT4530_66043C.1.pep
MVVTLIIVPLALRGASLLGNAVAAAVVPSSSPEQQQQQQRRPRPPPGSKNGASPSSSAHGQHWKDQSRHAAFTRRRFGTGTGGGGDDGFFSDDKRFSPTGSNPLHNLSSLWLLGYVLVASDAT

SEQ ID NO: 167432 - protein, 137 aa, Oryza sativa
  Clone ID: PAT_MRT4530_66044C.1.pep
HASRPRRKKKKKKTTAKMKGAAAVAMVVVAGCLLAAAAVSVVDGAVTCGDVDASLLPCVAYLTGKAAAPSGDCCAGVRHLRTLPVGTAERRFACDCVKKAAARFKGLNGDAIRDLPAKCAAPLPFPLSLDFDCNTIP

SEQ ID NO: 167433 - protein, 107 aa, Oryza sativa
  Clone ID: PAT_MRT4530_66045C.1.pep
FGFFFFFVFFFFRAQHRRCIFYLGPHAHKIPGRPVTLTIPLPTPTIITATITIACPLPVAIPRTRTFKHSPPWGHRMPRSPGGERRQQPQTPLQTPSKIDISRSDGV

SEQ ID NO: 167434 - protein, 560 aa, Oryza sativa
  Clone ID: PAT_MRT4530_66046C.1.pep
MAVAVAASLSTPAPSPAAGGRGRRRVNVAVASLRRAAAGGGSSWRSERRLMSELERTVTPGAAERVIRSYVASKSERAALAALSRLLMDSDPFAIPFYEVVTQARWFKWSSIHAAAVAALLESNGSAEESRSLISDSISRLHSTSSSSEEVSLFYCDLMAAFSSRGMRDRAMDFYSQLRASPPLSGKKTYTAMIKSLCLMGLAGEAEAALREMASRGHQPEAFQFGLVAKCYGKAGSMAEMERVISSMSDAGIRLGTGAANIVLSCYTSCRDHSRMLAWLRRMRKLRIAPTTKAFNFVLNSCPTVASMAQELGESLPLSTAELVKKLRSASQWPAEAELVQELLTSSSVLDKAMDWSESEVKLNLHGFSTIAAYVLILQWVDAMKARRALPLEVSVVCGIGKHSDVRGEPKVRELAQEVLSRMGSPLRLSMRNKGRLVAKRDRVKQWLATDWSSPVDEESTDQSPNGDNQQPFLLTLMRKLGQLLEGYGTDKPCCPVIEGKAYNLGGGLGRVEEIPEEISATVSAAAGAGGTGFLGVELATTTTACTLHLYKPSSLWIFN

SEQ ID NO: 167435 - protein, 41 aa, Oryza sativa
  unsure (1)..(41): unsure at all Xaa locations
  Clone ID: PAT_MRT4530_66047C.1.pep
MGRRPARCYRQNMNKLDPKSRNCRGVPXDPMIRIYDVGMMK

SEQ ID NO: 167436 - protein, 384 aa, Oryza sativa
  Clone ID: PAT_MRT4530_66048C.1.pep
MARLILIPLLTVTDFSSSHLSHMATVWVFVLSLIGLVPLAERLSFLTEQIAFYTGPTVGGLLNATFGNVTEVIIALLALREGKIEVVKCSLLGSILSNLLLVLGTSLFLAGIANLRAHQPYDTKQAHVNTALLMLAVLCHSLPLMLRYAVTSGDHAIVSGDAALHLSRACSILMLIAYLAYLFFQLNTHRQLFEPQQVEDDDDDDLVIAQDDEPVLGFSSAMIWLALMTLLTALLSGYVVSTIEAASESWELSVSFISIILLPIVGNAAEHAGAVIFALKNKMDITLGVSLGSATQISMFVVPVSVIVAWTMGIPMDLDFNLLETGSLFLAILVTAFTLQEGESHYLKGLILVLCYAVISVCFFVIRRRSAGGTDGVHHLDVIV

SEQ ID NO: 167437 - protein, 49 aa, Oryza sativa
  Clone ID: PAT_MRT4530_66049C.1.pep
MLGHTPIPLLLRRPPRREGSNDAMLNFKGDCFEFLPSDFDRHSCLEMTL

SEQ ID NO: 167438 - protein, 636 aa, Oryza sativa
  Clone ID: PAT_MRT4530_6604C.1.pep
MDFTNLLITVLLLLSPLKYESDVATASDDEDFFKTCSSQRCSKHGPEIRYPFRLSTQPPSCGAPGMQLSCSGQDTILDHPVLGSCKVTMIYYRHVIMNAIPLVDSLPHCPLQKLVSVNQSTAVYKPHTSEVASVVGCSRDSIDTNQYGIVGPTSCPSLANNASQFWYLAYPYTYMSILPLGCTIVSKDIPMPYSYDKNGPNFDISIFTETAKRVISTGETVFTWYTSNVTSICQQCEREVWITVGGTTVRVVTISIRPFGARDALDSAVARGPRVTIIAATSSVGTFIVLSLIVATALYISLKSRYNEEIHLKVEMFLKTYGTSKPMRYTFSEVKKITRRFKNKLGHGGFGTVYKGELPNGVPVAVKMLENSVGEGQEFINEVATIGRIHHANIVRLLGFCSEGTRRALIYEFMPNESLEKYIFPHGSNISRELLVPKKMLDIALGIARGMEYLHQGCNQRILHFDIKPHNILLDYSFNPKISDFGLAKLCARDQSIVTLTAARGTMGYIAPELYSRNFGAISYKSDVYSFGMLVLEMVSGRRNTDPTVENQNEFYFPEWIYERVINGQELVLNMETTQGEKETVRQLAIVALWCIQWNPTNRPSMTKVVNMLTGRLQKLQVPPKPFISSENHLAT

SEQ ID NO: 167439 - protein, 144 aa, Oryza sativa
  unsure (1)..(144): unsure at all Xaa locations
  Clone ID: PAT_MRT4530_66050C.1.pep
QEEAVDREGSPGVRGPLLLRESVPLHTCVLRFIVFSEDLNETSRLNLWIKHALLRMVQFLQVSIRQNTAFYHQINLGILPFVSRHLSMLELHGVRMVGSFLDFSRCPXLQHLEFDRCELPCDKILSESLKLLRITRCKFSQTSR

SEQ ID NO: 167440 - protein, 1124 aa, Oryza sativa
  Clone ID: PAT_MRT4530_66051C.1.pep
MARYPAPTSSRAIGAPIQPTEPHAPLPNTGGEGAPPPARTMPPPSSQAATSTPPAAATPLQRPPAQATAQPSTQRYYVGVQRDKGTGKWAACVVDPSNPTKHRLVGAFPDEHAAALAHDRLDLAFRGGGHRGAGDNFRPAFHAVELEFLRLCAATSSPGSHCGLVAGGDKYDEKYSEFLRKIYHGVMDNSPSYKKFFDVILDFFIARAREIGREALEDGGDMLVERFVAMHKNKAVTPRWRAWYRSDSRKVLQIPLSLRGGGGEIDHSTQKEARMDSDSCKRRKHESGHDSSSRVQSQSSILSRNRILCHQLLEQCDDLKYGSSTNDYKAISMKRLELISILQKLQEVPIQLPYASPLKSSETNRLVQDGRNSSCRNIIDLDSDNDEDYTFANVDNIGANTTVVLVDSDDGDSVASFVDEKSSDSKQNANYIEESVLPEQHAQQQEISMLDNENISSEAQAVKKGKDSMDINDVIYNKSGHEEIGEEEAQAENVQIKGNLKKEIISVASDELACEVMRSQSPTNGNFDQYDNSSPVDELEGLWMDMYLAMACSKTVGSDHNIVPSENSCEQAEDECQHDFLMKDDLGIVCRVCGLIQQRIENIFEYQWKKRKQSYRARPSEHRNSSDADAIDKTSGAILEVVPDALCLHPQHSQHMKPHQVEGFNFLVKNLADENNPGGCILAHAPGSGKTFLIISFVHSFLAKYPAGRPLIILPKGILSTWRTEFLHWQVDDIPLYDFYSSKADKRSEQLKVLNLWEESRSILLLGYQQFACIVSDHTSDTEAIMCQEKLLKVPSLVILDEGHTPRNEETDLLTSLENIRTPRKVVLSGTLFQNHVREVFNILKLVRSKFLKMDKSRAIVNCILSKVDLMGKSARSKNISDKDFFDLVQEHLQKDGNDKMRAVIIQNLRELTADVLHYYQGKLLDELPGIVDFTVFFNMSMMPREGKVLVFSQYVRSLIFLEKLVSRMKGWKSEVHIFRVTGGSTQDQREQAVHRFNNSPDARVFFGSIKACGEGISLVGASRIVILDVHENPSVMRQAIGRAYRPGQSKMVYCYRLVAADSPEEDDHHTAFKKERVSKLWFEWNELCSSDDFELATVDVSDSEDRFLESSALKQDIKALLKR

SEQ ID NO: 167441 - protein, 186 aa, Oryza sativa
  Clone ID: PAT_MRT4530_66052C.1.pep
TPRPCAASHPAVAAASAAPAAATCRLPSRCHGGFRRAGQRLLPCAASHPPPHRSPIARRRGGGRRRRWGRARRPNRPSKPNPRGTQPSGLSHRDKRHRKPQRCAAPPSILIHRARAHGLARRGPAVTPPPPSAALPPSCRHTASALQPARLHLGAASNNSEPACASARRHRLQRQRARLHFFFVSL

SEQ ID NO: 167442 - protein, 93 aa, Oryza sativa
  Clone ID: PAT_MRT4530_66053C.1.pep
KTDAMSVSVITQAFIGNTQLGIHFPNTLLTEIWATNAGANFSGGKYTCSRFWSPGGCHMFTGMGRSHFLVPWWRPYVYWNEHFLLSLAPVNPL

SEQ ID NO: 167443 - protein, 1197 aa, Oryza sativa
  Clone ID: PAT_MRT4530_66054C.1.pep
MARYPAPTSSRAIGAPIQPTEPHAPLPNTGGEGAPPPARTMPPPSSQAATSTPPAAATPLQRPPAQATAQPSTQRYYVGVQRDKGTGKWAACVVDPSNPTKHRLVGAFPDEHAAALAHDRLDLAFRGGGHRGAGDNFRPAFHAVELEFLRLCAATSSPGSHCGLVAGGDKYDEKYSEFLRKIYHGVMDNSPSYKKFFDVILDFFIARAREIGREALEDGGDMLVERFVAMHKNKAVTPRWRAWYRSDSRKVLQIPLSLRGGGGEIDHSTQKEARMDSDSCKRRKHESGHDSSSRVQSQSSILSRNRILCHQLLEQCDDLKYGSSTNDYKAISMKRLELISILQKLQEVPIQLPYASPLKSSETNRLVQDGRNSSCRNIIDLDSDNDEDYTFANVDNIGANTTVVLVDSDDGDSVASFVDEKSSDSKQNANYIEESVLPEQHAQQQEISMLDNENISSEAQAVKKGKDSMDINDVIYNKSGHEEIGEEEAQAENVQIKGNLKKEIISVASDELACEVMRSQSPTNGNFDQYDNSSPVDELEGLWMDMYLAMACSKTVGSDHNIVPSENSCEQAEDECQHDFLMKDDLGIVCRVCGLIQQRIENIFEYQWKKRKQSYRARPSEHRNSSDADAIDKTSGAILEVVPDALCLHPQHSQHMKPHQVEGFNFLVKNLADENNPGGCILAHAPGSGKTFLIISFVHSFLAKYPAGRPLIILPKGILSTWRTEFLHWQVDDIPLYDFYSSKADKRSEQLKVLNLWEESRSILLLGYQQFACIVSDHTSDTEAIMCQEKLLKVPSLVILDEGHTPRNEETDLLTSLENIRTPRKVVLSGTLFQNHVREVFNILKLVRSKFLKMDKSRAIVNCILSKVDLMGKSARSKNISDKDFFDLVQEHLQKDGNDKMRAVIIQNLRELTADVLHYYQGKLLDELPGIVDFTVFLNMSSKQEHIIKGLDGINKFAKRSRCNAVSLHPCLKNANKADADDGNVTNRKIGSIISGIDINDGVKAKFVHNLLSLSEATGGKVLVFSQYVRSLIFLEKLVSRMKGWKSEVHIFRVTGGSTQDQREQAVHRFNNSPDARVFFGSIKACGEGISLVGASRIVILDVHENPSVMRQAIGRAYRPGQSKMVYCYRLVAADSPEEDDHHTAFKKERVSKLWFEWNELCSSDDFELATVDVSDSEDRFLESSALKQDIKALLKR

SEQ ID NO: 167444 - protein, 145 aa, Oryza sativa
  Clone ID: PAT_MRT4530_66055C.1.pep
MTRLPLLLHSPRFAAALTTPPPPPLPPARRLVAAAAGGDLSLAMSAATGEYPVPVSPPYPAASKDVELRRAMTASARSAAYSSAPVVFEDEWLAVVDKPAGVYCDALLSALPCSAATLGDEATKPNLHLANRLDRDTSGLMVITK

SEQ ID NO: 167445 - protein, 417 aa, Oryza sativa
  Clone ID: PAT_MRT4530_66056C.1.pep
MGRKRALLVGINYPGTKAELKGCHNDVDRMHRCLVDRFGFDEDDIRVLLDRDSSGTQPTGANIRRALAQLVGDARPGDFLFFHYSGHGTRLPAETGQNDDTGYDECIVPSDMNLITDQDFRELVQKVPNGCLFTIVSDSCHSGGLLDSAKEQIGNSTRQNQTQSREREEPSDSGSGFRSFLKETVRDVFESEGIHLPRSRHSQSHYGGEDQYETYAQPTDGHTKNRSLPLSTLIEMLKEKTGKDDIDVGSIRMTLFNIFGDDASPKVKKFMKVMLGKFQQGQSGEQGGLMGMVGSLAQEFLKVKLEGNEEEAFKPAIEQEVHSVDEVYAGTKTWAPNNGILISGCQSNQTSADATTPQGSSYGALSNAIQTILADKRGNVSNKDLVMKARSLLAKQGYTQQPGLYCSDDHVHVSFIC

SEQ ID NO: 167446 - protein, 832 aa, Oryza sativa
  Clone ID: PAT_MRT4530_66057C.1.pep
MWQHLSSLRQSSTLPWVVLGDFNEALWQFEHLSKNPRSEIQMQAFRDVLDVCNLIDLGFEGNPFTYDNRRKGSNNVQVRLDRVVADESWRDIFSAAHVVHLVSPCSDHVPILLRLLQEENHNHRKKCRHYEIMWEREAELPHIISAAWEAIECKTDLGNIEVGLDKVMSDLHTWGSRKFGNVVRKIEKLRKKLGELQYSNSDQHEIRKITDEMNELLYREEMLWLQRSRIDWLKEGDRNTKFFHGRAVWRSRKNKIEKLKAADGNVYSNQETMGTMATNYFKELFTKDPNLVPANVANLFAPQVSSATNEALCADFSEEEISTALFQIGPIKAPGPDGFPARFFQRNWGLFKDNIVQAVKKFLDTGQMPEGVNHTTIVLIPKVDQPVEMKDFRPISLCNVLYKIVSKCLVNRLRPLLGDIISPNQSAFVQGRMITDNALIAFECIHHIQQVKRPDNSFCAYKLDLSKANDRVDWCFLEQAMHKIGFSNRWITWIMACVSSVRYSVKFNGTLLEAFAPSRGLRQGDPLSPFLFLFVADGLSALLKEAVQNGEITPVKVCRRAPGVSHLLFADDTLLFFKANSDQANMVKNVLESYAASTGQLINPQKCSILFGHACPEELQEEVKNVLQVGNVTFEEKYLGLPTPEGRMKKGKYQRLQERLSKKLMQWAENHLSQGGKEVMIKAIAQAIPVYVMGVFKLPDGVCEELTKIIRNFWWGFDNGKRKVHWKAWSQLTKSKNAGGLGFRDMKAFNQALLARQAWRLIDNPVSLCARVLKAKYYPNGCLMDTVFSVKTAYRLAIENKLNSENSNASGSSIEGSKSLWNTIWSCPVPPK

SEQ ID NO: 167447 - protein, 957 aa, Oryza sativa
  unsure (1)..(957): unsure at all Xaa locations
  Clone ID: PAT_MRT4530_66058C.1.pep
MAEDKGGLDAVLKESVDLENIPIEEVFQNLKCCRQGLTSEEAQLRLQLFGPNKLEEKEESKFLKFLGFMWNPLSWVMEAAAIMAIALANGGGKPPDWQDFVGIITLLLINSTISFIEENNAGNAAAALMARLAPKAKVLRNGSWTEEEAAILVPGDIISIKLGDIIPADARLLEGDPLKIDQSALTGESLPATKGPGDGVYSGSTVKQGEIEAVVIATGVHTFFGKAAHLVDSTNQVGHFQKVLTAIGNFCICSIAVGMFVEIIVMYPIQHRPYRPGIDNLLVLLIGGIPIAMPTVLSVTMAIGSHRLSQQGAITKRMTAIEEMAGMDVLCSDKTGTLTLNKLTVDKNLIEIFERGVTQDQVILMAARASRTENQDAIDTALVGMLADPKEARAGIQEVHFLPFNPTDKRTALTYIDSDGKMYRVSKGAPEQILNLAHNKTQIERRVHAVIDKFAERGLRSLAVAYQEVPDGRKESPGGPWRFVALLPLFDPPRHDSAETIRRALNLGVNVKMITGDQLAIGKETGRRLGMGTNMYPSSALLGQNKDESVAALPVDDLIEKADGFAGVFPEHKYEIVKRLQARKHICGMTGDGVNDPPALKKADIGIAVADATDAARSASDIVLTEPGLSVIISAVLTSRAIFQRMKNYTIYAVSITIRIVFGFMLLALIWEFDFPPFMVLIIAILNDGTIMTISKDLVKPSPLPDSWKLAEIFTTGVVLGGYLAMMTVIFFWAAYKTNFFPRIFHVESLEKTAXQDDYQKLASAVYLQVSTISQALIFVTRSRSWSFIERPGFLLVFAFFVAQLIATLIAVYANWAFTSIKGIGWGWAGIVWLYNLVFYFPLDIIKFLIRYALSGKAWDLVIEQRIAFTRKKDFGKEERELKWAHAHRTLHGLQPPDAKPFPEKTGYSELNQMAEEAKRRAEIARLRELHTLKGHVESVVKLKGLDIDTIHQSYTV

SEQ ID NO: 167448 - protein, 100 aa, Oryza sativa
  unsure (1)..(100): unsure at all Xaa locations
  Clone ID: PAT_MRT4530_66059C.1.pep
TMPDLIEKSAXPXXPXPAPQSRIAPRPLPRSRSPNPNPNPNPGRLGASSTGSRXPLTIFACDLTGRASIHGHCGPFPSNRNSSXXIGTGAGSPSGSAVNK

SEQ ID NO: 167449 - protein, 603 aa, Oryza sativa
  Clone ID: PAT_MRT4530_6605C.1.pep
MLFGAPGSRVTFRLPLVLMLRIEALLYYPVTRPRWKINASQDATQETGLIDAEINSYAYSERKNRKYNGAYIDKDGVSRTFDRKKISRKRGGAMRGRGWKYGSGFVDGVFPVLSPMAQDILEFVQKGTDVAKIWESLDNIPSTHNLFDDLVNVAVQFRMNKKWDLIIPVCEWILYRSSFRPDIICYNLLIESYGKKRQLNKAESIYMALLEAQCVPTEDTYALLLRAYCNAGSLHRAEGVISEMREHGIPPNATVYNAYLDGLLKARCTEKAVEVYQRMKRERCRANTETFTLMINVYGKAKQPMSSMKVFNEMKSIGCKPNICTYTALVNAFAREGLCEKAEEVFEEMQQAGHEPDVYAYNALMEAYSRAGLPQGASEIFSLMQHMGCEPDRASYNILVDAYGRAGLHEDAEAVFEELKQRGMSPTMKSHMLLLAAHARSGNATRCEEVMAQLHKSGLTPDTFALNAMLNAYARAGRLDDMERLFAAMERRGDADVGTYNVAVNAYGRAGYVGRMEAAFAAVAARGLAADVVTWTARMGAYARRKEYGRCVGMVEEMVDAGCYPDAGTARVLLAACSDERQVEQVTAIVRSMHKKPKTLFTI

SEQ ID NO: 167450 - protein, 109 aa, Oryza sativa
  Clone ID: PAT_MRT4530_66060C.1.pep
FFFFFFVWFFETIFLEMVYFFLIVLIAFFLFFSDEGNRIFPAHFFGNYFFLWRHFFPCINGWMVTSTCVRLDLIRLDIELKRYIRITRGRLTSWVGSYIVRCRFLLYGV

SEQ ID NO: 167451 - protein, 70 aa, Oryza sativa
  Clone ID: PAT_MRT4530_66061C.1.pep
MDDILVTCENCLLMTMKTIRNYRSQRFDSWTYYLVFGPSRSLGISSFFVVICREIPVVRDRYDLLVEDQV

SEQ ID NO: 167452 - protein, 385 aa, Oryza sativa
  Clone ID: PAT_MRT4530_66062C.1.pep
MAVRLLANEVSDLCIGKPAVRSLPLSAAAGDLAAALRRGPQQAAGGAAACVAVVGPGRAVAGRLGLADVLCFLCAAPGALAHPTAALSKPASALLPKDGAGEVRRVDPRASVLEALDAVLSGAQVLAVPLRSGGRRKQLGGGGGGGGGGDYCWLTQEDLVRYFLNSISLFSHVAGRSVSSLGLVRADDLLTVRPHEAALSAVPLLRRAIATETAVAVVDDGGHLVGEISPALLASCDETAAAAIATLSVADLMAYVDYFGAPPEHILRAVKAGLKSKGLDAMLELVENEAVSSFAFSSSSTSSSSDDEAHGRAARLRRPSSGSYGRRSTEEPVVCSPASSLVAVMMQALAHRASYLWVLDEDDDCRLAGIVTFADVLTVFREQLQ

SEQ ID NO: 167453 - protein, 146 aa, Oryza sativa
  Clone ID: PAT_MRT4530_66063C.1.pep
MALLWHYNKTKGKKVRGTHLSFTENIVGVIGMWVIHVLIFLLSSLLSPYHRVSPRTGMTLLIVTFEWPRRGRHRRRRAVSSVGGVTQRQLEDKREGNGEAGAKYEGEEKVAGRGSWARRRRGGRGVSVRRWRAKDGGQWGCQWWTK

SEQ ID NO: 167454 - protein, 120 aa, Oryza sativa
  unsure (1)..(120): unsure at all Xaa locations
  Clone ID: PAT_MRT4530_66064C.1.pep
SPHTPQGIFFPGNVVGFPPPRSPVGGIPVLVPPKLVRGLPPKFSKWAPLQFRGIFFPPPPPWVLTPKRVFSPPPLAXVWVPRWEPPPFPVFVWEYPPWGPKMFPPLLPLGXLGFPPPLGG

SEQ ID NO: 167455 - protein, 68 aa, Oryza sativa
  Clone ID: PAT_MRT4530_66065C.1.pep
MARESRGVIPPTSMRAGTAGCGGFVGGGGTRARARRRERPEDRDDRWYSLMGIADASGDDEVYPNLSM

SEQ ID NO: 167456 - protein, 66 aa, Oryza sativa
  unsure (1)..(66): unsure at all Xaa locations
  Clone ID: PAT_MRT4530_66066C.1.pep
MCRCLSXVTTSVYIHDTWLLASLLDCIYCTGISLQNFRRSMGTTYYYAQVYAVHPCVIVQYIVRNK

SEQ ID NO: 167457 - protein, 102 aa, Oryza sativa
  Clone ID: PAT_MRT4530_66067C.1.pep
HHPPRVFWVFFQVQGAGGLSEPLFSQIVPGCWPVNARRNYGALFSPARGKGFGPQLGGGPLSPKFVRDPPFEFFYALGVPLRGGVKNLFCYYEPLGVFGRFF

SEQ ID NO: 167458 - protein, 160 aa, Oryza sativa
  Clone ID: PAT_MRT4530_66068C.1.pep
MAPVGHPCGSLGVAHPPLRLAVAGRPTPPIAAPLHPAGFVTRIIQRREGVREEGKEEERWIGEEKKRLTCGSHAELAVMSEKTGEEMAYVPVCVQCGTHSNPCRCKVLGPTLGFVAFVVAGVVEWPLGAFVYLFRHRKGRRIMGHPANVVYPRITSAIPI

SEQ ID NO: 167459 - protein, 60 aa, Oryza sativa
  Clone ID: PAT_MRT4530_66069C.1.pep
VLLVFLTQTEMTNSMLRRRKKKRQSRLVNKLLLLLHRSSTINKQCLMLMAARWFAFLQFI

SEQ ID NO: 167460 - protein, 420 aa, Oryza sativa
  Clone ID: PAT_MRT4530_6606C.1.pep
RKARCCGAAAAAAAVAARTAAGSPAAAGTPAAEGIPGEGTPAPAVGSRPAGTPAAGTRPSPGTLAAAARPPAAADRSSSSLSSLAGGLLFPLALEVEMFLKTYGTSKPTRYTFSEVKKIARRFKDKLGHGAFGTVYKGELPNGVPVAVKMLENSVGEGQEFINEVATIGRIHHANIVRLLGFCSEGTRRALIYELMPNESLEKYIFPHGSNISRELLVPDKMLDIALGIARGMEYLHQGCNQRILHFDIKPHNILLDYSFNPKISDFGLAKLCARDQSIVTLTAARGTMGYIAPELYSRNFGAISYKSDVYSFGMLVLEMVSGRRNTDPTVESQNEFYFPEWIYERVINGQDLVLTMETTQGEKEMVRQLAIVALALWCIQWNPKDRPSMTKVVNMLTGRLQNLQVPPKPFISSQNQLVI

SEQ ID NO: 167461 - protein, 99 aa, Oryza sativa
  Clone ID: PAT_MRT4530_66070C.1.pep
PLNPLKTQTLNPLLKPSLVLTSPHRLRPPHCDGGRRRPLPPFAGHAATTGGGGATQFMCAHTAALAGTPPTPMPVRKLSCKKSTRIRPPSAAAGISRGT

SEQ ID NO: 167462 - protein, 43 aa, Oryza sativa
  Clone ID: PAT_MRT4530_66071C.1.pep
MQWRSGEAASAPGKTADGGYCRFYPLLLPGVWKNSVGAWVAFS

SEQ ID NO: 167463 - protein, 1086 aa, Oryza sativa
  Clone ID: PAT_MRT4530_66072C.1.pep
MAAGDRVADDGATAGDGAAKSSSPVPPSTAPPLRPRAWTQLELCKRWQIQSRRSAGVLVRKKTNPTLTERMEVAEGEIGFLTTRVTELTSSINSILGSLQGMEKWIPTVDLGMKDLRQAVDQVNARVAQLETRAQATPAMAKQTPVGPGDDENYQGDATGASFAQERTLVKGKHKFHHSPVQFDLRENSERENCGSQSSGKFGGSRLPKTDFPKFDGENPKLWKTNCEKYFSMYHVPYETWASFATLHFTGTAALRLQTYEELHCIESWPELVVEVHSKFGRDKYEQHLEEQEGFKQLGGVEEYHSKFEEIMNKVLVYNKAFDETFFVTKFVGGLKSEIKAAIKLHKPRTVDAALSLAKTQEDLLGEITVKTVGRTTYKEQYKPAVKTPFLGKGILGPSPDENKKVEEKPKWEERFDSLKAARRARGECFKCGEKYGPGHKCPKSVQLHVLEELLEVFLAQEEDSNKADDVEGTSDEELVLSECAVSGTVGKRTIRLRACYRIKRYLSWLILGKTFKTDLKVLPLGGYDMILGMEWLEEFSPMWVDWKRKKMRFTYEEKRITLVGVKEQLFTNLCALEEKGLEQGLSLEVQEVLNRFQDRFQEPRTLPPHRQFDHGIPLMPGTKLVNLKPYRYSPGQKDEIERQVSQMLKQGIIKPSTSPFASPVLLVRKKDGTWRFCVDYRGLNEVTVKNKFPMPVVDELLDELAGAQWFTKLDLRSGYHQIRLLEEDEYKTAFRTHHGLYEFRVMPFGLTNAPATFQGLMNTVFAPLLRKCVLVFVDDILVYSNSLQEHVQHLQQVFELLQDHGLPLTNLLKKGVSYIWGTEEQQAFVLLKQALTQAPVLKLPDFQKEFVIETDASGKGIGVVLMQEGHPLAYISKALGVKSQGFSTYEKECMAILLAVGKWRQYLQHNVFTIQTDHKSLIHLSEQQLLTGMQQRAFIKLMGLQYKLKYKKGQENKAADALSRKEEDKSQAISTCVPKWLEIVQEGYEKDEEAKHLLTELSLNPEGVGEFQLQRGIIRHKGKIWLGNHLEAKQAVMLALHDSGLGGHSGIHATYQRIRGLFSWKGLKKDVQQYVLSCETCQQAK

SEQ ID NO: 167464 - protein, 1063 aa, Oryza sativa
  Clone ID: PAT_MRT4530_66073C.1.pep
MAAGDRVADDGATAGDGAAKSSSPVPPSTAPPLRPRAWTQLELCKRWQIQSRRSAGVLVRKKTNPTLTERMEVAEGEIGFLTTRVTELTSSINSILGSLQGMEKWIPTVDLGMKDLRQAVDQVNARVAQLETRAQATPAMAKQTPVGPGDDENYQGDATGASFAQERTLVKGKHKFHHSPVQFDLRENSERENCGSQSSGKFGGSRLPKTDFPKFDGENPKLWKTNCEKYFSMYHVPYETWASFATLHFTGTAALRLQTYEELHCIESWPELVVEVHSKFGRDKYEQHLEEQEGFKQLGGVEEYHSKFEEIMNKVLVYNKAFDETFFVTKFVGGLKSEIKAAIKLHKPRTVDAALSLDKTQEDLLGEITVKTVGRTTYKEQYKPAVKTPFLGKGILGPSPDENKKVEEKPKWEERFDSLKAARRARGECFKCGEKYGPGHKCPKSVQLHVLEELLEVFLAQEEDSNKADDVEGTSDEELVLSECAVSGTVGKRTIRLRACYRIKRYLSWLILGKTFKTDLKVLPLGGYDMILARQLKGMAKAGAISQLVQLCALEEKGLEQGLSLEVQEVLNRFQDRFQEPRTLPPHRQFDHGIPLMPGTKLVNLKPYRYSPGQKDEIERQVSQMLKQGIIKPSTSPFASPVLLVRKKDGTWRFCVDYRGLNEVTVKNKFPMPVVDELLDELAGAQWFTKLDLRSGYHQIRLLEEDEYKTAFRTHHGLYEFRVMPFGLTNAPATFQGLMNTVFAPLLRKCVLVFVDDILVYSNSLQEHVQHLQQVFELLQDHGLPLTNLLKKGVSYIWGTEEQQAFVLLKQALTQAPVLKLPDFQKEFVIETDASGKGIGVVLMQEGHPLAYISKALGVKSQGFSTYEKECMAILLAVGKWRQYLQHNVFTIQTDHKSLIHLSEQQLLTGMQQRAFIKLMGLQYKLKYKKGQENKAADALSRKEEDKSQAISTCVPKWLEIVQEGYEKDEEAKHLLTELSLNPEGVGEFQLQRGIIRHKGKIWLGNHLEAKQAVMLALHDSGLGGHSGIHATYQRIRGLFSWKGLKKDVQQYVLSCETCQQAK

SEQ ID NO: 167465 - protein, 110 aa, Oryza sativa
  Clone ID: PAT_MRT4530_66074C.1.pep
HRGWPARRKTTVNGDGESREDDGHRRTGFGVPCRRPRERRAAGRPGWASALVFAPEPEPVEQFWVMCSDSSWSYKGAGIAGVLISPNGVPIRYAARLQFDTTNNAAEYKA

SEQ ID NO: 167466 - protein, 140 aa, Oryza sativa
  Clone ID: PAT_MRT4530_66075C.1.pep
MATPLCLISFGVWPLSFGKSELLRDCELGSDDPSLTRVSRVLLQCEVSELRHRRGVTCGNDDMSPFELCFSAKSEPPDHVGDGVMTIMSTHLQVFPDWACVHVKRHITCAVHARKLATCRQQLAAQMHQFTTTAHMHSWS

SEQ ID NO: 167467 - protein, 97 aa, Oryza sativa
  unsure (1)..(97): unsure at all Xaa locations
  Clone ID: PAT_MRT4530_66076C.1.pep
GHSLLSSSPCSSYSPPPHPTPPSWRKPASRSPVTTRPSTTPTASGSSRPARRAPPPTRTASPPSPXGSPRRPPRAPPSASPPCDPRTRRRRCRSASA

SEQ ID NO: 167468 - protein, 708 aa, Oryza sativa
  Clone ID: PAT_MRT4530_66077C.1.pep
METSYTATTEVVTLNEDICDKASGADGVPPDGSLKTSEDNLDVSSVVTESEGENINKETEDHKLALPVHPTQDENTTEQGFGLEDTEKESMSPEKALPAEPEEQEENQVTKEQDEEDRHDAELGDAHEEDHKEAEQDYLPVSSFLMNLILGKDNDDPKKDSETEVEKEQEETTKDGSCLIASQQEENLVAFPIEKSVDEKLTFEQEKEKVEGSEETKEPVKEQSYDVEMDVQKSLETDEELKRNTCDLEAPVYQDNAQDEISSKLISAKAADPIKKMEARDFELDEESFDTVCQENVEAATEIEDGSLNRDQDDITSPKASQEDALEEVGTELPHESLHENRHGAKDEQTLSLIEPDTGNAEKLPNEADSVQSPPCTEQEESIESSYVEVRSTTEGQVESEVIETNEEDQHTTAGGHTEEQIENLHDDKSKETCSEEISDEQAPEITEPVSHTDRNFAYEKEIPASSTCMDKKESMISNNEVSNFEKALETHSDSPNLHVNQDKKDETADNQTVVDHNTVLDKLEDSNRQEEQETAAQKLPKETEGNQEFMAITEPVIKEENVHETVEGNTQAVKIKSNEEKELFDSQVQERGLNVVSPKATSEADEKFVEITKPEFSTDEEHSPKADESNKPDENTCDEKTKAEEETNNITDEATVKIEERGAEQKVSHKKHNILSGVGSKVKHQLAKVKKAIIGKPGHTKSESPKS

SEQ ID NO: 167469 - protein, 102 aa, Oryza sativa
  unsure (1)..(102): unsure at all Xaa locations
  Clone ID: PAT_MRT4530_66078C.1.pep
MWGVCCCFWCLGLGNKEEWSGGVRERERWLVHSLCSLSIHWAWGTVFAVRGEWEAVIWVPGGVGPTVSERXKIALEAKSKRVACQGSLEGIQGGFCAARNLG

SEQ ID NO: 167470 - protein, 96 aa, Oryza sativa
  Clone ID: PAT_MRT4530_66079C.1.pep
LDKDPPVGAEDECTDEGGYADGVRVVGRDLHKRARPLYKIQKNILVLTHPGPYAEAARRSPSLSPSLSLLRARVYGRDRSRTPSLGGGGRARLKIG

SEQ ID NO: 167471 - protein, 65 aa, Oryza sativa
  Clone ID: PAT_MRT4530_6607C.1.pep
SLEFHQMLHNLRSSLPHQAFMDLFLLAAWNIWKERNSIIFQGIQPSISSWKSNLKSDLNLHLIRF

SEQ ID NO: 167472 - protein, 111 aa, Oryza sativa
  Clone ID: PAT_MRT4530_66080C.1.pep
MHILVIRDCDIVAILISAVLIQEKEKETLTHRLFNTVDFRNKKKKKPSRSVSVPVKSSRKFPRNRLNQLEWFTSSSGQLYTRFRCCWTDGLRDDGLAQAYYTTAQEYVSPS

SEQ ID NO: 167473 - protein, 1136 aa, Oryza sativa
  Clone ID: PAT_MRT4530_66081C.1.pep
MPRRRSSSPIVRTPHDSGGRATGSGGGDRGLVIHRVVKEGGGSVNYPLLTKTNYNDWALLMKIKLQAHCLWAAIEPDGVDVPLHEDRMALDAICSAVPPEMIGTLATKASAREAWECIKTMRVGNDRIRKASAQKVRAEYESLAFRGDETVEDFALWLTTIVNQLATLGDPEPADKVIEKYLRVARPRFNQLILSIETLLDISTLSMEEVTGRLKAAEDSGQSSSHTAGGKLYLTEEEWAERQKKKDQEAKRGDSGGSGGRGKRRGGRGRTGGGGTASPESTNSGSARKGDKCRNCGKLGHWAKDCRSKSKREEQAHVAQEDEEEHTLMLLTGGRVDTVDAAAPEGDTPTPPHQAVVELVEMKVFPALDDVADHDPGRWIMDSGASNHMTGSRMAFADLDTNITGNVRLSDGSVVRIAGRGTILFACKNGEHRTLSNTYYLPRLAANIISIGQLDETGFKVLAEDGIMRVWDEQRRLLARIPRTPGRLYMLDINLARLVCLAAHADEDAWRWHARLGHINFRALCKMGKEELVRGLPCLSQVDQVCEACLAGKHRRSPFPRQALCRSDEPLALLHGDLCGPITPATPSGNRYFLLLVDDYSWYMWVALLSTKDAAPAAIKRIQAAAERKSGRKLRALRTDRGGEFTSTQFAEYCAELGMRRELTAPYSPQQNGVVERRNQSVVGTARSMLKAKGLPGMFWGEAINTAGYLLNRSSSKGIGGKTPYALWNGVPPAVHHLRTFGCVAHVKTTTPNLKKLDDRSCPMIFVGYEPGSKAYRAYDPATRRVHISRDIVFDEAAQWDWDAEAAADLDTDFVVEYTTVYHPGSLSGTRQDAGEPPARSSSSPRTPSDSPTAGRTPSVHGDAPAVDFVSPPTGAAANLDADHDDAPLRFRTMDNVLGPAMLPGLANREVQEELMMVSGEEPATFAQAERDEDWRRAMLDEISSIEENKTWRLVDLPSGHRPIGLKWVYKLKKDAQGVVVKHKARLVAKGYVQRAGIDFDEEGWMVHHMDVKSAFLNGELIEEVYVVQPPGFEIDGQENKVYRLDKALYGLRQAPRAWNTKLDCTLKKLGFKQSPLEHGLYARGDGSGRLLVGVYVDDLVIVGGDSGMIKGFKEQMKAEFKMSDLGPLSFYLGIE

SEQ ID NO: 167474 - protein, 54 aa, Oryza sativa
  Clone ID: PAT_MRT4530_66082C.1.pep
RVSVMVYQGTLLEFHRGAKMIDSILRAWQPAGSTALAPQSKEHAVASYPRYNLT

SEQ ID NO: 167475 - protein, 1703 aa, Oryza sativa
  Clone ID: PAT_MRT4530_66083C.1.pep
MFPFFFRINAWEKNFWARHHGTPEHAPSAAAADIVVVPTTVDQTKPSRRANVFSVSSNLVCHGLATRSLGKFLTIGIRARFRKWTRDRALEGVFMPRRRSSSPIVRTPHDSGGRATGSGGGDRGLVIHRVVKEGGGSVNYPLLTKTNYNDWALLMKIKLQARCLWAAIEPDGVDVPLHEDRMALDAICSAVPPEMIGTLATKASAREAWECIKTMRVGNDRIRKASAQKVRAEYESLAFRGDETVEDFALRLTTIVNQLATLGDPEPADKVVEKYLRVARPRFNQLILSIETLLDISTLSMEEVTGRLKAAEDSGQSSSHTAGGKLYLTEEEWAERQKKKDQEAKRGDSGGSGGRGKRRGGRGRTGGGGTASPESTNSGSARKGDKCRNCGKLGHWAKDCRSKSKREEQAHVAQEDEEEHTLMLLTGGCVDTVDAAAPEGDTPTPPHQAVVELVEMKVFAALDDAADHDPGRWIMDSGASNHMTGSRMAFADLDTNITGNVRLGDGSVVRIAGRGTILFACKNGEHRTLSNTYYLPRLAANIISIGQLDETGFKVLAEDGIMRVWDEQRRLLARIPRTPGRLYMLDINLARPVCLAAHADEDAWRWHARLGHINFRALCKMGKEELVRGLPCLSQVDQVCEACLAGKHRRSPFPRQALCRSDEPLALLHGDLCGPITPATPSGNRYFLLLVDDYSRYMWVALLSTKDAAPAAIKRIQAAAERKSGRKLRALRTDRGGEFTSTQFAEYCAELGMRRELTAPYSPQQNGVVERRNQSVVGTARSMLKAKGLPGMFWGEAINTAVYLLNRSSSKGIGGKTPYALWNGVPPAVHHLRTFGCVAHVKTTTPNLKKLDDRSRPMIFVGYEPGSKAYRAYDPATRRVHISRDIVFDEAAQWDWDAEAAADLDTDFVVEYTTVYHPGSLSGTRQDAGEPPARSSSSPRTPSDSPTAGRTPSVHGDAPAVEFVSPPTGAAANLDADHDDAPLRFRTMDNVLGPAMLPGLANREVQEELMMVSGEEPATFAQAERDEDWRRAMLDEISSIEENKTWRLVDLPSGHRPIGLKWVYKLKKDAQGVVVKHKARLVAKGYVQRAGIDFDEVFAPVARLDSVRLLLALAAQEGWMVHHMDVKSAFLNGELIEEVYVVQPPGFEIDGQENKVYRLDKALYGLRQAPRAWNTKLDCTLKKLGFKQSPLEHGLYARGDGSGRLLVGVYVDDLVIVGGDSGMIKGFKEQMKAEFKMSDLGPLSFYLGIEVHQEAGIITLKQAAYASRIVEKAGLTGCNPCATPMEPRLKLSKESAGSLVDATEYRSLVGSLRYLVNTRPDLAYSVGYVSRFMEKPTDEHLAAVKRIIRYVAGTIHLGCRYVKEGEGGLQGYSDSDMAGDIDTRKSTTGVIFFLGKNPVSWQSQKQRVVALSSCESEYIAAATAACQGIWLARLLGDLRNAATEVVDLRVDNQSALALMKNPVFHDRSKHIQTKFHFIREAVENGEITPSYIGTEGQLADILTKPLSRIKFQELREQIGLATVRRSLGKFLTLERSRYLVDDCFTVRCDIVILAGAAAAPPPSSSLFGAVESFGRLLGREEGADVTFEVGGETFTAHRCVLAARSKVFEAELFGPMREGAAASVVRIEDMDAEVFRGLLSFIYTDVLPDQGDLGDEAHEWHDDDDDDEGGGDCDMAAETDRSRGQIRSPEAEAAVRGGDVRLH

SEQ ID NO: 167476 - protein, 164 aa, Oryza sativa
  Clone ID: PAT_MRT4530_66084C.1.pep
MESSHITGDDGEGCNSSESGWTMYLASPMHGDDDGGGKRSGSEGSNVDDGYGYISGRGSRKEYEDDGDGDDDDSLASDASTGPAKVKVPSAPDGDDAGGRRKHDGDEDGGGKGEEEEEEDHGLHTKFSMSSGKKAGKTEKGGEGKSSKKGQNKRGSSSRTRFFW

SEQ ID NO: 167477 - protein, 132 aa, Oryza sativa
  Clone ID: PAT_MRT4530_66085C.1.pep
MAVTPVAVRGGPSPRTGEGGGAPRGTDVAPTWRTRGGHMARHAGGRTDVPDLPESRSDGGGDHAVGTHERLKTARRPWRTVALPRGSGGRRRRPTASGGSAMARVSLAADKGLGGGAATKRRGREREDGEEV

SEQ ID NO: 167478 - protein, 229 aa, Oryza sativa
  Clone ID: PAT_MRT4530_66086C.1.pep
MASSNFFLPTALIALVATQAMAFDPSPLQDFCVADRNSPVRVNGFPCKDAKDVNVDDFFLAANLDKPMDTTKSKAGSNVTLINVMKLAGLNTLGISMARIDYAPKGQNPPHTHPRATEILTVLEGTLYVGFVTSNQANGENKLFTKTLNKGDVFVFPQGLIHFQFNPSYDKPAVAIAALSSQNPGAITIANAVFGSNPPISDDVLAKAFQVDKKAVDWLQAQFWENNHN

SEQ ID NO: 167479 - protein, 167 aa, Oryza sativa
  Clone ID: PAT_MRT4530_66087C.1.pep
GVGYYEYADLINRINKGVQLFFNSMQELSQKGTGGLSEAFVAFRNYFVEKDVFEEIDYKFGEILHHCSRTVGIRKIYHHYNFTVEMKNDKDCWIPRVYFAEVKMKYGFKYRFCAPLEATDDGQCYSCKNQGIDKLKHPSRGGYSKGYDGAVCNHLGEDSSDEEDELM

SEQ ID NO: 167480 - protein, 68 aa, Oryza sativa
  Clone ID: PAT_MRT4530_66088C.1.pep
FRRNGLLLTTYPTDISGRPPRLGCYHYPTTGTLGVTHFTPCDGALVCLYTDGRGAGRPTRRPGTVSRP

SEQ ID NO: 167481 - protein, 44 aa, Oryza sativa
  Clone ID: PAT_MRT4530_66089C.1.pep
MLRTSLKMVFLKKKKKKKKKKRKKKKTKKKKKKKKKQKTKGHPF

SEQ ID NO: 167482 - protein, 60 aa, Oryza sativa
  Clone ID: PAT_MRT4530_6608C.1.pep
NRNIRHQPNNTEWTSQYLFLNMCDLNLLLAGTQIRAPHHSVVHILAHLISSRGKTTTIVL

SEQ ID NO: 167483 - protein, 176 aa, Oryza sativa
  Clone ID: PAT_MRT4530_66090C.1.pep
MRRASPDPHPITTPMIPIIPHPRTHSWNRSKLQQKMKINRARNVVWGKLVVMVEERVEAMEVDVGYIYYELVAMEDEAVAQIDEGGATTSAPQPCHHHSSSAATTSILIACGHYLSSSSAPKSVSLACGSCTGTATVTTSSPSTSTYGLVVWGRWEFGRFFRGGGGAERIWMVGSG

SEQ ID NO: 167484 - protein, 85 aa, Oryza sativa
  Clone ID: PAT_MRT4530_66091C.1.pep
MNSTAGGMASFEMSELKKIGLGLSGFGGLISILGNIMLFDKGVLAIGNILFVTGASLTIGPKTTEQIFTKPKNHKGSSAFGIGFF

SEQ ID NO: 167485 - protein, 951 aa, Oryza sativa
  Clone ID: PAT_MRT4530_66092C.1.pep
MATAATAQASASSSTASTRGSPAASSSSHSAVCLVPFRWWARVREEAPPEGGVRYAATAAASPSSYYGLRLLHSFLHPDLVLRLERGGCRGTGAGAGGRSYALVPADELSRVLARQNSSLALHNKHSFAEDSAGAYPLVLRISVRETSILTVKISKKDNPVENYKRAYKIFNIDSQPVHVWDFSGQTNLILMNEWNRSNHDCCHSELENILEVQVYAMSDSLTSKIGGTSKEYTEQSSADVNDMDVDLSYGSFGRSSSHGLIGLENLGNTCFMNSSIQCLAHTSKLVDYFLGDYDRDINRTNPLGLNGELALAFGELLRRLWNTERKPVSPHHFKAKIACFAPQFSGFNQHDSQELLAFLLDGLHEDLNQVKCKPYEEAKDASGRPDKEVADEYWSNHLARNDSVIVDTYHGQYKSTLTCPTCSKTSVTFDPFMYLSLPVPSTAKRTMTVTVFSTDGSIEPISYDVTVPQFGSLNDLVQALSSACSLGDDEILLITEVYNNRILRYLEEPSDSVSLLRDGDKLAAFRLPRKYEKSPVVVFTHQYFDERSSIDNITPQMKEFEAPLLAVLPERANGLTLKNIYLKLLEPLRFSKSTSSLNDSGRCNSGCAAVMMDATPDSDSKFQSAPSENAPESSQSETIECQMTEGPSESNIGDTTDSDREAHMEEFEFYLINGRGEFQQTRIQTDEVDLQTTPNRLLINVHWQQNAVGQYDTSMLKSLPEIHKLELIPKGNEDSVALHGCLEAFLKEEPLGPEDMWYCPCCKKHQQAMKKLDLWRLPEVLVIHLKRFSYTQFTRNKLETFVDFPISDLDLSSYIIDKSELSDCHYRLYAISNHYGNMGGGHYTASIYHEEGKGWYKFDDECENIYMIISDSDLSPELCCLTNNRRLLLSSVLFGLIALDKYSDISQQHLFCLDIPQDQTRLDGHQSFMCNKVSWTNCVLNDNSIPQVVI

SEQ ID NO: 167486 - protein, 111 aa, Oryza sativa
  Clone ID: PAT_MRT4530_66093C.1.pep
MATFSDAPPGDAAAGEKIFRTKCAYCHAVDKAAGHKHGPNLNGLFGRQSGTAPGFSYPSGDKIVPVIWEENTLYDYLLTPKKYTPAKMGFNGLKQPQDRADLIAYLKNATA

SEQ ID NO: 167487 - protein, 85 aa, Oryza sativa
  Clone ID: PAT_MRT4530_66094C.1.pep
MSLHLEGQVSSEVAASRLLPCDNPLLSHLCSRPVPPEHYMARSNKEMATVRKNLNGNIEAREGIDLNNVNDVGMGLEEIANWVAY

SEQ ID NO: 167488 - protein, 84 aa, Oryza sativa
  Clone ID: PAT_MRT4530_66095C.1.pep
VGFGLRMEVAIGFKRECRGLRIGSWSVERMNNWIVECMDMRLLNIFVVSSVNSIVIYNCMSTAWITCLPVEVVHLTCRIVVLIM

SEQ ID NO: 167489 - protein, 146 aa, Oryza sativa
  Clone ID: PAT_MRT4530_66096C.1.pep
MATFSDAPPGDAAAGEKIFRTKCAYCHAVDKAAGHKHGPNLNGLFGRQSGTAPGFSYPSGDKIVPVIWEENTLYDYLLTPKKHALALPRCGPKLKIVASLELISDTLGSVIPGITHKYTPAKMGFNGLKQPQDRADLIAYLKNATA

SEQ ID NO: 167490 - protein, 101 aa, Oryza sativa
  Clone ID: PAT_MRT4530_66097C.1.pep
MAKQRANKVQDGHNGQALFFLLPLPCTYLFPSPSPKINATLRPSFFQCHLEWGYRPLANDEQEKRILALLMLMSRLPGDCPSSCLLVSPPLMMEPLLGVSR

SEQ ID NO: 167491 - protein, 183 aa, Oryza sativa
  Clone ID: PAT_MRT4530_66098C.1.pep
KYFSCVYLQDIKTRVYDTLMAYDTKWVEELPSVLWAVRTTLTTSNKETPFFLMYGSEAMVPMELRHQSTRVQKYFDEEHDERRSDDVNLLEEHRERVAIRAAAYQQALRRYHEKHIRARTLAISGYVLQQVQNQAGRNKLSPKWEGPYMVVQVLRPSAFKITDGEGCELSNSWNIDQLRKFYV

SEQ ID NO: 167492 - protein, 44 aa, Oryza sativa
  Clone ID: PAT_MRT4530_66099C.1.pep
PDTMSGHLHYTSLPSLAQPALFLGWGTHMGRVFILSNTELSIVP

SEQ ID NO: 167493 - protein, 68 aa, Oryza sativa
  Clone ID: PAT_MRT4530_6609C.1.pep
MHTFQGLHCDRGEQASWIDWRKRQRFVVLRTRMLDLGRGPQWMTVRAEELRITAAEWKLSVDRYPDGS

SEQ ID NO: 167494 - protein, 137 aa, Oryza sativa
  Clone ID: PAT_MRT4530_660C.1.pep
MSSSKLNLIFVLGIIFFLSSDMIIVCSQGRPLIAEAAAAAAAQQQRHLLSSSSSAPRSGGDVEEAAAGGGKGTTTAMTQGTLSPDAAESGGGGGGGVGIVEDARPTAPGHSPGAGHAFTNKNGVGRRLLVVTISTLI

SEQ ID NO: 167495 - protein, 116 aa, Oryza sativa
  Clone ID: PAT_MRT4530_66100C.1.pep
MARAQLVLVAVVAALLLAAPHAAVAITCGQVNSAVGPCLTYARGGAGPSAACCSGVRSLKAAASSTADRRTACNCLKNAARGIKGLNAGNAASIPSKCGVSVPYTISASIDCSRVS

SEQ ID NO: 167496 - protein, 120 aa, Oryza sativa
  unsure (1)..(120): unsure at all Xaa locations
  Clone ID: PAT_MRT4530_66101C.1.pep
PQLVFVPPLGDQFLLFAARTPPCAHYHLRPSSNSALRPLPLTYSRGGRRPFAACCXGLRTLKPPPSTTXADRRTXACNCLKNAARGIKGLNAGNAASIPSKCGVSVPYTISASIDCSRVS

SEQ ID NO: 167497 - protein, 70 aa, Oryza sativa
  unsure (1)..(70): unsure at all Xaa locations
  Clone ID: PAT_MRT4530_66102C.1.pep
NPWPMQQQPPWRPPGNGAGLLGPYHQVHTDFAGPYVSSPTPGWPQMQQAXPNRDQTGLVASDHTRDSSMQ

SEQ ID NO: 167498 - protein, 836 aa, Oryza sativa
  Clone ID: PAT_MRT4530_66103C.1.pep
MNPTGKPLLLLLLGLLLLATTTLSRAIHAIPYRNSALRDITSDHLGLLTSWRQDDHDCYRWRGITCSNLTGHVLKLHLSGIYTNEHTGMEGLVGQISPQLLYLDHLEHLDLSINYLEGPSGQIPEFIGSMKSLRYLKLSGIPFSGTVPSQLGNLSKLQHLDLSDLEGKEGMHLADMSWVSRLGSLRYLDLSFINLSAASDWAHAVNMIPSIRVLCLSLCQLQGANHSLAHYNLTKLEKLDLSSNYFDHPYASCWFWNSTILKYLDISSNNLYDQLPNAIGHMASLRVINFSDNAHMGIVEPELMTNLYLVTLDASNNQLAGPLPVEIGMLTGLNHLDLSYNNLAGDITEEHFANLRSLKYIDLSSNDPLNIVVDPTWIAPFRLERASFPACMMGPQFPTWLQWSVDIWLLEISNTGIKDKLPDWFWTTFSKLEELDMSNNQISGVLPTNMETMALSYLYLGSNQITQNQQMVTLILSFNNLSGHIPESFCRMEQLAALDLANNLFEGELPQCFGMTVFLERSTKLQLVDLSRNNFSGKLPTWIGDKKELVLLLLSHNVFSGIIPINITNLSNLRQLNLAGNSLSGNIPWRLSNLEAMKEDNYIFNLDIPDDSSYNNLSVFTKRTELFYGPNIFSAVNIDLSSNYLVGQIPEEIASLALLKNLNLSRNYLSGKIPQKIGSLWSLESLDLSRNKLSGEIPPSLSNLSYLSDLDLSHNNLSGRIPSGSQLDTLYFEHPDMYSSNDGLFGFPLQRNYSEGIAPKQGYHDHSKTRQVAEPMFFYLGLVSGFVVGLWVVFCTILFKKTWRIAYFSLFDKACDKIYVFTVVTWARVSQKTNVQ

SEQ ID NO: 167499 - protein, 409 aa, Oryza sativa
  unsure (1)..(409): unsure at all Xaa locations
  Clone ID: PAT_MRT4530_66104C.1.pep
MSCREGRMSPQTETKASVGFKAGVKDYKLTYYTPEYETKDTDILAAFRVTPQPGVPPEEAGAAVAAESSTGTWTTVWTDGLTSLDRYKGRCYHIEPVVGEDNQYIAYVAYPLDLFEEGSVTNMFTSIVGNVFGFKALRALRLEDLRIPPTYSKTFQGPPHGIQVERDKLNKYGRPLLGCTIKPKLGLSAKNYGRACYECLAGGLDFTKDDENVNSQPFMRWRGRFVFCAEAIYKSQAETGEIKGHYLNATAGTCEEMIKRAVFARELGVPIVMHDYLTGGFTANTSLAHYCRDNGLLLHIHRAMHAVIDRQKNHGMHFRVLAKALRMSGGDHIHAGTVVGKLEGIFFFFFFFFFFFLRKXELYVCVIIQNKHVVQGVAVHACRISSSLWYTYPSKRSKTYETNTQEEES

SEQ ID NO: 167500 - protein, 76 aa, Oryza sativa
  unsure (1)..(76): unsure at all Xaa locations
  Clone ID: PAT_MRT4530_66105C.1.pep
RTFQSVWQKLITENIWEXKYRAGGXGVARPAPPPAGRTSGNRGDAVIRRGLGKDAVMRCLRRGXGGSAAACREEKQ

SEQ ID NO: 167501 - protein, 383 aa, Oryza sativa
  Clone ID: PAT_MRT4530_66106C.1.pep
MVTLILSFNNLSGHIPESFCRMEQLAALDLANNLFEGELPQCFGMTGMAIVLLQNNRFSGSFPVFLERSTKLQLVDLSRNNFSGKLPTWIGDKKELVLLLLSHNVFSGIIPINITNLSNLRQLNLAGNSLSGNIPWRLSNLEAMKEDNYIFNLDIPDDSSYNNLSVFTKRTELFYGPNIFSAVNIDLSSNYLVGQIPEEIASLALLKNLNLSRNYLSGKIPQKIGSLWSLESLDLSRNKLSGEIPPSLSNLSYLSDLDLSHNNLSGRIPSGSQLDTLYFEHPDMYSSNDGLFGFPLQRNYSEGIAPKQGYHDHSKTRQVAEPMFFYLGLVSGFVVGLWVVFCTILFKKTWRIAYFSLFDKACDKIYVFTVVTWARVSQKTNVQ

SEQ ID NO: 167502 - protein, 116 aa, Oryza sativa
  Clone ID: PAT_MRT4530_66107C.1.pep
MARAQLVLVALVAALLLAAPHAAVAITCGQVNSAVGPCLTYARGGAGPSAACCSGVRSLKAAASTTADRRTACNCLKNAARGIKGLNAGNAASIPSKCGVSVPYTISASIDCSRVS

SEQ ID NO: 167503 - protein, 516 aa, Oryza sativa
  Clone ID: PAT_MRT4530_66108C.1.pep
MLTSLTDINLRVNNLTGEITEKHLAGLKSLKNIDLSSNHYLKIVVGPEWQPPFKLEVAIFESCQLGPKFPSWLQWMVDIKILDIWNTGCKQLMHLDLSQSKFHGRLPSWIGDFPAVRSLILNNNVLSGHIPINITNLTNLQDLDLSQNKFHGRLPNWIGDLPKALFVSWSSQLPHLIFRAHAFQTAKRNHHFVPSNPCDTVPKLGSGATTVACVPRERDALLAFKRDITSDHLGLLTSWRQDDHDCYRWRGITCSNLTGHVLKLHLSGIYTNEHTGMEGLVGQISPQLLYLDHLEHLDLSINYLEGPSGQIPEFIGSMKSLRYLKLSGIPFSGTVPSQLGNLSKLQHLDLSDLEGKEGMHLADMSWVSRLGSLRYLDLSFINLSAASDWAHAVNMIPSIRVLCLSLCQLQGANHSLAHYNLTKLEKLDLSSNYFDHPYASCWFWNSTILKYLDISSNNLYDQLPNAIGHMASLRVINFSDNAHMGIVEPELMTNLCSLENLNLQGSLSYGNMTVAR

SEQ ID NO: 167504 - protein, 144 aa, Oryza sativa
  unsure (1)..(144): unsure at all Xaa locations
  Clone ID: PAT_MRT4530_66109C.1.pep
ASSVLDTVAESRVISCAVSSRSLKLYRCVIPVPKLANRPFRLSNLFDHVIPVPKLADHSFRSSNLFSCVTPVPKLGFEYHLGQIGXDRDDTTEQVGGPKRVICTFRDRDDIVKQGGGFAKNQERALGLAGVKCKSTPPMSLAIG

SEQ ID NO: 167505 - protein, 121 aa, Oryza sativa
  Clone ID: PAT_MRT4530_6610C.1.pep
MLMATQPLGPVLSPSHGGPSSFSSSVSLGGQWAPRRPAVSSKVSCTRIGLSEVDNRKVVGHIDVDEEEQTMQVQGITTVTATVAVRLKEGISTPQKVANMVNRNWLFLDFFSLSTERHTEP

SEQ ID NO: 167506 - protein, 47 aa, Oryza sativa
  unsure (1)..(47): unsure at all Xaa locations
  Clone ID: PAT_MRT4530_66110C.1.pep
PWDLPFRADDGEKDSDXFCVNDPKYPTELTTNNATGGRYCNARGNDQ

SEQ ID NO: 167507 - protein, 115 aa, Oryza sativa
  unsure (1)..(115): unsure at all Xaa locations
  Clone ID: PAT_MRT4530_66111C.1.pep
TCYAEIVRTLMEKPHVDFGLERAGADLMGFARLYVFAQEMIKTYSSHTYLWSEVLXVPIMDPAKAQKKPAAIMDVNMVRAVNVTKQDRTRKWHPYAKXKLTDDKLRSKKASMKRS

SEQ ID NO: 167508 - protein, 42 aa, Oryza sativa
  Clone ID: PAT_MRT4530_66112C.1.pep
KIFKTLFILYKKKLSFKVCDVTSYKYVVHSSPLSSFISLKYV

SEQ ID NO: 167509 - protein, 77 aa, Oryza sativa
  Clone ID: PAT_MRT4530_66113C.1.pep
MDRQKNRAERPQSSEDKKEDDEKKKKIKRSTLRAPTRNYLAARCRGQRINAGAEQSEAAPRDHGWGQIPTSPAADTA

SEQ ID NO: 167510 - protein, 686 aa, Oryza sativa
  unsure (1)..(686): unsure at all Xaa locations
  Clone ID: PAT_MRT4530_66114C.1.pep
LHVVLPISGGSSAVHESKRQHRDYARGVLNLAPTNWPLIFFSLVIIEHLEDGHGRLYLHNDAMVVTARVAEADVHRILVDGGSSADILFIAAFDQMRTPXSRLSKARWPLKGFSGDMVEGLGQISLPVSFGRGWGARTEQVTFDVVDLSYAYNAIMGRGSLNMFGAPVHQNYLCMKMPGPAGVISIRDDQLAARKIAYGTDRKPXAKHVHEVDGANSERASHFVKPEADEGTNGVHHDLAHPERAFRLGDGLASDVIAAIVAVLRENLDVFAWSASDLKGVDRSIAEHQLRVRTGSRPVRXGLQKMSVERAQAARKEVKKLLEAGVIREVQFSEWLSNPVLIKKANGKWRMCIDFTALNKACPRDPFPLPHIDQLVNSTAGCELLSFLDAYSGYHQVWLHPEDEAKTSFVTPDGVYCYVRMPFGLRNAGATFARLIHSALEAQLGRNVEAYIDDVVIKSKLALDHAADLREMFDNLRRACIKLNLEKCTFGATRGKLLGYLVSKRGIEANPEKIKAITDMGSPRTPKEVHRLTGRLASLSRFLARSAENCLPFFAVLRGASPFRWTPECQQALDSLKTHLSKLTSLASPPXPGQGLLLYLAASPAAVSAVLVLKDSSGSRLQQRLVYYVSEALAGPKTRYTKLEKMAYLLVMASRKLRHYFLAHDITVPTSYLLGDMLRNREAIGR

SEQ ID NO: 167511 - protein, 30 aa, Oryza sativa
  Clone ID: PAT_MRT4530_66115C.1.pep
IFRGSQLNKRSTRPAPFKASDSRSRVLLIF

SEQ ID NO: 167512 - protein, 409 aa, Oryza sativa
  Clone ID: PAT_MRT4530_66116C.1.pep
MGKKAAGTVAAAGGLLVVVVLAIEPRTLHALLLPAADARGPAHAWPPSWRPRSCAIESNNPFFPLWFEGYIDVVLGGVETGCGNTSSPLQDQTCHAMSRLIVWVVPAQPGPANKYYDLVTSFYEYGWGESFHFGSRWQGETLRESLKRHEHFLALQLGLKKGMKVLDVGCGIGGPLREIARFSSASVTGLNNNAYQISRGKELNFSVGLSETCNFVKADFMNMPIPDATFDAAYAIEATCHAPDAVGVYREICRVLKPGQLFALDEWCMTDKYDPGNSRHRSIKAEIELGNGLPDIRTTKQCIQALKDAGFEVVSVKDLAEDSPLPWYLPLDSSQFSLNGFRLTRVGRFITHMLVKTLECLHVAPQGSLRVSSFLETAAEGLVKGAKEGIFTPIFFVLARKPLDKQPEI

SEQ ID NO: 167513 - protein, 138 aa, Oryza sativa
  Clone ID: PAT_MRT4530_66117C.1.pep
MACHISARSRYENYHEIYGGEVESRTSNYADLANKYYDLVTSFYEYGWGESFHFGSRWQGETLRESLKRHEHFLALQLGLKKGMKVLDVGCGIGGPLREIARFRDKNQANYNYSNATNYSSASVTGLNNNAYQISRGK

SEQ ID NO: 167514 - protein, 273 aa, Oryza sativa
  Clone ID: PAT_MRT4530_66118C.1.pep
VGVYREICRVLKPGQLFALDEWCMTDKYDPGNSRHRSIKAEIELGNGLPDIRTTKQCIQALKDAGFEVVSVKDLAEDSPLPWYLPLDSSQFSLNGFRLTRVGRFITHMLVKTLECLHVAPQGSLRVSSFLETAAEGLVNYCSIAVAATSANATAAKAALAPPPPAAALALGAGAVVVEEDELSVVGEEDSGGDDETAGDGAAAAPRLEAAGAGEGASEEEERCGLRTRMLTFWPAAQWPGTPQMKKRWPAALMAILSSPEVCVAIGDELVQLS

SEQ ID NO: 167515 - protein, 50 aa, Oryza sativa
  Clone ID: PAT_MRT4530_66119C.1.pep
RPSEGQDPQDFEQGKSSLFFEHVDPKCEIILFTNKIVCNDEHPTCDYAMP

SEQ ID NO: 167516 - protein, 106 aa, Oryza sativa
  Clone ID: PAT_MRT4530_6611C.1.pep
GPQKMLSRWARCEVKWGIQNLPGFFFGGKSVRGQRGKKREPGFTRYEGDFLRGKQRGYTPRFRGGKIRLTILMGAAPGNRAQLFLGQKIYGKPLGRPCFGNQRRGS

SEQ ID NO: 167517 - protein, 82 aa, Oryza sativa
  Clone ID: PAT_MRT4530_66120C.1.pep
VLQPAVSGALARVAVREAGRLRVPPARLDTVHALSAAAQVARWIAPVSAPAALISPIFGLLPLGSTAAKVTLHGSLSLFGVR

SEQ ID NO: 167518 - protein, 345 aa, Oryza sativa
  Clone ID: PAT_MRT4530_66121C.1.pep
LFFYTNAALEWVLLRVEALQILVIVASSILLVLLPEGAVAPGFLGLCLSYALMLSSAQVFVTRFYSNLENYIISVERIKQFMHLPAEPPAVITDRRPPPSWPSAGRIELENLRGRNAPTVLRGITCTFAAGHKIGGVGSGGSGKTTLLSTLFRLIDPYSGRILIDDLDICTIGLKDLRMKLSIIPQEPTLFRGSVRSNVDPLGLHTDEDIWEALNKCQLKKTISALPGLLESPVSDDGENWSAGQRQLFCLARVLLRRNKILVLDEATASIDSATDAVLQRVIKQEFSGCTVITIAHRVPTVTDSDMVMVLSYGKLIEYDRPSRLMENEDSAFCKLVAEYWSNYS

SEQ ID NO: 167519 - protein, 73 aa, Oryza sativa
  Clone ID: PAT_MRT4530_66122C.1.pep
MGALHWMARSGGGSDGRSERKGMVAKVTPQGEEAKLTGGAYHMEYGVGSSPLAFLKDSFQENIKDNRCCMSIM

SEQ ID NO: 167520 - protein, 249 aa, Oryza sativa
  Clone ID: PAT_MRT4530_66123C.1.pep
MMILEAAAFLLLTAAAAAGGASTVVEPVASCSATDSFAADSSFAGNLGRLVSLLEAKAPAIGFDIATVGVGGDGEDQRVHGLALCRGDVARATCAECIRAAGALARRVCPSKKDAVVWLDACMLRYSGEPFFGEVDAEHRAVVPPARVLRGADRSADLDREVSRLMKRLTRTAYLSPLLFAAGEAVAVGGAQRLHGMAQCTKDLSGGDCKMCLESAIDQLLARGCAKEGGKVLGGSCSLRYDFYSLSDS

SEQ ID NO: 167521 - protein, 44 aa, Oryza sativa
  Clone ID: PAT_MRT4530_66124C.1.pep
CIDPPIISFLIHRIVFHNVLTRFVITPPNLKATPRSKTRMVIKT

SEQ ID NO: 167522 - protein, 35 aa, Oryza sativa
  Clone ID: PAT_MRT4530_66125C.1.pep
GSLRVRYLYSHQKWTHLVSICVLMRRLMISQHDVD

SEQ ID NO: 167523 - protein, 737 aa, Oryza sativa
  Clone ID: PAT_MRT4530_66126C.1.pep
MARGPRRLRKLNLDAQSAGHVQAEEENLLYNFEALDEADAQFNDDNLHLEAQDAGNVQPTEDSEQDLSENDDIITELPLAAKRPINIIWPNGEVRQVLGNFNVKNLDQLKQGKVIVETDEHGIPNDRSGSVLGSYLGKLAQNSTFAPLDIPKWDHDLFVGPKESIVADVELFMVKMKFVYPSETKQLTRGWILMKADKGWRSYKSRLKGRYFNPDVRTLNDILKYVPKGVNGYQWRGLVKIWCQDKHKKLCEKNSESAKQQRNPHTTGRKSHARLCKEMVEAKVKGKVHDIDVWDEAHKKKDERIKAVVESAYHELAKKKSTSCSGLSSKDYDEVFRRVVGKETKLRGYYDHKNWSQIRVSQGLDVVGQSEEYAMLKLQMNAMENKIEAMSVDMTLMRAFIEQKFPGEDWRNIVVAEQNKEVDISEQVGNDIQHESNVEESCEHVHSTPDNVQVQKHLISYIPAKNGCHKPSVPHEHMIAKQSSIGSFARRSEASQRYMESTMAHDHGTDKVDMFDQVDIDCTNEFDNNFDNSFANTNAKSNHVQQVHSISSANGNGRRFNPSIPYERTNAKQLSGESLGKRSITSQMNVESMVPRENVTNEAYVSEQDGTDIMNGFVHNREEPHANENAIPNNVQQLCSVSSTRAKENCSTKALPYDHITAKQSSIKSSVKRTRTNCVDSILPPDKAKQDQRVVFLFSLNPVYKGKVVAKGNLVTTDSTYVVGGNMLGNEYYGKKA

SEQ ID NO: 167524 - protein, 138 aa, Oryza sativa
  unsure (1)..(138): unsure at all Xaa locations
  Clone ID: PAT_MRT4530_66127C.1.pep
SHGGGGARDHMRDGAAEGGGGGSXCSFSPEAQTSSGRSARSAPSSAPRGTPPPTRKPRPRPPLREKRMPPPTPLAFRSEQGLGARDLVPRINLRYPYLMQNLVTLLPHPKKDTKGPMDSDAWQCAQPAGLSSGTGSHG

SEQ ID NO: 167525 - protein, 683 aa, Oryza sativa
  Clone ID: PAT_MRT4530_66128C.1.pep
MARGPRRLRKLNLDAQSAGHVQAKEENLLYKFEALDEADAQFNDDNLHLEAQDAGNVQPTEDSEQDHSENDDIITELPLAAKRLINIIWLNGEVRQVLGNFNVKSLEQLKQGKVIEETDEHGIPNDRSGSVLGSYLGKLAQNSTFAPLDIPKWDHDLFVGPKESIVADAELFMVKMKFVYPSETKHLTRDWILMKVDKGWRSYKSRLKGRYFNPDVRTLNDILKNVPKGVNGYQWRGLVKIWYQDKHKEAKVKGKVHDIDVWDEAHKKKDEHIKALVESAYHELAKKKSTSCSGLSSKDYDEVFRRVVGKETKLRGYYDHKNWSQIRVSQGLDVNGQSEEYAMLKLQMNAMENKIEAMSADMTLMRAFIEQKFPGEDWRNIVVAEQNNEVDISEQVGNDIQHESNVEESCEHVHSTPDNVQVVQYLLDNFKIDAFQKHSISYVPAKNGCHKPSVPHEHMIAKQSSIGSFVEGLKLVRDTWNQLWHMTMELISSANANGRRFNPSIPYERTNAKQLSEESLGKRSRTSQMNVKSMVPRENVTNEAYVSEQDGTDIMNGFVHNHEEPHANENAITNNVQVIGDIGVADGKGCDRTCATTAADGIGSRPLGRRSQQPVDTPLGHTTVVGHLHLHRRLAFAAADWCLRLHGWPLMPPLLGVYDFTAGLPSSPLTGVLAYTVRGLHHR

SEQ ID NO: 167526 - protein, 853 aa, Oryza sativa
  Clone ID: PAT_MRT4530_66129C.1.pep
MGAMRQNMAKLQDTLRQMQEQQQAYEAARQAKAHTLHFYAQPQVLLPHAVQAPVYFAKPAPAVAARPTPQVASAPVRLTAPQAYGNASYFVRPAKPGNDVRHGASIDTRSPTSCTSCGFAVRALIPTVELALSARDHGEEDTKRRQEIQAEYDKAASAAAATAQANAQAQVQAQVVSSAPVLVHPTAPANQGQHPRPNQAPMTWKKFRTERTSKAVMAVEEVQALRKEFDAQQAGGQQQPFRKKIKDLYCAFHGRSSHTTEQCRNIRQQGNAQAPRQQQARAEEAPREAKKMQLRVVHNIVSEGDGVPRYLSQPISFGLKDADGVLFPHQDPLVVSAEMAGFEVRHILIDGGSSTDVIFVGTYTKMGLPTLALSQAPTSLRGFGGEAVQVLGQALIKVAFGTKDNRREEEILFNVVDIPYNYNAIFGRGTLTKFEAVSHHNYLKLKMPGPAGVIVVKESQPSAATVAPFNREVHTLEVEGQENAKPTPKPAPHSKVVQLQIDESDPAKVISLGGDLDEQQVNSILVVLKKNIDIFAWGPDEVGGVLPDLIMHHLAVKPNAKPKKQKLRKISVDCQEAAKAEVNKLLKAGVIQEIDHPESLANPVLVKKSNGKWRMCVDFMDLNKMCPKDDFPLPRIDQLVDSTAGCELMSFLDAYSGYHQIHMNPANIPKTAFITPFSTFCHLRMPFGLRNAGATFARLVYKVLGSQLGRNIEAYVDDIVVKSRKAFDHASDLQETFDNLRASGMKLNPEKCVFGVRAVMASRMLKHYFQVHIIVVPSQYPLGEVLRGKEITGRLSKWAAELSPFDLHFVARTAIKSQVLADFVAEWTPASVAEFEPVEQPWFMLKANIYVLM

SEQ ID NO: 167527 - protein, 639 aa, Oryza sativa
  unsure (1)..(639): unsure at all Xaa locations
  Clone ID: PAT_MRT4530_6612C.1.pep
MAAYCSRVYHHHPVSPSTMQGSLARPSIHAGSASLTFRARPNSVSIVRCDADSPPEGSAVAGWAPPGPYTGRDPAARKPAWLRQRAAQGEKYARLRESLGELKLNTVCVEAQCPNIGECWDGGGGAGGDGDGIATATIMLLGDTCTRGCRFCAVKTSNKPPPPDALEPLRTAVAVASWGVDYVVLTSVDRDDLPDGGSGHFAQTVKALKELKPGILVECLTSDFRGDLEAVSSLASSGLDVFAHNIETXYDQSLAVLKHAKNCKDGXGETDEEVKQTMCDLRAIDVDILTLGQYLQPTERHLRVREYVTPEKFDFWKEYGESLGFLYVASGPLVRSSYRAGELFVQNLFFDESFALKLCADDRNLAVTLLKGADWFAILNYTIIVVFPVAGVEDAVVGFVTGKRKATELAHAIWNESSVNGKCSLGFSGRCVKEYVYTLAIHILSFGFLIRVWRSIVRKGDTVVDATCGNGNDTFAMLKMVADERVQGRVYGLDIQESAIASTSSFLKMAVNSHELELVKLFTICHSRMEEVVPKDFPVRLVAFNLGYLPGGDKTIITVPKTTELALQAASSIVSSGGLISVLVYIGHPGGRDELDVVESFASSLPIDTWMSCKFEMLNRPFEMMNRPMVPVLIILHKK

SEQ ID NO: 167528 - protein, 119 aa, Oryza sativa
  Clone ID: PAT_MRT4530_66130C.1.pep
WIIRAAAAAIVPTLPAAASAAAPPSPSASPPSPPASAPATSASATSPASSATAARSATSPSTAKDAAAPTTTTRRRWPTRSTSGHRPTTRRRWRRQRQRQRRRRRGRRGGGGGRRGGGI

SEQ ID NO: 167529 - protein, 501 aa, Oryza sativa
  Clone ID: PAT_MRT4530_66131C.1.pep
MELLLLCTPCVILLLSSLYLLRLFVDARRNLPPGPRPQPLIGNILDLGSQPHRSLARLAGRYGPLMTLRLGTVTTVVASSPGAARDILQRHDAAFSARSVPDAARACGHDGFSMGMLPPSSALWRALRRVCAAELFAPRSLDAHQRLRRDKVRQLVSHVARLARDGAAVDVGRAAFTASLNLLSSTIFSADLADFGDARAESSVGDLRDLISEFTIVVGVPNVSDFFPAVAPLDPQRLRRRVARVFERLQAVFDGHIERRLRDRAAGEPPKNDFLDALLDYRSPEDGRGFDRPTLQFLFTDLFSAGSDTSAVTVEWAMAQLLQNPPAMAKAREELARVIGSKQEIEESDISQLKYLEAVVKETLRLHPPAPFLLPHQAETTTQVGGYTVPKGTRVLVNVWAIGRDSKVWSDPDKFMPERFLQSEVDLRGRDFELIPFGSGRRICPGLPLAVRMVYLMLASLLHRFEWRLLPEVEKNGVDMAEKFGMILELATPLRAVAIPV

SEQ ID NO: 167530 - protein, 349 aa, Oryza sativa
  Clone ID: PAT_MRT4530_66132C.1.pep
KKQRLRNTSANDLDQLMFDINEEGLLARTDKASPNVQSKLSPSIVKVPLKTSREQLENMPPSSQLAVTNQDYKAPRNEDNPLCTARKTNNAHLGSSVPSESTCIGKVEAGAHAVSRHHPGQRNTATNMTRKSNQATEDQVKGSPRKQRPRHAHGRGVNVVSSNSNNNSLTMHIRLPVYEKVASLSGGSEKTVNQPTSHDNKMKLKTYSTQEEAVSHSASHNKTEMHKRSLDFPTPPRCHDDTYNSTNSTNLHILEKSITTNNKQKQQPAVMCIDILKKNHPPEPTKVRSSSERQERPNSPKPDEHLSTTARSRSVGADRISPQIRTPSQESKDHVAPFIEESEACETKN

SEQ ID NO: 167531 - protein, 89 aa, Oryza sativa
  Clone ID: PAT_MRT4530_66133C.1.pep
NTHGWFSPVHDTKQALTSLDRAQDNVSLLLLYHHHHYYCTHTAGLEQSRKELHQYRLHRIGCILVQMEILEFVGQASAYSLSQAIFLAT

SEQ ID NO: 167532 - protein, 291 aa, Oryza sativa
  unsure (1)..(291): unsure at all Xaa locations
  Clone ID: PAT_MRT4530_66134C.1.pep
FIALVNGLVRPGEELKKQRLRNTSANDLDQXSIVKVPLKTSREQLENMPPSSQLAXGSSVPSESTCIGKVEAGAHAVSRHHPGQRNTVYEKVASLSGGSEKTVNQPTSHDNKMKLKTYSTQEEAVSHSASHNKTEMHKRSLDFPTPSRCHDDTYNSTNSTNLHILEKSITTNIKQKQQPAVMCIDILKKNHTAEPTKGDTALSCSYLSSDKTTELXKNIIVRSSSERLERPNSAQPDEHLSTARSRSVGADRISPQITTPSQESKDNVAPYIEESDACETKNSEEAVSSNT

SEQ ID NO: 167533 - protein, 144 aa, Oryza sativa
  Clone ID: PAT_MRT4530_66135C.1.pep
MDAGWKGRDGWGCWRRERSAIEGSAGRRMLGFGVGATRGEGGAECGGGRRWTRYHERTAMMADAVSVGWGIRIGKRHEPIAQGPISLALFFSLTQQSPSLSAGSMMPSARQSESLIPPRWLQQVPALLLSLPWCMSNGAAVGTA

SEQ ID NO: 167534 - protein, 373 aa, Oryza sativa
  Clone ID: PAT_MRT4530_66136C.1.pep
MGYKGWTIKTFLLLHLLIFSVDPTKEEVDNNLIIKTIQTADGQTFACVSFKSQPSLRHPLLMNHTTQLMPPISFPHSTDDDEGSKFGISNVEMSEIECPPGTVPILTSYNGSMSTRSFDKIIYSENRNDKGNRQMAAVVIVPSTFYGLQTSISIWETDLGTGRPPRFSGAIVVLKNGGSRVAVGWSVDPHLYGDNLVHFEIAWVDNDKSCINLRCAGFVQMSKKAIPGIIIRPVSTVNGKQYIIRVKIIKFMGDWVLKVGEEIVGYWPSKLLTHMSEAADVISWMGVVEAAPGEPFPPMGSGQPADEGETKAAFFADAKVIDASGSFATPALKTINTVATEPNCYDVGRPYTTDDGLQFYYGGAGCSPSQPIK

SEQ ID NO: 167535 - protein, 603 aa, Oryza sativa
  Clone ID: PAT_MRT4530_66137C.1.pep
MAPPPGILEVRCAGCGETLEVEHGLTEFACPDCGMAQALPPELMPPRPRRALPLPGRASVVPSAVPAPATATAAAPPTRVSCGGCAAVLSVPHGPGRFSCPLCGAEIAPPPPLAAVVSVVAPPAAIPITSNRPAMTSEVLNGNSNQPTLAGQVQKSIIPEQYYKHSFREESFSSFRVDSRTQIPDVGRLQNECVNPSADREESRTEPPNGTMTKPGKKKTTSASGPKSHPAGKLQEEHISKAIHASRAQGMPSNSVGGGFHNGMIAVHNKQKTGHIAAPSAIEHEQINTLHQVCDKQQPGENSSDLVHVEQDARNGDMLSASVSKSSKKRRGRAPAVLMEPRKEADRPVLTPCGAESLEEGDGREDSEEQHGDESVLVLELDDPLNWKPFVPEWMQPKWWEKLCDHWAKDEVMKSIDNGRKLVSDIDPSTKINSDKGGIIDKKILRTEDTTYEHTAEAREPVQEHMGGCKRGRYYCDTGVRKKVQTDSLPKSSPGCSSNHGQGQPPMFTHEQVQQMINQALQGLNETWEKKFLSLEQNMRSMSKSRIILDGPKKGSLAAVAGDKRCQLSCQDTLDSVDGEKDPAGEGEDDPENQDYDDDEHWS

SEQ ID NO: 167536 - protein, 67 aa, Oryza sativa
  Clone ID: PAT_MRT4530_66138C.1.pep
MEVEAATRRFHLWLRGLRGLQRELRAARWADSRAFSVCANFGYRESRRRALACGDLACLLTGMALSC

SEQ ID NO: 167537 - protein, 196 aa, Oryza sativa
  unsure (1)..(196): unsure at all Xaa locations
  Clone ID: PAT_MRT4530_66139C.1.pep
GGGDGGRGRVVVVPGEGSGGNGGNGGSGGKAGSGGSGGRAGSAGSGGNGGRPGTRGAVDGGRLDXRERRVWWWRRPARRDEARPAXMRRPRCEXEWPGGVAWSSAHECWPXGGAGAVVPHVSRGXAVVEHRCXAMNSGGRSGASLLPDLCVGAVGVGGSIFFXFFLITTFQGCNLVIFFCSINRTSHHLVRVVQKK

SEQ ID NO: 167538 - protein, 72 aa, Oryza sativa
  Clone ID: PAT_MRT4530_6613C.1.pep
SSASCRVRRLRRCRWSTVCGPLVSCSYGGGYGSRRRLATPTGTWRNLSGGALMATVMLSDLIELAMHHASDR

SEQ ID NO: 167539 - protein, 132 aa, Oryza sativa
  Clone ID: PAT_MRT4530_66140C.1.pep
MEEVTEAVSNLSITEPHKKNRIQVSNTKKPLFFYVNLAKRYMQQHNEVELSALGMAIATVVTVAEILKNNGLAVEKKIMTSTVDVKDDSRSRPMQKAKIEILLGKTEKFDELMAAAAEEREAAAAAEGEEQG

SEQ ID NO: 167540 - protein, 54 aa, Oryza sativa
  Clone ID: PAT_MRT4530_66141C.1.pep
MAQQLGLLAAVFVSLAVHVALHCPIQPLAPPPARPPAAARFPPNNLLQVRYVAF

SEQ ID NO: 167541 - protein, 104 aa, Oryza sativa
  Clone ID: PAT_MRT4530_66142C.1.pep
NLLTRARTRRRRRRRRGRRRRRRSAPGRGAPCAGNGNARRRPCTRCRGTRPRRGGPRRRCRAPAAAGAPPPRRGTGSAGTGRPSPSSALSSAAPSRRGGGGGGR

SEQ ID NO: 167542 - protein, 86 aa, Oryza sativa
  Clone ID: PAT_MRT4530_66143C.1.pep
WRAATHFQAGGAPSTTSWRPSPEPSPPAPSSSSPPSSSARRGYPSRSPAAARPSALPPAARRFSSTSPSPPTTPATGPGCSTSPSR

SEQ ID NO: 167543 - protein, 81 aa, Oryza sativa
  unsure (1)..(81): unsure at all Xaa locations
  Clone ID: PAT_MRT4530_66144C.1.pep
MAVNWSGIVSLVIVSSLARFLSGSAHAPPCRTPRYGSRCRRPQSTLVPAGRRDTPAKTTXTAKAGHGGSGGVNCRPSARAS

SEQ ID NO: 167544 - protein, 142 aa, Oryza sativa
  unsure (1)..(142): unsure at all Xaa locations
  Clone ID: PAT_MRT4530_66145C.1.pep
PRXNVXXDXKNDPPMXCXSFNAQXVSSLTHPGQVGAGYAPVLDCPTAHIACKFSEILEKLDRRTGKSIESNPKFIKSGDAAIVKMIPSKPMCVETFSEYPPLGRFAVRDMRQTVAVGVIKSVDKSQGTQGKVPKSAAKAAKK

SEQ ID NO: 167545 - protein, 82 aa, Oryza sativa
  unsure (1)..(82): unsure at all Xaa locations
  Clone ID: PAT_MRT4530_66146C.1.pep
SDADPYASHPXGHDYGKSRTAHGGGGNSNVIHVSHEGXDHHRPTPNYGGFEXFSPLQETRPYHGGGGSPPATHRNYCKAGED

SEQ ID NO: 167546 - protein, 370 aa, Oryza sativa
  Clone ID: PAT_MRT4530_66147C.1.pep
MAVNWSGIVSLVIVSSLARFLSGSAHAPPCRTPRYGSRCRRPQSTLVPAGRRDTPAKTTCVMVADEQPVSALLVLVFLCFSPVSLWTTAKAGHGGSGGVNCRPSARASYLLRIPQYVRRGCRGGDSPQEHLSPPCAEIPTTGIPPCLLNDADLDLVGDQEMQAYYMLKDQIFAHTRAYDPELLKKIGMDVNSHTIWKVVGWQRFAVADEPGSRLLTLQFRGDLRPIREDKLIIMFVTVRKIKVAPVKCAMVDHIGTHATWREMNKKVQHPCKCTKPVRNQLGMHPDGPKLYTIASEARSGRVPARADREHLMTYTGEHEHSFPQIKHNSMTTFKRTFASRGSILIKDPERKASLVGDVSPPAEILFMLYD

SEQ ID NO: 167547 - protein, 442 aa, Oryza sativa
  unsure (1)..(442): unsure at all Xaa locations
  Clone ID: PAT_MRT4530_66148C.1.pep
MQAYYMLKDQIFAHTRAYDPELLKKIGMDVNSHTIWKVVGWQRFAVADEPGSRLLTLQFRYTLKEIEDGISFRFFRKEFTLTWKXLSTLLCFHDDYKTXFGISGFEKNRFWENISGGPICKKPRTNDIHNPTLRLMHKWIVMTLFPRGDLRPIREDKLIIMFVTVRKIKVAPVKCXWLESIKFTAPVECTSLITSIAYRLGVISNDQIAYISTPHPCVDENYLVQGHILKHGVDGSLIFFFPGCTKKIPLPNSGYHLYNCHELTIPVXTIEESCAGGSYRDTRNMARNEQEGSTSVQMYEAGXEPTGDAPGWTQALHHSLRGSVWKSASESRQRASHDIHWGTXNIHSLRSSSMPSSPNEWXWCSSSSRXDLGEITRRMDKIDMQTGEIQYNLDEHLTQTQEXQPNVDAQFTNTNNAXLMQQQHDDLQAYFRFQGFNPYQGP

SEQ ID NO: 167548 - protein, 50 aa, Oryza sativa
  Clone ID: PAT_MRT4530_66149C.1.pep
KLSPFFLPLFWKNESVCWPNKIWWSCQNAFFIHGNAVSNNVGPKKNFLFF

SEQ ID NO: 167549 - protein, 62 aa, Oryza sativa
  Clone ID: PAT_MRT4530_6614C.1.pep
PIHMCSSIICRKRGSASKYQSGLLAFLLEGFVFFCQLNTCKLDSLSNFKTVNILFSRVSLNI

SEQ ID NO: 167550 - protein, 73 aa, Oryza sativa
  Clone ID: PAT_MRT4530_66150C.1.pep
MERGGPCDGLCRFRIHLGTRGDCPLPAGDGGQFGGYLATNLTRAALIQMSDKWLRKGSYGATARLQLREETDS

SEQ ID NO: 167551 - protein, 54 aa, Oryza sativa
  Clone ID: PAT_MRT4530_66151C.1.pep
LETTRFFQSYSFLKTPNEFIFGSPKKKITSSTQGTESLEPPKPPPPYYFFFPIH

SEQ ID NO: 167552 - protein, 340 aa, Oryza sativa
  Clone ID: PAT_MRT4530_66152C.1.pep
MTTFSFTRNESSSRWHPHRCQPYWRPPTWDMKGSNVCFTALEQILISRAPRRWFRNTSACARFASETNMSTSIQPACYNCCSYRPMDFVEGLPHVHNKSVILTVNDWFSNFSHFIPLGHSYTATSVVQAFFTEVVQIYLMPNSIVSNRDLVLTSTFWQELFRLAKAASLPGFSWGKLSPKFYGPYKLLAREGDVAYHLQLSTDTRIHDVFHVGVLKPFHGAPQVTNPSLPAINNGRVLPVPYKVSVYENTVMSFRTVHSVGVCQGYGYHITNSSRLNLGRTHHIPCPRRKQPADIRGVPDKERQPEFYMETTRTTRIVSILVFLVLLGQEDTYGYKYKTP

SEQ ID NO: 167553 - protein, 66 aa, Oryza sativa
  Clone ID: PAT_MRT4530_66153C.1.pep
HASAHASGTARVKKDPRPGMLSYHAKIGREMNTLAKMKTHPAMMLYYATEHLSQRCIQTIEAHHIQ

SEQ ID NO: 167554 - protein, 133 aa, Oryza sativa
  Clone ID: PAT_MRT4530_66154C.1.pep
MVERPRRRRPSVFPSDAPPGKWSPSEGVREEAGTASVKACFGRLEEVALAAYFGGGKEEEVREWIRLDETKLVARELGRQRSDDLADYLYVVERRLPKVVVKAVVDLVTATGWAVAVDRHGTATVAARLGAQQ

SEQ ID NO: 167555 - protein, 97 aa, Oryza sativa
  Clone ID: PAT_MRT4530_66155C.1.pep
ETFFFFLQTSAWWIPDCVGEAYEPASAARPALCSMMTSVVPKDESHGYEDSVARMRDSRARIETELSSCWDGTLNLLALHLGPMSSAPECKVSSLGT

SEQ ID NO: 167556 - protein, 319 aa, Oryza sativa
  Clone ID: PAT_MRT4530_66156C.1.pep
MEGVVDGSGAQLVVAELVRVQGLLRQLEAHLSAPCSVELCRGLVAQIVALTDRSIGIATRSFSSASGGGAHFADTAPPMPALTSCTPSPLSDGSDHQPFRTTNAKKRKTTARWTSQVRVSAAGGAEGPADDGHSWRKYGQKDILGAKHPRGYYRCTHRNTQGCTATKQVQRTDDDASLFDVVYHGEHTCRPGAASAAAAKRPHAQTLLQSLSASLTVNTDTNTPLTPENRAPAPPLQQQQQQQSVSASPVASDSYGLGGAGYGDWRCCDGDLQEVVSALATVTSAPDHAAMDAADFMSYCFDFDPAVYGGIVGTPSFFL

SEQ ID NO: 167557 - protein, 133 aa, Oryza sativa
  unsure (1)..(133): unsure at all Xaa locations
  Clone ID: PAT_MRT4530_66157C.1.pep
FWLIAHNRGHGYSNSFTLARGAQLYPQDTIHRHVTMXAGHVTMSSDCDKTFHITPSDQTHHTSGFXPRPQQAAGSPLSCLGKSESRIGHRRAHPNSITLTLAWIRQPAESYTSSQAVTHSRLWQALYVFQCIP

SEQ ID NO: 167558 - protein, 78 aa, Oryza sativa
  Clone ID: PAT_MRT4530_66158C.1.pep
METMRKFFPAIAVLLLLVVATEALAPAQSSVRPCETKSLRFEGFCMVEDNCANVCRTEGFVDGRCSTFVRNCICIKPC

SEQ ID NO: 167559 - protein, 78 aa, Oryza sativa; identical to SEQ ID NO: 167558
  Clone ID: PAT_MRT4530_66159C.1.pep

SEQ ID NO: 167560 - protein, 127 aa, Oryza sativa
  unsure (1)..(127): unsure at all Xaa locations
  Clone ID: PAT_MRT4530_6615C.1.pep
KGFKNPFFRSAKKNMGFFLAEFEKITKKLGIPKGVFPKIEEELXLEIPKSELPEFKKECFXPMGVPLKRGGFKAGEMPYVKKLAIRNFLWAINFSRLFERLGPSIRVFFSSATRPCKHPKEGYFCFL

SEQ ID NO: 167561 - protein, 126 aa, Oryza sativa
  unsure (1)..(126): unsure at all Xaa locations
  Clone ID: PAT_MRT4530_66160C.1.pep
PEPPRVEYITELGGSDDTSDLKVAGISPPSSPIRVGIPNRSXGGQILEALHSDPASSLSVEQEKSTKNLKAPTSTSALVKLSKGATGGPGKTVRTEKKETPQERLKRIMSKQLNKQIRKDTAAEIA

SEQ ID NO: 167562 - protein, 59 aa, Oryza sativa
  Clone ID: PAT_MRT4530_66162C.1.pep
RIFLLCSADYIFPFTFGIPPRKGSSIFPGLRSPSVVSYCLALKNNANYASRPLHSQIPK

SEQ ID NO: 167563 - protein, 608 aa, Oryza sativa
  unsure (1)..(608): unsure at all Xaa locations
  Clone ID: PAT_MRT4530_66163C.1.pep
KKLKKVRIKTSPANTEYKIVGXLSERNCYEQMFTLKQRNGDGEPEGVEVSVYEYFVKNRGIELRYSGDFPCINVGKPKRPTYFPIELCSLVPLQRYTKALSTLQRSSLVEKSRQKPEERMSVLSDVLKRSNYDSEPMLNSCGISIARGFTQVAGRVLQAPKLKAGNGEDLFARNGRWNFNNKRLIKASSIEKWAVVNFSARCNIRDLVRDIIKCGGMKGIKVEDPFDVIEEDPSMRRAPAARRVDGMIDKMQKKLPGQPKFLLCVLAERKNSDIYGPWKRKCLAEFGIITQCVAPTRVNDQYITNVLLKINAKLGGLNSLLQIETSPSIPLVSKVPTIILGMDVSHGSPGQSDIPSIAAVVSSREWPLVSKYRASVRSQSPKLEMIDGLFKPQGAQEDDGLIRELLVDFYTSTGKRKPDQVIIFRDGVSESQFTQVLNIELDQIIEACKFLDENWSPKFTLIVAQKNHHTKFFVPGSQNNVPPGTVVDNAVCHPRNNDFYMCAHAGMIGTTRPTHYHILHDEIGFSADDLQELVHSLSYVYQRSTTAISVVAPICYAHLAAAQVSQFIKFDEMSETSSSHGGHTSAGSAPVPELPRLHNKVRSSMFFC

SEQ ID NO: 167564 - protein, 67 aa, Oryza sativa
  Clone ID: PAT_MRT4530_66164C.1.pep
TSSLLASLSSPKCRSSLVLFVGVTITSLALPICQLPAGGYPLSQAGEHPGDVLKSPRWSQAFVSGRK

SEQ ID NO: 167565 - protein, 78 aa, Oryza sativa
  Clone ID: PAT_MRT4530_66165C.1.pep
MKEIRISSAEWSINKKVIAFPRIKDAKKEERDDWKRKYSDLMMKKSLGIIHIGIIILKKKMDQISEIKFRILNGVQEG

SEQ ID NO: 167566 - protein, 108 aa, Oryza sativa
  Clone ID: PAT_MRT4530_66166C.1.pep
AKTQGETLKKERNGGSLLWFQTRGSEMKKKKRNFRKVWNPRDGSFSLKKEGRLKLGGFQVELSGGEVKGKGGGGGGPAPPGIGKGPMKKKKGPGGGFAKKKWRNPGSQ

SEQ ID NO: 167567 - protein, 484 aa, Oryza sativa
  Clone ID: PAT_MRT4530_66167C.1.pep
MATTTSLLSSCLCALLLAPLFSQGVDAWESRQGASRQCRFDRLQAFEPLRKVRSEAGDTEYFDERNEQFRCAGVFVIRRVIEPQGLVVPRYSNTPALAYIIQGKGYVGLTFPGCPATHQQQFQLFEQRQSDQAHKFRDEHQKIHEFRQGDVVALPASVAHWFYNGGDTPAVVVYVYDIKSFANQLEPRQKEFLLAGNNQRGQQIFEHSIFQHSGQNIFSGFNTEVLSEALGINTEASKRLQSQNDQRGDIIRVKHGLQLLKPTLTQRQEEHRQYQQVQYREGQYNGLDENFCTIKARVNIENPSRADYYNPRAGRITLLNNQKFPILNLIGMGAARVNLYQNALLSPFWNINAHSVVYIIQGSVRVQVANNQGRSVFNGVLHQGQLLIIPQNHAVIKKAEHNGCQYVAIKTISDPTVSWVAGKNSILRALPVDVIANAYRISRDEARRLKNNRADEIGPFTPRFPQKSQRGYQFLTEGLSLIGM

SEQ ID NO: 167568 - protein, 117 aa, Oryza sativa
  unsure (1)..(117): unsure at all Xaa locations
  Clone ID: PAT_MRT4530_66168C.1.pep
RGGEKVVRRRNFLAAILGDGGRHAHNNDVGGGNDDVSAKDPPRRSTSQLSSIVQHKRRPDANSAVESPQPPLDEAPNSPEGSSTSSWRFPFPLPARQAGXHRRRNTGMGTSGDGISE

SEQ ID NO: 167569 - protein, 161 aa, Oryza sativa
  Clone ID: PAT_MRT4530_66169C.1.pep
MEAAYSAPSTSSTYSFHFSMAQAVLTISLNVIAIGLSALVKSSSSSSSSSSSRRRAAAAPAVAPPAAVDLDTVLGLMGGAGGAAPSEEATLGEAAAAFRVFDRNGDGFIDAGELGSVLASLGFAAGAGHAECQRMIDAYDADKDGRVDFREFLKFMETAAA

SEQ ID NO: 167570 - protein, 510 aa, Oryza sativa
  Clone ID: PAT_MRT4530_6616C.1.pep
MSTGETLRAELSSRTPPFGLRLWIVIGISIWVVIFFILGFMCLWSIYRRKPKKSFDKIPVSQIPDVSKEIAVDEVREHAVVENFRVQESHAISVQEKHYEKDSGKMLAHLVRSKSSDADNLSQCSSVYQCDRAGSSYSGDEGSSGNARRHFSQYATVSASPLVGLPEFSHLGWGHWFTLRDLEHATNRFSKENVIGEGGYGVVYRGRLINGTDVAIKKLLNNMGQAEKEFRVEVEAIGHVRHKNLVRLLGYCVEGIHRMLVYEYVNNGNLEQWLHGAMRQHGVLTWEARMKVVLGIAKALAYLHEAIEPKVVHRDIKSSNILIDEEFNGKLSDFGLAKMLGAGKSHITTRVMGTFGYVAPEYANTGLLNEKSDVYSFGVLLLEAVTGRDPVDYGRPANEVHLVEWLKMMVGTRRSEEVVDPDMEVKPTIRALKRALLVALRCVDPDSEKRPTMGHVVRMLEAEDVPSREVDRRSRRGNTANADTESKTSSSEFEISGDRRDSGPSARFQL

SEQ ID NO: 167571 - protein, 56 aa, Oryza sativa
  Clone ID: PAT_MRT4530_66170C.1.pep
FGFLELFFFYSHKSQLEFKLLRSTFWGQQKAQIHHILPWRSTFVGMPTTEATIDSS

SEQ ID NO: 167572 - protein, 138 aa, Oryza sativa
  unsure (1)..(138): unsure at all Xaa locations
  Clone ID: PAT_MRT4530_66171C.1.pep
KLLDIDIRDKPRHXPSDAYEGWQEGSSAISDLAECGFEEEDYPTVDYELVIKEQHRLRPTGXRAITCQIRGLNLYXNPGLHLFYLNLAYTLVPTVPIPYKYRSRDLKSRYTSPVLRELGGPHRHGRGRRRRRPRLRAH

SEQ ID NO: 167573 - protein, 173 aa, Oryza sativa
  Clone ID: PAT_MRT4530_66172C.1.pep
MEAAYSAPSTSSTYSFHFSMAQAVLTISLNVIAIGLSALVKSSSSSSSSSSSRRRAAAAPAVAPPAAVDLDTVLGLMGGAGGAAPSVGFEEASALFEEEEATLGEAAAAFRVFDRNGDGFIDAGELGSVLASLGFAAGAGHAECQRMIDAYDADKDGRVDFREFLKFMETAAA

SEQ ID NO: 167574 - protein, 91 aa, Oryza sativa
  Clone ID: PAT_MRT4530_66173C.1.pep
KTPAGPGPPPWRGVERAPPRNGGGKMPFPPENPPPPPQIKNFRGGALGPPVSPGGGLCLRVPPLCEILGGAPPKKTPGPGVFRSKSHPMFF

SEQ ID NO: 167575 - protein, 71 aa, Oryza sativa
  unsure (1)..(71): unsure at all Xaa locations
  Clone ID: PAT_MRT4530_66174C.1.pep
GIHKQGQIAIGELPFSLRFSISIRAHLLCHGSMAQLLNLSTNPWHRPRLGRFXECRFDRLQAFEPLLKVRS

SEQ ID NO: 167576 - protein, 56 aa, Oryza sativa
  unsure (1)..(56): unsure at all Xaa locations
  Clone ID: PAT_MRT4530_66175C.1.pep
ASQTCLPRCQDADTTVPHTESGVHXLASSHTSXXXLRSLVATNLRSIIALVXXCLY

SEQ ID NO: 167577 - protein, 68 aa, Oryza sativa
  Clone ID: PAT_MRT4530_66176C.1.pep
MPIRNIAVGSHQEVYHPGALKAALAEFISTLIFVFAGQGSGMAFSKSPTLILTTLCVVTATANPLHIL

SEQ ID NO: 167578 - protein, 41 aa, Oryza sativa
  Clone ID: PAT_MRT4530_66177C.1.pep
MSGDQADIVGRDNSAFVKNVLDNGVCSTTTYSKENRASPQR

SEQ ID NO: 167579 - protein, 559 aa, Oryza sativa
  Clone ID: PAT_MRT4530_66178C.1.pep
MGKEKGKGKWKRPPTVKPPVMAASASDDDEIDAYMESEDDLEHPVFDLEGISENETDDSEGDEDGNMDKAAYDEWDDKFIAKLKRAERAVKQIAGGDDSMDEHEDDHKDKNSWGRGKNAYYDAGEQSGDDEDDYEEARRIQKEEESKLSMQDFGLEDGESDEEDRAIKASNHQVKVPDGEHSFETYVKMKEEFAVLSRDEKMGVLDSSAPELVGLLSELKDAHEELMAIGPVTNEVTAGQSKDKGKMQPLEVKRACLAAYCQAITFYLLMKAEGLSVQDHPVIARLVEIKSVVEKGVEVAELTKNDHSNKDHHEIAKRKGKDEHIGSQSLEMLKVRATLEERSDLQTLDDFDDEVLKNTQAIKPSKVLVAAAKSNKNKFVSGDDELPKRDDIGERRRKHELRVLARVGASTLEDDDLPEEDDHTEERPNQLSEENGSDDDIGPSESEDEFYKDVKRRRTEKLSSKEQKYSPNPVIESLEEETEGDGKRKISYQMEKNRGLTRSRNKKLKNPRKKYRVKHQTKLVKRGGQVRGVKKPSGPYGGEMSGINPNVSRSIRFKG

SEQ ID NO: 167580 - protein, 451 aa, Oryza sativa
  Clone ID: PAT_MRT4530_66179C.1.pep
MTDKEKQETLAKRREAYKLKKESMARANADELHCITFRGDQPGSLHTAHSEQEDPAVDPKVIQEKHTRERMRYRNMELNKKQVVIERIKDKRASRRNNPTDGEVIFDDDTDEESDMLDDQGWEEDQDIQIIDVVDAITESPSIPDLDKIVYSNLPQSTHMLKPMYHNIRSFGTDGSNPKRLELYFYDDDPTLEHRYRHCRPDLYEQDQKVISTITNILRGNPYSEQFRSLGQAENLEDYRVILNLDQWLDQRTGELGWHTDIPKFGVNLEDVLKARRNRKNNDNNDNNPDSCIRRHPNGEKDKGNNIKTLSRHAILGAEAPDLVIATATTKQERASSRGDPRSSDYRCKALDPDERLVGSRSGRETDRKYTTVAESNPCRCRGHSTPSTARAALWPRCMTRCRHEVKMGSQQGEKELGDGGLGDQQAWHGRTRRYARGGRWWEGIGGNRST

SEQ ID NO: 167581 - protein, 193 aa, Oryza sativa
  Clone ID: PAT_MRT4530_6617C.1.pep
MVAEREVNGNGVGEGRTTLIFTYGTLKRGFSNHPLLQDLIRSGDASFVGTYRTAAKYPLVCGPYKVPFLLNIPGSGHGVHGELYSVSTRGLERMDELEGTSRAHYERLPIKVVPAAEEEDDDGFDGEEEAAAGLTCAEAYYAHGNYAMELWKKNGKRGLRCYSQKETIGYVKRKDRPQHLTFLDHIRFFLSSN

SEQ ID NO: 167582 - protein, 41 aa, Oryza sativa
  Clone ID: PAT_MRT4530_66180C.1.pep
YLLILSMPPTWWSSRWLLLLAQVNTLLRPPPSTATVSSSSS

SEQ ID NO: 167583 - protein, 91 aa, Oryza sativa
  Clone ID: PAT_MRT4530_66181C.1.pep
PPGPRACSASTFHRWPPELPLPPPRSSGATVNGKERCPPPTSVCAATPLSSLPPFWALSCSSSVASVCAGWPPLRARRGGGEIGGELRYLP

SEQ ID NO: 167584 - protein, 155 aa, Oryza sativa
  Clone ID: PAT_MRT4530_66182C.1.pep
GRWLEMAGGSCDVCKEAPSKYKCPACRTPYCSVACFKNHKDKFCQKTIPLEEVSKSSLQEEILSDTTCPTQYPNTLHSAKSLEVEDPSWLVDKNGLRSLAESNEIRDALKDCKLQQMLLKIDGSAEPEKELEKLMEGQVFQRFTNKILDIVSPQQ

SEQ ID NO: 167585 - protein, 242 aa, Oryza sativa
  Clone ID: PAT_MRT4530_66183C.1.pep
MSIRFGYGQDQFVKSILVDRVIQDTHLYFRIATSMLLDLEIQNMDGVKITKSRPNFAMFGGLDKFHVVRCAERGVGVGCSTAQCKSETGVSPFGRSKHLLEAVESEQQLHERLADGAPPHDSASTSTFLAVACTTSPTRSPSTSPYPRRHWTRQEVRSQPDRIALTPVVKNWAKKSNLLNVARPGPSPERRQIQLRATLPESTGGYVALTGQSTLYGLLVTKRSIDRATSSCALRHQTRVHS

SEQ ID NO: 167586 - protein, 63 aa, Oryza sativa
  Clone ID: PAT_MRT4530_66184C.1.pep
MAGGSCDVCKEAPSKYKCSACRTPYCSVACFKNHKDKFCQKTIPLEEVSKSSLQEEICQENLC

SEQ ID NO: 167587 - protein, 822 aa, Oryza sativa
  Clone ID: PAT_MRT4530_66185C.1.pep
MSFLAPGRGRLLRVLPTRRHRLPPPQGSGGYAACFRRCKAHFLLDGVEDAVEGAAEPQQPPVSLAKSLASLTEESAVAAQRQRKPLLRMERKRLAELRIKKRVKAQYLNGKFHDLMANVVASTDTLEDAYDIVRLNSNIDMSSVRDDVCFATLAELLRTGEFDVRANVYAVVAKRRDGGRLVLPRLNLRIIQEAVRVVLEVVYRPHFSKISHGCRSGRGHQSALRFISNEIGIPDWCFTIPMHKEVDRNVLSKIICLIQEKIDDNQLVTFMQHMFDAEVINLVFGGFPKGHGLPQEGVLAPILMNIYLDSFDHEVFRICMRHEGLGSEAADVSDNQESNLRHWFRSQISGLKDREENSDNQTDYPLKTKLYACRYMDEIFVAVVGSRDIAEDIKSEMITYLRKTLFLEVDDRLYLMPVRSNSRGLQFAGSMVRVTTKESAALKAVHKLKEKVHLFASQKQEIWDAMNLRLGKKWLAYGLRRVKESEIKSLGLSTPLLDHIAQFRKDCMKTDHWFKTLLKVWMQDINAKREADESILLSKYIAEPSLPQDLKDAFNNFQKQAKDYISSETAATEALLSSLKNKESAITCTDGAVIKIHAPISYIHKCLNRYGLINLEGFPKHVSALVLQDDELIISWFAGIIQRWMRWFSEVDNFKELKLMLVECVRKSCIRTLSAKYRMYEKITEKRFELDDYGIPMAEDFEAIMAPLESSSSVCTDEALMYGISSSGLFVLTLSRVRVPSRQFDCFVMGCQSASLSMYVLHVKERQRFPGFRTGFSSSIHGSLDGRRVGLCTQHVKDLYLGHISLQSVDFGVLIDDSNKIP

SEQ ID NO: 167588 - protein, 1270 aa, Oryza sativa
  Clone ID: PAT_MRT4530_66186C.1.pep
MEPPPQAGPSPAVRVLSRTPPPPASSSPSPPPPAATPPSHDGVVAVGFVGGGGTARLADRILDAHVFSPGGSARTLAGGVRYHRDGEKRVVFLHLAPSPPTPLEGAGDLRELLFMFSVCHVIIFLQEGFRFDTQILKKFRLLQSSKHAIAPFVKSLVAPAVPSKVARSNTPTKPTHRASSISPPARRGGRHPSAISLMSGTGSHPCMLPGLCIPVVLFVFEDDITDAPGAPTSPDDTNDTSSNQASNTDGLPKPNMTSKGSSSVVMLARPAIRSDGTFSKKLHSSVEGQIRFLLKKCRTLVGLEPGHIVSRGVSNVSHLPLFSLDTSRVVALLDRSISKKREPLDIIAGLFEDSLTSKSSLDVSSLENNCHPATHEDVQFIKDFIFRQSDGLRGRGGHSSNTTAGPVSGVGMVAAAAAAAAASAASGKQMSAPDLPTFDTWLSISSSILSALFSGEDGLSSSQNMKASPTHTSSFPKNDQLPSAGSNAIQTALSCLEGNKGLNVKFSSSWCQRILPAAKEVYLKDLPAFYPTSMHEVQLQKALRSFHSMVKGPAVQVFSKKLKDECQAIWESGRQQCDAVSLTGRPCKHQRHGKSSPSDAALQHSSGYVFLHACACGRSRRLRDDPFDFEAANMTFNCFSNCEDLLPTLVLPRETNAGAFPVSSWRLVRLGGARYYKPTKGLLQAGFCSKEKYLLRWTISLGKGQGKHGTHATNKPFSTASNADPQAPPIVAGEVKSAVTQVTAEIKSMKLENSRKQPEVESMNNSSINFGKGLPNFTMKKPFAEVVAGHTARDSEFPALQQKRPLKPGNWKDERQVSGADQTNGRGHPALSQGPIADNESEKVSRDKSNGSAGGKPFLQIGSNIVPMVVGKETKEVNQSIQQFMVYVGFEHECSYGHRFLLSEKHLKEIDSSYLQFERSNLNNEAESKHGSQKLPQNASRLAATMDVTSGGKLNRPMDSSGRNSQQQLLKPRVDAETLQPSHWLSDPQNERKGELSLHYVTLDDGGEAFSLLNRNLPIYMHCPHCKSSDRKGNQDAKVAAAVSQLQRIFIASCLPSNASDHDQQGSFSLGCRVVLPPESFLTMRLPFVYGVETRDGNTAPLKYLEEQPELTAWLVGGTALQIVSVPALNFRIPASVMAHDVYMELPFALRNRSSLDKMNDAQWMHWSELVMQMGLVYPVNPMFVIDAGNWTCTLIGVSLYWRDERSRLAWQQPLLVAWRLENVETGRKRMNQSCLTSVKAQKESDEITVEPSLCDDACFFFTCKTTVST

SEQ ID NO: 167589 - protein, 151 aa, Oryza sativa
  unsure (1)..(151): unsure at all Xaa locations
  Clone ID: PAT_MRT4530_66187C.1.pep
TGMKKFKKKQNMIFGHIGVXGCIRGKISLRDSRAELLSITTNIGIGGCDVFHRNEKVQKAPKHDFWTYWSVLGAFVAKNHFVIRAANFCQLMPILPYIGTRGCDVFHRNEKVQKAPKHDFWTYWTELGAFVAKNHFMIRAANFCQLLPILV

SEQ ID NO: 167590 - protein, 165 aa, Oryza sativa
  unsure (1)..(165): unsure at all Xaa locations
  Clone ID: PAT_MRT4530_66188C.1.pep
MFLTGFKKFKKHPNRIFGHIGXIGCVRGKNSLRDSRGELFXINANTGTRGCDVFDRNEKVQKAPKHDFWTFWSVLGAFVAKTHFVICAANFCQLISILAYIEXHGCVVFDQIEKVQKASKHDFWTYWSVLGAFVAKTHFVIRAANFCQLMPLLAYIGTRGYDFFD

SEQ ID NO: 167591 - protein, 77 aa, Oryza sativa
  Clone ID: PAT_MRT4530_66189C.1.pep
SIKCGKKKLIAQGSAVAVAGRRRLVGPGSSPPTCRSRCGGCHPCRPVHVAIQPGRSFPLEYYPEAWRCKCGDKLFMP

SEQ ID NO: 167592 - protein, 458 aa, Oryza sativa
  unsure (1)..(458): unsure at all Xaa locations
  Clone ID: PAT_MRT4530_6618C.1.pep
MAAAPSITSPSLLPVASVAGLLGPPPIPAPPVFLLLLPLLLLLLLLLFPAPDLAVSAVAVAAAGGWYVVIQASVRTYHREFPKWLACAKVVAMLLSVLATYGFAGAGVHQRLGPAPHIAIIIPTAGPDLPRPHSSHFTLFLFSSLHHRHLSHRIPAEEERAVAAKGDMGSLSSLAAAAVFLSLLAVGHCAAADFNATDADADFAGNGVDFNSSDAAVYWGPWTKARATWYGQPNGAGPDDNGGACGFKHTNQYPFMSMTSCGNQPLFKDGKGCGSCYKIRCTKDQSCSGRSETVIITDMNYYPVAPFHFDLSGTAFGRLAKPGLNDKLRHSGIIDIEFTRVPCEFPGLKIXGFHVEEYSNPVYXFAVLVEYEDGDGDXVVQVDLMESKTAXHGPPTGDGGRRMRESWGSIWRLDTNHRLQAPFSIRIRNESGKTLVANNVIPANWRPNTFYRSFVQYS

SEQ ID NO: 167593 - protein, 145 aa, Oryza sativa
  unsure (1)..(145): unsure at all Xaa locations
  Clone ID: PAT_MRT4530_66190C.1.pep
MFFTKMQKFKKHQNMIFGHIAVXIGCVRGKKSLRDSRGELLSINANNGTRGCDVFDWNEKVQKAPKHDFWTYWRLLGAFVAKXHFVIRAANFCQLMSILAHVGAMFXNRNEKVQKARKQDCLTYWSVLGAFVARIHFVTWAANFC

SEQ ID NO: 167594 - protein, 96 aa, Oryza sativa
  Clone ID: PAT_MRT4530_66191C.1.pep
FISGVRSFLCCLPGCYRAPSWESWLPCRSRVEIPGVVKGAPPVRDQNAFGQGPGVCRFFMGPPPLAIARSLVPPKRRFGVGKFFHFSLAVWSVFLA

SEQ ID NO: 167595 - protein, 151 aa, Oryza sativa
  unsure (1)..(151): unsure at all Xaa locations
  Clone ID: PAT_MRT4530_66192C.1.pep
MFFTGMKKFKKHQNMIFGHIGVXGCIRGKKSLRDSRGELLSINANIAIGGCDVFHRNEKFQKAPKHDFWTYWSVLGAFVAKNHFVIRAANFCQLMPILXILAHVGAMFFTRNEKVQKSPKHDFWTYWTVWVRRGKISPRDSRGETIVIYCQ

SEQ ID NO: 167596 - protein, 118 aa, Oryza sativa
  Clone ID: PAT_MRT4530_66193C.1.pep
MGLSRDAMHIRRATGGTRSAWHQTRKSELGWPPAYTKLSSNKTAWRVRVRGRPVEWRALRLYTVSYLRCIVGVPPPVPIFICRPSLCISAILPRTSHFFNGVLFAPISSSLCFRLFLL

SEQ ID NO: 167597 - protein, 87 aa, Oryza sativa
  Clone ID: PAT_MRT4530_66194C.1.pep
RYVRVQVGKWMCNQISHALINFTNIIASMAMALRQLHKTINTLAHVTSCNTTHDSLRLSWRVERTRTQTQSSQSKAINYSTISVCPP

SEQ ID NO: 167598 - protein, 171 aa, Oryza sativa
  unsure (1)..(171): unsure at all Xaa locations
  Clone ID: PAT_MRT4530_66195C.1.pep
MFLTGLNKFKKHQNMNFGHIGVXIGCVRGKNSLRDSHDELLLINANIGISXSPHGCDVXFDRNEKVQKAPKHDFWTYWSVLSAFVAKTHFVIRAAIFCQLMSILAFIEXHGCDVFDRIEKVQKASKHDFWTYWSVLGEFVAKTHFVIRAANFCQLVQILAYIGPHECDVFD

SEQ ID NO: 167599 - protein, 150 aa, Oryza sativa
  unsure (1)..(150): unsure at all Xaa locations
  Clone ID: PAT_MRT4530_66196C.1.pep
MFLTGLNKFKKQQNKISGHIGVXIGCVRGKNSLRDSRDELLSINANIGVYXSLHGCDVFDQNEKAQKAPKHEFWTYWSVLGAFVAKTHFVIRAGXFCQLIPILAYHGCDVFDRNEKVQKAPKQNFWTNWSVLGAFVAKTHFVIRAGTFVN

SEQ ID NO: 167600 - protein, 102 aa, Oryza sativa
  Clone ID: PAT_MRT4530_66197C.1.pep
EKEDDEDCSTLPGPTYLRLAQIGPREMFLPPTLSSSSCATLAISFRPILLISTRHTLLHLLWIDMLFSDQFPCIITFVTPLFCTTMYNYYCYSVMYQVSVTS

SEQ ID NO: 167601 - protein, 162 aa, Oryza sativa
  unsure (1)..(162): unsure at all Xaa locations
  Clone ID: PAT_MRT4530_66198C.1.pep
MFLTGIKKFKKSQNMIFGHIGCIGCVRGKNSLRDSRGELLSINANIGTRGCDVFCCNQKVQKEPKHDFWTYWSVLGAFAAKTHFVIRAAIFCXLMPILAHEGAKFSTXNQKVEKEPKHDFWTYWTVSGVFVAKTHFVIHVANFYQIMSILAYIGPYGCDVFD

SEQ ID NO: 167602 - protein, 64 aa, Oryza sativa
  Clone ID: PAT_MRT4530_66199C.1.pep
MAWTPAAPTPRSEAALAGELRGRRTTRHHAGRQALGQCSGLRLGGAFFRWYIELEEFFLCSRLF

SEQ ID NO: 167603 - protein, 46 aa, Oryza sativa
  Clone ID: PAT_MRT4530_6619C.1.pep
SYTHTYVQSEQGGHFRKQCGYSCSKLSPLLLLYAANATRHEHLLDL

SEQ ID NO: 167604 - protein, 295 aa, Oryza sativa
  Clone ID: PAT_MRT4530_661C.1.pep
MSLASYFSISPPLPFPLPSSSPLHGRDRLSPWIRRGRDRHGTMTPAARSSPSPAGGASAARGAGWVVMVARRLSVWGARAGGRGAGEVGGGGGSGGGRREASVVGVGPTREPSGRNWGCRVGPTVGVRVAYRAGAGGGGGGPRGFALKLRQLQLSTPTYLELELCQTRQRRTSVVGVGGSGRRRVGGTAHGRTGGASGDDERTAHGRRLAGMTRGRGQGGARSSAIAVELARPSPRRVQGGDWRGRRAGGDRAAARGRRKGGDRAADGGWRRVAGEGRRVAGEGRRAGDGIGDFF

SEQ ID NO: 167605 - protein, 153 aa, Oryza sativa
  unsure (1)..(153): unsure at all Xaa locations
  Clone ID: PAT_MRT4530_66200C.1.pep
TGIKKFKKHQNMIFGYIGVXGCIRGKTSLRDSRGELLSITANIGSRGSDVLDRNEKVQKAPKHDFWTYWSLLGAFVVKNHFVIRAANFCQLMPILAQVGAMFFXRNEKVQKPPKHDFWTYLSVLGAFVGKNYFVIRATNFHQFLAILAHVGAM

SEQ ID NO: 167606 - protein, 108 aa, Oryza sativa
  Clone ID: PAT_MRT4530_66201C.1.pep
FVPSSLLLPIHFLYPFPIQYWFFALFPPDLSSSPSPSPTISWTRSYLSVPRFHRHCSSATKVFSSGGRDWDWELARPCCVVVQGVNARPWWCLVPAFSAPNLVLAAPT

SEQ ID NO: 167607 - protein, 145 aa, Oryza sativa
  unsure (1)..(145): unsure at all Xaa locations
  Clone ID: PAT_MRT4530_66202C.1.pep
MFLTGIKKFKKHQNMIFGHIGXVGCIRGKISLPDSRGELLSITANIGIGGCDVFHRNEKVQKAPKHDFWTYWSVLGAFVAKYHFVIRALNFCQLLPILAHVVAMFXDRNKKVQKAPKHDFWTYWSVYKKRGRTTIGSCSNPRTRP

SEQ ID NO: 167608 - protein, 361 aa, Oryza sativa
  Clone ID: PAT_MRT4530_66203C.1.pep
MANWVRVASTASWERRPCRRHLAAERREHDEELDRDDQILMRRKQPGDAPASAAASEADLAQLSIAIAAGEDLGPFVRRTFACGAPRAAARLALDRSLLARRRRAQGLLLGLPRDGDERGEEDQQQMERFYALVANVQALRAMFKEAAGAVPEEAEGGAVAAGVREEDKGEVTEGKQSRHRHRRRRAWEVDDDASHAALLSSSAPLLASLKSFLAARGLAGNLSSALVFVAGSGRAGGGDRAEAERFLRAVAPRPPLSVPAAIGPRLPPTESAPRLPPLRTGRRPRTLRRRAQDTARCGRRRRAQAATPGALRSRRAQGAAAESRRRSRPPSATALRRTEAGSHRGRNRYLREEAGKKKQK

SEQ ID NO: 167609 - protein, 164 aa, Oryza sativa
  unsure (1)..(164): unsure at all Xaa locations
  Clone ID: PAT_MRT4530_66204C.1.pep
MFLTGIKKFRKRQNMIIGHIXCIGCVRGKNSLRDSRGELLSINANVGIRGCDIFDRNQKVQKAPKQDFWTYWSVLGAFVAKTHFVIRAANFCQLMPILAHEGAMCAVFDRNEKVQKAPKHDFWTYWSVLGAFVAKTHFMIRAANFCQLVPILVYIGLHRCAVFD

SEQ ID NO: 167610 - protein, 38 aa, Oryza sativa
  Clone ID: PAT_MRT4530_66205C.1.pep
ASDDGPLSVSSAIHINSSSLELGTCTEEAPVMRRKQTR

SEQ ID NO: 167611 - protein, 427 aa, Oryza sativa
  Clone ID: PAT_MRT4530_66206C.1.pep
MGLISGMVMGMVVGVALMAGWSRVMQRRSRKRIAKAADIKVLGSLGRDDLKKLCGDNFPEWISFPQYEQMIFWVIVSAVGWKWYKKELCKFFGDIEVKWLNKHLSKLWPFVDQILVLLGATKLLVPFQAATAVVKESVEPLLDDYRPPGIKSLKFSKFSLGTVSPKIEGIRIQNIQPGQIIMDIDLRWGGDPSIILAVDAVVASLPIQLKDLQVYTIVRVVFQLSEEIPCISAVVVALLAEPEPKIQYTLKAIGGSLTAVPGLSDMIDDTVNSIVSDMLKWPHRLVVPLGVNVDTSELELKPQGRLTVTVVKATSLKNKELIGKSDPYVILYVRPMFKVKTKVIDDNLNPEWNETFPLIVEDKETQSVIFEVYDEDRLQQDKKLGVAKLAVNSLQPEATSEITLKLQQSLDSLKIKDTKDRGTLHLQ

SEQ ID NO: 167612 - protein, 153 aa, Oryza sativa
  Clone ID: PAT_MRT4530_66207C.1.pep
MASASAKTMVRAVMVAAVLLQCCGVLLAARPLKGDVVAAAGGGGGGGGEMFVMQILKTSTPTTPLNSIMASSSAMVVRVVVVGVLLMQCCNAIMAARLLEGDLFGSSWLQGEDGVAAGELILQVLKVVPSGPPGNDCHQGGAGSGGQCYQPPK

SEQ ID NO: 167613 - protein, 114 aa, Oryza sativa
  Clone ID: PAT_MRT4530_66208C.1.pep
MSVWDAITGRKNKPAQSPPPAPAPTATEPHHVSSHFDPSAAQGVDAFLGTSSFADPSVLHPLAGLNKETLDYISLEDGAIATPGSQAGLPSRGFTDDLCYGTGITYLSGLTIGG

SEQ ID NO: 167614 - protein, 316 aa, Oryza sativa
  unsure (1)..(316): unsure at all Xaa locations
  Clone ID: PAT_MRT4530_66209C.1.pep
WCAPPRRRRATTTSGSTARRRARTPRRCPARVAASPRPRXTAPPXRLTRSRPSWRRSSSRRRRASPTPTRSTSSSTSAARRPAPGAPPPSTRTSPRGATGVAAMTARMRRRRTTTTTRGSGRGRRTPLTPRPCRSIGRRGPGRRRPGSVAAAAARRGIRTSNSARSSTRPRRXNLTTADELFEKGKXAAEGAAAEDGRRALRQGQGPAAEAASWAARRRERRVVAAVADVERRRHVVASPTEQGRLRXTSTRSPLLCWRRPRRRRRRRRRSASPPQAPRPRKPTSSPPVRPPRAPGGGGGGSATSSCSGARRNTAA

SEQ ID NO: 167615 - protein, 50 aa, Oryza sativa
  unsure (1)..(50): unsure at all Xaa locations
  Clone ID: PAT_MRT4530_6620C.1.pep
MXXXXXXXPIPVVIEAYGRGHRGRRGVEHHACPTIPDGDEFCTIRFPVNG

SEQ ID NO: 167616 - protein, 45 aa, Oryza sativa
  Clone ID: PAT_MRT4530_66210C.1.pep
KARKVDADFPATPKAEHVVDMEKEVWASFYGGGFWRSPSQREDRR

SEQ ID NO: 167617 - protein, 92 aa, Oryza sativa
  Clone ID: PAT_MRT4530_66211C.1.pep
YDGRSGSSQDNPKRLESGEEVLQDRRSRRINDARRHHDGEDRNSRRKDEYLRGHQTTMWKDHIWPPRSRDDTYHPLVPTTRPRDMRGRIMIG

SEQ ID NO: 167618 - protein, 258 aa, Oryza sativa
  Clone ID: PAT_MRT4530_66212C.1.pep
SLSKNCGDVVYQQIIERDILSEMVKIVKKKPDLNVREKILSLIDTWQVAFGGASGRYPQYHAAYQELRNAGVDFPPREENTVPLFTPPQTQPLRHVRLYPPPGQSYEDAAIQASLQSSAPSAPALSLSEIQSARGIVDVLDEMLNALDHRHPEGVREEVIVDLVGQCRSYQGRVMDLVSNTGDESLLFQALGLNDELQRVLQRHDDIAKGVPPGSGPAPAAANVNRGTAPPRPTGVSFPLLNVHPEDDEPEDERLCSF

SEQ ID NO: 167619 - protein, 500 aa, Oryza sativa
  Clone ID: PAT_MRT4530_66213C.1.pep
MNKISCPCVQNAGVDFPPREENTVPLFTPPQTQPLRQPHLYPPPGQSYEDAAIQASLQSSAPSAPALRQQKAVSKLLLDDLCASKAPTLRTCRSAQLESTERSLSEIQSARGIVDVLDEMLNALDHRHPEGVREEVIVDLVGQCRSYQGRVMDLVSNTGDESLLFQALGLNDELQRVLQRHDDIAKGVPPGSGPAPAAANVNRGTAPPRPTGVSFSPLLNVHHEDDEPEDEFSVLSRRSARDGTAAQGNLPSAPKSERPYPSPLLPPPPSSKRPVFTEASSVDYLSGDSYKTEKVSDDFINPTAPANIPAPSHSKTETNPPPSYDSRSESVSDDFINPTAAPSFSMPSRPMSESNRPAVNRQESLPDDDFINPTAIPGFSSSSNANKYGDSGEDLPKAPWEAQAPGSLPPPPARYGQRQQYFEQQHGLPSGNNGAGYNGLVSQTEGLSLNQRNTENERGSSVPTASRQTKPEDSLFKDLVDFAKNKPSSPSKPANSRRTR

SEQ ID NO: 167620 - protein, 80 aa, Oryza sativa
  unsure (1)..(80): unsure at all Xaa locations
  Clone ID: PAT_MRT4530_66214C.1.pep
MEGIASGKNKRIYKARMGTKKTTEKAYAKKDWYYLKVPXEFNGRNIRKTLEAITHGTENDCEGLKHTASAVILACLHTDY

SEQ ID NO: 167621 - protein, 67 aa, Oryza sativa
  unsure (1)..(67): unsure at all Xaa locations
  Clone ID: PAT_MRT4530_66215C.1.pep
LRLHRRLASVAAEWCLRRRLASVAAEWCLXPPFMGVHVFADRLAFAAADWCFCLYGWRTSPLLMGFI

SEQ ID NO: 167622 - protein, 152 aa, Oryza sativa
  Clone ID: PAT_MRT4530_66216C.1.pep
TARNQQRCCGGDQSAPSKFAFVVDVVRQQESCERKGSAAPLTIVVRPTLVSPRSGHCGTSRSWSKIARTHCMPELPDHGRRDVGGGGGAGYTGSGGKAHGGDTPLLDHRCSPTWVELGAGGCRRVVAPGSGWLFGGEQRWRPEHHPRAEFLQ

SEQ ID NO: 167623 - protein, 95 aa, Oryza sativa
  Clone ID: PAT_MRT4530_66217C.1.pep
MGGKKPFNRHEQCRASVGKKTTIGSRKRGQRHRRAGSRRAGRGPVRGEVGCSDWITAAGGEGSMGWRPGAMLAKKACRLAVLIQEATVGGGQGRI

SEQ ID NO: 167624 - protein, 157 aa, Oryza sativa
  unsure (1)..(157): unsure at all Xaa locations
  Clone ID: PAT_MRT4530_66218C.1.pep
MFFTGMKKFKKHQNMIFEHIGVXGCIRGKKSLRDSRGELLSINANTAXIGTRGCDVFHRNEKVQKAPKHDFWKYWSVLGAFVAKNHFVIRAANFCQLMSILPYIGTRGCVVFQRNEKVQKAPKHDFWTYWCVLGAFVAKTHFVIRAANFCEVMPILP

SEQ ID NO: 167625 - protein, 190 aa, Oryza sativa
  Clone ID: PAT_MRT4530_66219C.1.pep
MAPPPAAAAAVDGVGVGVGAHSVFVYGSLMQDEVVRTIIKRVPPSSPALLPNYHRFNIKGRIYPAILPVQSKKVAGKVITGVTDAELQILDEFEDVEYVRTRVEISLTDTSETMLADTYVWADAEDPNLYGEWDFEEWKRLHMKDFLAMTHGFMDGLEQPESKSRVETYQSFMQEIQQPGTTTTTTQVEI

SEQ ID NO: 167626 - protein, 110 aa, Oryza sativa
  Clone ID: PAT_MRT4530_6621C.1.pep
MGRPPAKLPQRPATGAVETRGGGGSATARREVDDGNSEAAGSARGGNGAGRGGAGLGWNTLTPAPQRKSGEKHHPSPPDPTGSLRITNGLILIRAAIAGILRALSPLNRG

SEQ ID NO: 167627 - protein, 161 aa, Oryza sativa
  unsure (1)..(161): unsure at all Xaa locations
  Clone ID: PAT_MRT4530_66220C.1.pep
MFLTGMKKFKKRENMIFGHIGXIGCVRGENSLRDSCGELLSINANIGTRGCDVFFRNQKVQKSPKHDFWTYWSVLGAFVAKTHFVIRAANFYQLMPILAHEGAMFSXRNQKVQKAPKHDFWTYWTESGVYVAKTHYVIRVGNFCQIMPILAYIVTHGCDVN

SEQ ID NO: 167628 - protein, 324 aa, Oryza sativa
  Clone ID: PAT_MRT4530_66221C.1.pep
MGAGIRILVVMLAVAAAGSGVVAQLRRDYYASVCPDVETIVRDAVTKKVQETSVAVGATVRLFFHDCFVEGCDASVIVVSSGNNTAEKDHPNNLSLAGDGFDTVIKARAAVDAVPQCTNQVSCADILVMATRDVIALAGGPSYAVELGRLDGLSSTASSVDGKLPPPSFNLDQLTSLFAANNLSQTDMIALSAAHTVGFAHCGTFASRIQPSAVDPTMDAGYASQLQAACPAGVDPNIALELDPVTPRAFDNQYFVNLQKGMGLFTSDQVLYSDDRSRPTVDAWAANSSDFELAFVAAMTNLGRVGVKTDPSQGNIRRDCAMLI

SEQ ID NO: 167629 - protein, 156 aa, Oryza sativa
  unsure (1)..(156): unsure at all Xaa locations
  Clone ID: PAT_MRT4530_66222C.1.pep
TGMKKFKKHQNKIFGHIGVXIGCVHGKKSLRDSHGEILSITANIGTGGCDVFHRNXKVQKALKHDFWTYWSVLGAFVAKNHIVIRAANFYHLLPIGTRGCDVLDQNEKVQNAPKHDFWTYWSVLGAFVAKNNFVIRAANFCQLMLILAYIGTGLCD

SEQ ID NO: 167630 - protein, 81 aa, Oryza sativa
  Clone ID: PAT_MRT4530_66223C.1.pep
YREPHIMHQFSDEKAECTQIRHWAQSGFSFRLVWIRSWTGCHSTRFAMGRLLLFSVSTTWQLVSLRLSNSLKIEILLPPIN

SEQ ID NO: 167631 - protein, 163 aa, Oryza sativa
  unsure (1)..(163): unsure at all Xaa locations
  Clone ID: PAT_MRT4530_66224C.1.pep
MFSIGIKKFKKHQNMIFGHIGVXIGWIHGKNSLRDSRGELLSINANIGTRGCDVFDRNQKVQKTPKHDFWTYWSVLGAYMAKTHFVIRAANFYQLMPMLAHEGAMFXDRNQKVQKTPKHDFWTYWSVSGVFVAKTHFVIRAANFCHIMSILVYFGPHGCDVFD

SEQ ID NO: 167632 - protein, 110 aa, Oryza sativa
  Clone ID: PAT_MRT4530_66225C.1.pep
NQPLLAPRGDLGDQDNLAGQRLPHSPVISSRPLIWTSVNGRITTHTHGVARFTSYTTRDGPNHCPAMHARPFLFVVQACLRRSSIEQRVERLQQRRRAVDTLASAAKPER

SEQ ID NO: 167633 - protein, 163 aa, Oryza sativa
  unsure (1)..(163): unsure at all Xaa locations
  Clone ID: PAT_MRT4530_66226C.1.pep
MFLTGMKMFKSHQNMIFGHIGVXIGCVRSKNSLRDSRDELLSMNANIGPHGCDVFDRNGNVQKAPKHDFWIYWSALGAFVAKTHLVIRAATFCQLMLILAYFGPHGCDVFDRNENVQKAPKHDFWTYWSVFGAFVAKTHYVIHGEHFSTNANIGINWLRRVQC

SEQ ID NO: 167634 - protein, 176 aa, Oryza sativa
  unsure (1)..(176): unsure at all Xaa locations
  Clone ID: PAT_MRT4530_66227C.1.pep
MTVLSTIHCDPKDSFPSLSRYGFLRTSTFPPLRKWLHQHKNHHDATATRCGSGNGTAAHGGNVTARGARAEMTTARRGSGRKAARHVAAXAGREAAGARREAMGRRAARQRHGSRRRWNAHAAMGWRQRRRGXAAMATVARRQAMMATARGGSGREAXRRVVTVATERGGKRRSWV

SEQ ID NO: 167635 - protein, 101 aa, Oryza sativa
  unsure (1)..(101): unsure at all Xaa locations
  Clone ID: PAT_MRT4530_66228C.1.pep
MRSHWRGLTLLTAALGLXSFHPDDNYHATVSCHDMEDVGVNTSAVDFLNPSCKRLDHVLLSSIKKSVCHNNDNNHDVVMVHVRTRIARAFPATISVMGKGR

SEQ ID NO: 167636 - protein, 144 aa, Oryza sativa
  unsure (1)..(144): unsure at all Xaa locations
  Clone ID: PAT_MRT4530_66229C.1.pep
TGMKKFKKHQNMIFGHIGVXGCIRGKISLRDSRGKLLSITANIGIGGCDVFHRNEKVQQAPKHDFWTYWSVLGAFVAKSHFVIRAGNFCQLMPILPYIGTRVGDAFHRNEKVXKAPKHDFWTYWSVVGAFVVKNHFVIRAANFL

SEQ ID NO: 167637 - protein, 102 aa, Oryza sativa
  Clone ID: PAT_MRT4530_6622C.1.pep
NWTGDSCGCMGKLFLSLLYTYTRWSSRAGPSWRLWCDGDLMVFLSFREKLRWMTDELAVYSTCWRVAEAVLFSCHMHASTWTAWNVATNGVRDESVVILSSC

SEQ ID NO: 167638 - protein, 161 aa, Oryza sativa
  unsure (1)..(161): unsure at all Xaa locations
  Clone ID: PAT_MRT4530_66230C.1.pep
MPILAHEGAMFLTGIKKFKKRQNLIFRHIGVXIGCVRGKNSHRDSHGELLSINANVGTRGCDVFDRNQKVQKTPKHDFWTYWSILGAFIAKTHIVIRAANFCQLMPMLAREGVMFXDRNQKVQKTPKHDFWIYWSVXVRSWQKSLRDSSDEIFENISTRRS

SEQ ID NO: 167639 - protein, 157 aa, Oryza sativa
  unsure (1)..(157): unsure at all Xaa locations
  Clone ID: PAT_MRT4530_66231C.1.pep
DPTGAVFLTALNKFKKHPNMNFGHIGVXLGSVRGKNSLRESRGYSCQLIPILAYVETXGCDIFDRNEKVQKAPKHEFWTYWSVLGAFVAKTHFVIRAGXFCQLIPILAYVEXHGCDVFDRNEKVQKAPKQDFWTYWSVLGAFVAKTHFVIRAGTFVN

SEQ ID NO: 167640 - protein, 38 aa, Oryza sativa
  Clone ID: PAT_MRT4530_66232C.1.pep
KDLKTLSVIISLLEFCLFRIPKGRSLTLESIIINLWGS

SEQ ID NO: 167641 - protein, 43 aa, Oryza sativa
  Clone ID: PAT_MRT4530_66233C.1.pep
VKHPGIMLDLGRRLKKGLSLRRQYGATNVWGTNIYFTRSRTRG

SEQ ID NO: 167642 - protein, 60 aa, Oryza sativa
  Clone ID: PAT_MRT4530_66234C.1.pep
SPKVLLLHTKINQSTVLRKYLHAFHSISHLAKLPLITVLIKNLISLANLGISLYSKGQQK

SEQ ID NO: 167643 - protein, 162 aa, Oryza sativa
  unsure (1)..(162): unsure at all Xaa locations
  Clone ID: PAT_MRT4530_66235C.1.pep
MFLTGLKKFKKHQNMIFGHIGVXGFVRGKNTLRDSCGELLSISANIGVXEPPTGAMFFDRNKKFQKAPKHDFWTYWSVLGAFVAKTHFVIRATNFCQXTPTGAMFFDRNEKVQKAPEHDFWTYWSVLGAFVVKTHFVIRAANFCQLMPILAYVEPPGLRCFL

SEQ ID NO: 167644 - protein, 327 aa, Oryza sativa
  Clone ID: PAT_MRT4530_66236C.1.pep
MAIIGRRQQQGVAAAAATLVALMAVVVAAAAEAQPSPGVYPSRMFRAREFGRDFRSLWGAEHQQQEAAAPETGVTVWLDRRSGSGFKSRRAYRSGYFGAWVRLQRGYTAGVITAFYLSNGEAHPGWHDEVDMEFLGTTPGKPYTLQTNVFSLGSGDPPRSLGREIKFHLWFDPTADFHHYAILWTSDHIIFLVDDVPIRRYGRRSAGGAAGFPARPMWVYGSIWDASSWATEDGRYRADYSYQPFVARFSAFLLRGCSPHAPRTCAAPVAGDLTAAQLAAMRWAQRFHMVYNYCYDPKRDHSLTPECRTHLHPSSSSSNSSSSSYHG

SEQ ID NO: 167645 - protein, 163 aa, Oryza sativa
  unsure (1)..(163): unsure at all Xaa locations
  Clone ID: PAT_MRT4530_66237C.1.pep
MFLTGMKKFKKHQNMIFGHIGVXGCVRGKNSLRHTRGELLSINANIGPHGCEVFDPNGKVQKAPKHYFWTYCSVLGAFVAKTHFVIRAANFCQSMLILAHTGAMFXDRNEKVQNAPKHDCWTYWSVLGAFVEKTHFVIPAANISQLMPILAYIGSHGCDVFGR

SEQ ID NO: 167646 - protein, 53 aa, Oryza sativa
  Clone ID: PAT_MRT4530_66238C.1.pep
LHNSLYSGSGACHPIRPTDRGCEDTKQDQGSRVHLVVPVQLTHHCTREHSYID

SEQ ID NO: 167647 - protein, 416 aa, Oryza sativa
  unsure (1)..(416): unsure at all Xaa locations
  Clone ID: PAT_MRT4530_66239C.1.pep
MAAVAVAVGVASGEEEAAAARCARRPRPRPHSVTISEFGAVGDGETVNTLPFQNAIFYXRSFADKGGAQLYVPRGRWLTGSFNLTSHLTIFLEKDAVIIGAKEVSEWPIVEPLPSYGQGIDLPGARHRSLINGHNVTDVVITGNNGIIDGQGLTWWNWFRSNKLNYSRPHLVEFVDSEDIVISNLTLLNSPAWDSCSNMCIEDSSISVAHDAISLKSGWDNYGITIGRPASDIHISRVDLQASLGAALAFGSEMSGGISDIHVDHLNIHGSSRGILFKTAPGRGGYIRDVVISDVQMEDVNVAIKFTGDWSTHPDNHFDPSALPMINRITLKNMVGTNISVAGVLSGINGDPFTNICLSNISFSLADSTQSSSWSCSNISGYSELVFPEPCPDLHHSSSNSSICFSLLTYHALAAA

SEQ ID NO: 167648 - protein, 102 aa, Oryza sativa
  Clone ID: PAT_MRT4530_6623C.1.pep
IDLYRHLSSTPLGSSADGEDALDSMRASGGSAEAQFRVLRLNLAMASSEQDRHSTLDDTKVCHHPAKHREKQRCMLQHGCSPMRQSAGIIHGRHGISGHSWL

SEQ ID NO: 167649 - protein, 90 aa, Oryza sativa
  unsure (1)..(90): unsure at all Xaa locations
  Clone ID: PAT_MRT4530_66240C.1.pep
FRVDPFSAQRPRPRGGGADTTWLVDAVGRGAVILTGCIGERXLVLERGGARGTAVRRLVARSTNPAMTKTLGVRAKVTGSASALVLSPGC

SEQ ID NO: 167650 - protein, 81 aa, Oryza sativa
  Clone ID: PAT_MRT4530_66241C.1.pep
AKLFLLGGLHRSKLSPLKMATHLIQMPIFNQIDGIYTKTIETSVQLSAMVKLDCCTLSTDCFVEGVCYVPGCFPFEILSLN

SEQ ID NO: 167651 - protein, 77 aa, Oryza sativa
  unsure (1)..(77): unsure at all Xaa locations
  Clone ID: PAT_MRT4530_66242C.1.pep
ALGSGXSSVWAWSLXSXSTXXSVLXFVGVGEVVVVXGGEVDAGAXLEGGEEXGGXXAPTQLAQLSMAAAADRSXRLG

SEQ ID NO: 167652 - protein, 104 aa, Oryza sativa
  unsure (1)..(104): unsure at all Xaa locations
  Clone ID: PAT_MRT4530_66243C.1.pep
RRGHVGEHEQPRARRRRGRWGSSPPRXASTRRTSKASSRRPSSTPPPRRATPAATTTAAATAAMPRRCRPSSSPPRRTSSSSTTSLPPRRSDGAILPARRFGLD

SEQ ID NO: 167653 - protein, 124 aa, Oryza sativa
  unsure (1)..(124): unsure at all Xaa locations
  Clone ID: PAT_MRT4530_66244C.1.pep
PKQTAAIPAGGGGGHRRRRGGAGSTDQRGRVTGAIAAASSLLSYQAEQLRETARDGRNSLILGFSTXCFASPATLVRSXVWLVVADEIGAVLGLNISLWPTGMLYFFFLARSPSLVWHGLLEST

SEQ ID NO: 167654 - protein, 79 aa, Oryza sativa
  Clone ID: PAT_MRT4530_66245C.1.pep
MVRIPRNGEKSPLEISSREWSYEFIVEQKSGATVRVTGQAYPLPFGEPPGEAMDHRISEPTQPTQPTKPEPARSQVDES

SEQ ID NO: 167655 - protein, 70 aa, Oryza sativa
  Clone ID: PAT_MRT4530_66246C.1.pep
MALRTAFTVAVPVLATGVSMNKFRSVFATCSCEVFLDNVEAVLLYAFLLFRFLAQLDEAGCHPILKRLSG

SEQ ID NO: 167656 - protein, 81 aa, Oryza sativa
  Clone ID: PAT_MRT4530_66247C.1.pep
VSRLPIPPSPYTNIPQSKMWSVMVYCKGGHQKEGVIVPCKGPKVPGFAQLTCLSNKMGSSLYQLKAFERLIKHYVARKKKL

SEQ ID NO: 167657 - protein, 75 aa, Oryza sativa
  Clone ID: PAT_MRT4530_66248C.1.pep
FFILRAQDVISVGPGTHPYNISSVGRALSGPGPMLRCMAILIQSVKDKEQEGMMANTRTLPIRVVLWYTNGHCIG

SEQ ID NO: 167658 - protein, 77 aa, Oryza sativa
  Clone ID: PAT_MRT4530_66249C.1.pep
MLAGWWKASQTLKEQVAERFRSSDGWRAGERSCGSSGKQQKSGPFCTPRQFGSERRPQVPVGPKQNSHVSGPYFTGP

SEQ ID NO: 167659 - protein, 66 aa, Oryza sativa
  unsure (1)..(66): unsure at all Xaa locations
  Clone ID: PAT_MRT4530_6624C.1.pep
FAPXRPAINFPPAFAXLXXPXXGESEGRXRRGTXXLRXPAXGPKPNPRLGLFPGXPGXXXXSRASW

SEQ ID NO: 167660 - protein, 58 aa, Oryza sativa
  Clone ID: PAT_MRT4530_66250C.1.pep
MALGGRSKLDEAELQLASLTRSVAAQEPVLNYHVARWLDQTRDVLDQRIEWRTAQALR

SEQ ID NO: 167661 - protein, 60 aa, Oryza sativa
  Clone ID: PAT_MRT4530_66251C.1.pep
NLVVTDCEPVTARAFDQFPHHIPVHLVRSTSHPASPETWIALKTDVSKIGANAPRPEELR

SEQ ID NO: 167662 - protein, 141 aa, Oryza sativa
  unsure (1)..(141): unsure at all Xaa locations
  Clone ID: PAT_MRT4530_66252C.1.pep
LACVRLAHPKLDLRXIFDRGAANDARKGVMEEIGELGESXSRSLKSRASAPLXSTTLCIRFVGFDCLSSRNRCLDLCWHPGPEYFXVVVCRDVDVEDVQQRGQPXLPVVVPAIALQTPVSQDEMGRNSPVEMGVAMTSLGW

SEQ ID NO: 167663 - protein, 47 aa, Oryza sativa
  Clone ID: PAT_MRT4530_66253C.1.pep
MAEHRGGRAFSNFFLADCRVGQKARNSDCFLADNECDSGDDVAAVVC

SEQ ID NO: 167664 - protein, 74 aa, Oryza sativa
  Clone ID: PAT_MRT4530_66254C.1.pep
MAVMLKSYFGSTMIWNHSYEDQTIRQTVEALDLVFAQSDRDVEGSTCKKKFHEGPQEDSTDATIQRFASSGVKI

SEQ ID NO: 167665 - protein, 162 aa, Oryza sativa
  unsure (1)..(162): unsure at all Xaa locations
  Clone ID: PAT_MRT4530_66255C.1.pep
MFLTGLNKFKKHPNLNFGHIGVXIGCVRGKNSLRDSRGELLSINANIGTHGPHGCDVFDWIQKVQKASKHNFWTYWSVLGAFVAKTHFVICATNYCQLMPILAYTGAMFFDRNENVQKAPEHDFWTYWSVLGVFVVKTHFVIRAANFRQLMPILAYVEPPGL

SEQ ID NO: 167666 - protein, 151 aa, Oryza sativa
  unsure (1)..(151): unsure at all Xaa locations
  Clone ID: PAT_MRT4530_66256C.1.pep
TGMKKFKKHQNMIFGHIGVXWCIRGKKSLRDSRGELLSITANIAIGGCDVFHRNEKVQKAPKHDFWTYWSVLGAFVAKNYFVIRAANFCQLMPILPYIGTRGCDVFHRNEKVRKAPKHDFWTYWSVVGAFVVKNHCVIRAANFCQLLPILA

SEQ ID NO: 167667 - protein, 421 aa, Oryza sativa
  Clone ID: PAT_MRT4530_66257C.1.pep
MRFAPILRNPRRRRLLRSVNPSLAAMSPPAAAHLATASDPDEDLCFTTESVAPAEETAPPLPAPPPPVSAEERVERAWAHWRRLGSPKMVVAPMVDNSELPFRMLCRRYGATGAYTPMLHSRIFSENEKHRAMEFTTCKEDRPLFVQFCANDPDILLQAAKIVEPYCDYVDINFGCPQRIARRGYYGAFLMNNLPLVKSLVQNLSANLHVPVSCKIRIFPRLEDTLAYAKMLEEAGASLVAVHGRTRDEKDGKKFRADWDAIKAVKDALRIPVLANGNIRHLDDVKDCLEHTGADGVLSAETLLENPALFAGFRTKEWKENGDEDEASGLDQADLVIEYLKLCEQYPVPWRMVRSHVHKMLGDWFRVHPQVREELNAQSKLTFEWLHDMVKRLKDLGGGIPLYRNNNALQTTSNGLAASNA

SEQ ID NO: 167668 - protein, 153 aa, Oryza sativa
  unsure (1)..(153): unsure at all Xaa locations
  Clone ID: PAT_MRT4530_66258C.1.pep
MFLTGMKKFKKHQNMIFGHSXCVGCIRGKKSLRDSRGEVLSINVNIGTGGCDVFHRNEKVQKAPKHDFWTYLSVLGAFVAKNHFVIRAANFCQLMLILANVGAMFYXRNEKAQKAPKHDFWTYWSVLGAFVAKNHFLIRAANFCQLMSIPILA

SEQ ID NO: 167669 - protein, 171 aa, Oryza sativa
  unsure (1)..(171): unsure at all Xaa locations
  Clone ID: PAT_MRT4530_66259C.1.pep
MSKNHALVLFQHFHSGQKHRTRVGQNMPILALFDKSSPRESRNVATTDTSVAHIMDEQQDIKFESSKCQNPIRPPTTLLTXNGRRISIQPPFSAREYLMESSRSPLSNGSSLISEFYLVWLESHVQGAASPIMGLWACNFIWDPGPGGAHVGNRVDLHRQDQQPSERCINR

SEQ ID NO: 167670 - protein, 93 aa, Oryza sativa
  Clone ID: PAT_MRT4530_6625C.1.pep
MEVIQKKVHRRPRVASPALVARWGEGELAAAMRPELGGGRRRMLVRHNPSSRRQRWCGSVEARNGMTVVAGGGTPRLVGEGRRCCGAHMSAGV

SEQ ID NO: 167671 - protein, 171 aa, Oryza sativa
  unsure (1)..(171): unsure at all Xaa locations
  Clone ID: PAT_MRT4530_66260C.1.pep
CQYWPTRVRGFLTGMKKFKKHQNLIFGHIGVXIGCVRGKNSLRDSRGELLSINANIGTNGCDVFDRNEKVQKAPKHDFWTYWSLLGAFVEKTEFVIHAANFCQLMPILADTGAMFXDRNEKVQKAPKHDFWTYWSVLGAFVAKTRFVIRGEHFSTNANIGINWLTRVLCSS

SEQ ID NO: 167672 - protein, 98 aa, Oryza sativa
  unsure (1)..(98): unsure at all Xaa locations
  Clone ID: PAT_MRT4530_66261C.1.pep
ALQASEEFLKESKRASEAFHATCXPTSRSPTPFGTAKYMLDKIPKDASSKVKINQDLYTQERVIGTPPPLPDFALALKPDDYDLPPLDPLWNKEDSRQ

SEQ ID NO: 167673 - protein, 476 aa, Oryza sativa
  Clone ID: PAT_MRT4530_66262C.1.pep
MGWRFALLLLHVLLCLVNGVSCGRTSSYVRTEYPSTDIPLESEWFAVPNGYNAPQQVHITQGDYNGKAVIVSWVTVAEPGTSEVLYGKNEHQYDQRVEGTVTNYTFYDYKSGYIHHCLVDGLEYNTKYYYKIGSGDSAREFWFETPPAIDPDASYTFGIIGDLGQTFNSLSTLQHYEKSEGQTVLFVGDLSYADRYQHNDGVRWDSWGRLVERSTAYQPWIWSAGNHEIEYRPDLGETSTFKPYLHRCHTPYLASKSSSPMWYAVRRASAHIIVLSSYSPFVKYTPQWTWLKYELKHVDREKTPWLIVLMHSPMYNSNEAHYMEGESMRAAFEKWFVKYKVDLVFAGHVHAYERSYRISNINYNITSGNRYPVPDKSAPVYITVGDGGNQEGLASRFSDPQPDYSAFREASYGHSILQLKNRTHAIYQWNRNDDGKHVPADNVVFHNQYWASNTRRRRLKKKHFHLDQIEDLISVF

SEQ ID NO: 167674 - protein, 252 aa, Oryza sativa
  Clone ID: PAT_MRT4530_66263C.1.pep
MLVLAYIGTCRCDVFDRNENVQKAPKHDFWTYWSVLGAFVAKTHFVIRAANFCQLMPILAHEGAMFLTGIKKFKKRQNMIFGHIGCIACVRGKNSLHDSHGELFSINANIGTRGCDVFDRNQKVQKMPKHDFWTYWSMLRAFVAKTHFVIRAANFCQLMATLAHGGAMFFDRNQKVQKTPKQDFWTYWSVLGALMAKTQFVIRSANFYQLMPILAHEGAMFSTGIKKFKNRQNMIFGHIGVYWVHSWQKLTS

SEQ ID NO: 167675 - protein, 415 aa, Oryza sativa
  Clone ID: PAT_MRT4530_66264C.1.pep
MGCGLSREKDAGGGPRRRPGSVGDVVVFLPGLRVPRSVDFSQALAGRLDEASSRLSSLRARVVDMAMQESAAALKPKRRAAARHGSSTANLLQALEDYLPVLLGLVKEGSELRHGVHFVWTNQEDNAEANSLLLPRSYGDGYAPRVSEESRRATVDVFLKASGYLDCAIRQVLPQISSELRRQLPVDLAEGNLKALSLQALGQGVDMQLGLAIDSPKATLAVKRRLACEMVKYWHQIQESIPEIPVSDGWGKKHLLFVKWKYVEAKAAAYYFHGLILDEGNTEKSHGMAVAALQASEEFLKESKRASEAFHATPPTSRQDILPFEHFAFQIFLCFILSIRTLPRWSPTPFGTAKYMLDKIPKDASSKVKINQDLYTQERVIGTPPPLPDFALALKPDDYDLPPLDPLWNKEDSRQ

SEQ ID NO: 167676 - protein, 67 aa, Oryza sativa
  Clone ID: PAT_MRT4530_66265C.1.pep
MCRVADLTTATRMGDGSDEGKVTMYPPRAARGRLPRRHGGESRLPDQILGEDGGILPATMTTTTASN

SEQ ID NO: 167677 - protein, 189 aa, Oryza sativa
  Clone ID: PAT_MRT4530_66266C.1.pep
MFSTGIKKFKKRQNMIFGHIGCIGCVRGKNSFRDSRGALLSVNANIGTRGCDVFDRNQKAQKTPKRDFWTYWSSVLGVFVAKTHFVIRAANFCQLMPILAHEGAMFFDQNENVQKAPKLDFWTYWSVLGAFAANTQFVIRAVIFCQLMPILAHQGAMFSTGIKKFKKRQNMIFGHIGVYWVRSWQKITS

SEQ ID NO: 167678 - protein, 135 aa, Oryza sativa
  Clone ID: PAT_MRT4530_66267C.1.pep
MDASAVASADEAKKTTAAAAATAAGEPQKPAAVAPLLAQGYVDSILAFERVQWPVFSDDDLKHLSPEQRREIDKMAALHKALDDDLAVFQAEVSRQVEDNGCYVVGESYLADQAKLEALINEEWAKIDWSAFEFE

SEQ ID NO: 167679 - protein, 152 aa, Oryza sativa
  unsure (1)..(152): unsure at all Xaa locations
  Clone ID: PAT_MRT4530_66268C.1.pep
MFLTGLNKFKKHPNMNFGHIGVXIGCVRGKNSLRDSRGYFCQLMPILAYIEPHGCDVFDRNEKVQKAPKHEFWTYWSVLGAFVAKTHFVIRAGXFCPLMPILAYIEPHGCDVFDRNEKVQKAPKHEFWTYWSVLGAFVAKTHFVNRAGTFVN

SEQ ID NO: 167680 - protein, 363 aa, Oryza sativa
  Clone ID: PAT_MRT4530_66269C.1.pep
YPRESRSEFLPRTHPIQIDKSTRANHEVSFCHERTQYTPICPEILFWCYLNFFIPVKNIAPVGSQHMPILVLIDKSTRANHEVSFCHERTRYTPISPKFMFWRFLNFFIPVKNIAPVEAQYMPILALIDKSTRAIHEVSYCHERTQYTPICPKFKFWRFLNFFIPVKNIAPVGSQHMPILVLIDKSTRANHEVSFCHERTQYTPICPKFMFWCFLSFFIPVKNIAPVEAQYTPILALIDKSTRANQQSGFFARTHPIHSNMSKIHVLALFELFHSGQKHRTRDMPILVLIDKSTRANHKVSFCHERTQYTPICPKFMIWCFLNFFIPVKNIAPVGAQYLPILTLIDKSSRANHEMSFCHERTQ

SEQ ID NO: 167681 - protein, 49 aa, Oryza sativa
  Clone ID: PAT_MRT4530_6626C.1.pep
NLTFSYLIHYAIIKLRLDYAFSSCKVDNPGCYSVDLADWKCRTCFNYIC

SEQ ID NO: 167682 - protein, 209 aa, Oryza sativa
  unsure (1)..(209): unsure at all Xaa locations
  Clone ID: PAT_MRT4530_66270C.1.pep
MFFTGMKKFKKHQNMIFGNIGVXGCISSKKSLRDSRGELLSINVNIAIXGTRGCDVFDRNEKVQKTPKHDFWTYWSVLGAFVAKNHFVIRAANFCQLMQILAHVGAMFFHRNEKVQKAPKHDFWTYWSVLGAFVAKNHFVIRVANFCQLMPILPYIGTRVCDAFHRNEKVQKAPKHDFWTYWSVLGAFVAKNHFVIRAANFCQLLPILP

SEQ ID NO: 167683 - protein, 248 aa, Oryza sativa
  Clone ID: PAT_MRT4530_66271C.1.pep
MKGLLSSRKPVGMDVTSIKLKGDSNNKRLVTIKEGFEYSQAAVSQLESTSGLKQQNLEKNEYEESPVPNLLDESMEKEVACSSVELNQSASATDQENVSQKIVVTITSEKGMHETEPVSANKIAICQPDFPSKAEFPVGSSFVTPRKNKLVDVTDHKDSAELVKTRSIQNKKGEMPSSVTGKAPTMPTKSAPKDRVKNKSVASGSAQMSGSSRKRARKGWTTLKQIAEKEELERKEKMGNFVIPFFMQ

SEQ ID NO: 167684 - protein, 108 aa, Oryza sativa
  unsure (1)..(108): unsure at all Xaa locations
  Clone ID: PAT_MRT4530_66272C.1.pep
LHLVLVFSFAVFFITPLNVYHIFFRFLNVMYIGFSASRSLKYFPHFCWPISIYWPLANCAHHKLISFHLPPVNFFAXPTIRICNSCYFNEYFTQYFTAETSGLHVVGS

SEQ ID NO: 167685 - protein, 109 aa, Oryza sativa
  unsure (1)..(109): unsure at all Xaa locations
  Clone ID: PAT_MRT4530_66273C.1.pep
QLIKSRIQLAGLDWGSCLFLSLYCAVTMTRRQKHPPLIVPNQIMETNILLTDQMDGWFIQAYWHPNFASLPNTTKRLLLLVSSQEKHTMXKIYFYDYCCGYLVQQKAHE

SEQ ID NO: 167686 - protein, 211 aa, Oryza sativa
  Clone ID: PAT_MRT4530_66274C.1.pep
MEIGGDSAERRQMEPGGGVRRRRGDRRERQPASGGRRQDWRRELDRRRSEAFGGGAARPRGGNRRPTSDGGSEAARGKAPRPAAAAQQDSARRQAQLQPITYANVSPVQIQITAVEVVPETGIPNFEILTLLRLVSRREISAFLRDFLHIHHRCSLGSAPGTRRPRNLSTSPPLPYATPCHYSWHDNRMDEHTDTPGTELQSGAIGCCGHQ

SEQ ID NO: 167687 - protein, 673 aa, Oryza sativa
  Clone ID: PAT_MRT4530_66275C.1.pep
MPVPGENRRCFLAVLHFFTIILIIITFPSSTAAIGDGQFGYYGFSNSSLTVDGAAMVLPGGLLQLTNSTANMKGHAFHPTPFRLRKSPNTTVQSFSASLVFGIISPYIDLGSQGMVFLVAPSTNFSDALAAQYLGLFNIRNIGNRSNHVFAVEINTILNSEFMDIDDNHIGIDICDLRSVTSHSAGYYDNSTGGFHNLSLISGEAMQIWIDYDGGAKQIDVALAPFKMAKPTKPLLSMPYDLSSVISDVAYVGLSAATGLAGSSHYILGWSFSMNGPTPPFFTAQLPDLPRRAQEASRRKVLPIIVPIVTATSVLLITLAVFLFVRRRLRYAELREDWEIQFGPHRFSFKDLYFATEGFKNSHLLGTGGFGRVYKGLLSKSNMQIAVKRVSHESRQGIREFVAEIVSIGRLRHRNIVQLLGYCRRKDELILVYEYMPHGSLDKYLYCHSNHPTLDWIQRFRIIKGVASGLLYLHGDWEKVVIHRDVKASNVLLDAEMNARLGDFGLARLYDHGTDMQTTHLVGTIGYLAPELVRRGKASPLTDVFAFGIFVLEVTCGRRPIEHKMNSDKLLLVDWVMDCWNEGSLLETMDPKLQNEYDADEACLALKLGLLCSHQSPAAKPSMWHVMQYLNHDLPFPELAPMDMVQNRQVDSPVAYCQSVVSDGTISGLSEGR

SEQ ID NO: 167688 - protein, 244 aa, Oryza sativa
  Clone ID: PAT_MRT4530_66276C.1.pep
MGDGAEAAGATAASRFGTICVFCGSNAGRRRVFGDAALDLGHELVRRGVDLVYGGGSIGLMGLIARTVLDGGRRVVGVIPRALMAVEISGESVGEVIVVQDMHERKAEMARRSKAFIALPGGYGTMEELLEMITWCQLGIHDKPVGLLNVDGYYDPLLALFDKGEAEGFINSDCRQIFVSAPTASELLTKMEAFLLGLRMMMMMMRDREGDALDSHRFEGKFRCNGKVGSLKNNFRTKHGLMKH

SEQ ID NO: 167689 - protein, 112 aa, Oryza sativa
  unsure (1)..(112): unsure at all Xaa locations
  Clone ID: PAT_MRT4530_66277C.1.pep
PRSXPTLPLHLSFVVGRRKGGRRRSPTTTGTRPRLRELWSALKPPQPTSCRSERCRPSQAEPSRQRLLLEVLLKTPQLIPGQWRRRCGRIGHRLSFTFGLPSAFVVFXFFAA

SEQ ID NO: 167690 - protein, 64 aa, Oryza sativa
  Clone ID: PAT_MRT4530_66278C.1.pep
MVTRVHFEQKSGATVRVTDGKSPSRTRTGSPTYRAGSGVFESYSESTRPAPTKPEPARSQVVES

SEQ ID NO: 167691 - protein, 142 aa, Oryza sativa
  Clone ID: PAT_MRT4530_66279C.1.pep
MAAAAAAASGAQARARLAAAAASGAKARLAAGGEARAAAAPLLRRRRVMLIGGMLQALKDEQRFIRHEFEALQKFTKSELDLKVAKMETVVATMRGLHENSQKECLKNSVLLLGVTAAVFGVLQQQAERPGVEIPTTGKSEA

SEQ ID NO: 167692 - protein, 280 aa, Oryza sativa
  Clone ID: PAT_MRT4530_6627C.1.pep
MGNWNHHRRPWYRRTRHMLVFWDLTRPKSAGHNCHPIPLWEREFCIYVGGISWHRFCDNKRYVCMYKNIEQWDDSEAFDNFKNAKARFWANYHGQPSDISLPDPDMYIDKVDHNSKIDPELIADLNMVRLPFEMDDELLPADGLGSTDTDNKCQQRQNQSRNWDIYVEKPTEVNKWEQDSRSNMDWGTKHESWNEWSKNCSGWGSALADSSALADSSWGNWNNSNNHHSSNNRASFNGINRNRYQDPSSISGRKRNSGGYIQQRNSRQRNQIEGYQGSRW

SEQ ID NO: 167693 - protein, 38 aa, Oryza sativa
  unsure (1)..(38): unsure at all Xaa locations
  Clone ID: PAT_MRT4530_66280C.1.pep
MGQIFYTLTTGXPNERRWEKIKDRLHTVVDSFKIEARV

SEQ ID NO: 167694 - protein, 121 aa, Oryza sativa
  Clone ID: PAT_MRT4530_66281C.1.pep
ASKKTGVRFPSSKWWGWSSSSSCMFLAVPLSPTPGGLKTPTRLVWHGCPSLTLAGSSFGIVKNWEPLPLSLSKKPPIGGARALFEFFIYYFLECGISSQKKKKKKKKTKKKKKTKKKKKPK

SEQ ID NO: 167695 - protein, 92 aa, Oryza sativa
  Clone ID: PAT_MRT4530_66282C.1.pep
VANLGSARPPCSSPLFVLAGFGLAPLRCAYAISPLTSNLARATAHHLQFFPAKVGCTAQAFSVWSLHWRSSLGHPFHRSAFLQAQLSHVCAQ

SEQ ID NO: 167696 - protein, 165 aa, Oryza sativa
  Clone ID: PAT_MRT4530_66283C.1.pep
MATMSLAAASPLASTPRGLAVSTPRTAFLGLLTGGASLAPFPGLAAAAAPPRLPAGRGDAAVARMAKREQELEEIRAMPTEKIEEEVVDLKGELFMLRLKRSARQEFKSSEFGRMRKRIARMLTVKREREIEQGINKRLSRKLDRKWKQSIVVRPPPSLRENKEE

SEQ ID NO: 167697 - protein, 88 aa, Oryza sativa
  Clone ID: PAT_MRT4530_66284C.1.pep
KKKKKKKKKKKKKKKKNKKKKKKKKKKKKWGGGFRFSRFPAACLRLDASFFFSPDLNFLSVVCHCRLCDGLALPILIVLRLIPFFPVG

SEQ ID NO: 167698 - protein, 67 aa, Oryza sativa
  Clone ID: PAT_MRT4530_66285C.1.pep
MGRRMDGGERWRESSHVDLAPRWRMHYGDNRIGYSSLRFLFDVKQVGEAILANAWVEIRARMSSYST

SEQ ID NO: 167699 - protein, 72 aa, Oryza sativa
  Clone ID: PAT_MRT4530_66286C.1.pep
HFKGTALPCRLPTCQNPVLSNFQSHQGPRKKGPFKGPFTQATSFRPPLTGLDPIQPKIQKKPTDKKAGRNYS

SEQ ID NO: 167700 - protein, 124 aa, Oryza sativa
  Clone ID: PAT_MRT4530_66287C.1.pep
MAEKKQRPGGARKDEVVTREYTINLHKRLHGCTFKKKAPNAIKEIRKFAQKAMGTIDVRVDVKLNKHIWSSGIRSVPRRVRVRIARRRNDEEDAKEELYSLVTVAEVPQEGLKGLGTKLVEDDE

SEQ ID NO: 167701 - protein, 188 aa, Oryza sativa
  Clone ID: PAT_MRT4530_66288C.1.pep
MFLTGMKKIKKHQNMIFGHIGVYWHARGKNSLRDSRGELLSINAIIGTRGCDVFDRNEKIQKAPKHDFWTYWSVLGAFVAKTDFVIRAANFCQLMAFLAHVGGDVFDRNEKVQKAPKHDFWTYWSVLSAFVAKTQFVIRTANFCQLMALLAHVGAMFLTGMKKFKKHQNMTFGHIGVYWVRSWKTLNS

SEQ ID NO: 167702 - protein, 57 aa, Oryza sativa
  Clone ID: PAT_MRT4530_66289C.1.pep
EKHLSSKVKSYRTGCFNTIVQDVNVLATPVRFGKSANLVKFKYVRTLIRKIITYNST

SEQ ID NO: 167703 - protein, 148 aa, Oryza sativa
  unsure (1)..(148): unsure at all Xaa locations
  Clone ID: PAT_MRT4530_6628C.1.pep
GKRERGWWWCLNRGRGVRTWPREAGNRRPTWGSGRGERGGIRKSNPGRLERRRGREREGVGAGXRAHARAWPTWPTRPGGGGSVGAAAVARRGGGDXEVGDGPDRRAPPVSVRGGEGELGRAAGPWPSVGPARAQGGGGNRPAAHLGK

SEQ ID NO: 167704 - protein, 129 aa, Oryza sativa
  unsure (1)..(129): unsure at all Xaa locations
  Clone ID: PAT_MRT4530_66290C.1.pep
MFLTGMKKFKKRQNMNFGHIGVXIGCVRGKNPLRDSRGYLCQLIPILAYVETXGCDIFDRNEKVQKAPKHEFWTYWSVLGAYVAKTHFVIRAGXFCQLIPILAYTGAMFFDRNEKVLKAPKHEFCTYWS

SEQ ID NO: 167705 - protein, 169 aa, Oryza sativa
  unsure (1)..(169): unsure at all Xaa locations
  Clone ID: PAT_MRT4530_66291C.1.pep
CQYWHTRVRSFLTGIKKFKKRQNMIFGHIGVXIGCVRGKNSHRDSHGELFSINANIGTRGCDVFDRNQKAQKMPKHDFWTYWSMLRAFVAKTHFVIRAANFCQLIATLAHEGAMFFDRNEKVQKAPKQDFWTYWSVKGPFVAKTHFVIRAVNFCQLMQILAHEGALFLT

SEQ ID NO: 167706 - protein, 198 aa, Oryza sativa
  unsure (1)..(198): unsure at all Xaa locations
  Clone ID: PAT_MRT4530_66292C.1.pep
MPILAHDKGAMFCTGIKKFKKSQNMIFGHIGVYXCIRGKNSLRDSRGELXSINANIGTRGCDVFYWNQKVQKEPKHDFWTYWSVLGAFVAKTHFVIRAAIYCQLMPILAHEGAMFFDRNENVQKAPKHDFWTYWSVLGAFVAKTHFVIRAANFCQLMPILAHEGAMFSAGIKKFKKSQNMIFGHIGVYWVCSWQKLTS

SEQ ID NO: 167707 - protein, 127 aa, Oryza sativa
  Clone ID: PAT_MRT4530_66293C.1.pep
MEVKNKCFRMLLIKRWEGFPRGKCHGYGKSTKDYGNNPHRQVYNIVLLGKGSGFRIVLYRGEFGISEFYLEIKIIVPTYPKTLFILSWGIHVGNERGKRNRGMTSLPSITAGTVSVMETWKLRACSL

SEQ ID NO: 167708 - protein, 327 aa, Oryza sativa
  Clone ID: PAT_MRT4530_66294C.1.pep
MADEIEREVGASKCTTWHRRGSHTDSEVDGPDVPRGKLDSSEVAISGLPSRLGGGSTCGPRRACGAAVEEEEGKVQLTEGSRRRDAARERRQQGGNSGGSGMASTTGKWGCAAASIVGWRGKGKARLTGILGEAGFRWRNGTIMWRPEGLLDLTKLVAVTDVGVWGAKGVPETTAWLTSSLPLSARGWSPDEDAAYYTPGQCSAGSDGHSGGSGKGGGMWSEAAVETAVETAAGSSFPTIAAAQSSGTAELKKLDTLALLQPPPSPSLSYALPATLPPSSSLACPTGCCLQRPHQARDGCFDIQGFLALRSVLRSSSAEGSTGCLNR

SEQ ID NO: 167709 - protein, 217 aa, Oryza sativa
  unsure (1)..(217): unsure at all Xaa locations
  Clone ID: PAT_MRT4530_66295C.1.pep
MPILAHEGALLLTGIKKFKKRQNMIFGHIGVXIGCVRGNNSLRDSRGELLSINANVGTRGCDVFDRNQKVQKTPKQDFLVYWSVLRAFVAKTHVVICAANFCQLIATLAHEGAMFXDRNEKVQKAPKHVFWAYWSVLRAFIAKTHFVIRAANFCQLMSILAYIGRLGCDVFDRKEKVQKSPKHDFWTYWSVLGAFVAKTHFLIDAATGVPDLSMRGG

SEQ ID NO: 167710 - protein, 188 aa, Oryza sativa
  Clone ID: PAT_MRT4530_66296C.1.pep
MFLTGMKMFKKHQNMILGHIGCIGCVRGKNSLRDTRGELLSINANIGPHGCDVFDWNEKVQKSPKHDFWTYWSVLGAFVAKTHFVILAANFCQLMPILAHTGAMFFDQNEKVQKAPKHDFWTYWSVLGAFMAKTHFVIRAANFCQLMPLLAHVAAMFLTGMKKFKKHENVNFGHNGVYWVRSWQKLTL

SEQ ID NO: 167711 - protein, 192 aa, Oryza sativa
  Clone ID: PAT_MRT4530_66297C.1.pep
MFLTGMKKFKKRQNMNFRHIGCIGCVRGKNSLRDSRGELLSINANIGTRGCVVFDRNEKVQKAPKHDFWTYWSVLGAFVAKTHFVIRAANFCQLMPILAHEGAFFFDRNEKVQKAPKQDFWTYWSVFGAFVAKTHFVIRAANFCQLMPILAYIEPDGCDVFLTRMKKFKKHQNKTFGHIGVYLVRSWQKLTS

SEQ ID NO: 167712 - protein, 457 aa, Oryza sativa
  Clone ID: PAT_MRT4530_66298C.1.pep
MESEDKLDLILRRMEEFERRRVEADQRRRAEYQSLKVAVESWMPEIHKNAEDLQILCPNGSSPSTTARSIYDDEGTTPTIILELGDGEDKIHDPDIVAKVSLEVTPTMCSMKCSVPDTESNLIMVAEVTYASTATVSMELVAAQEAIGATYSDTSDHSKLTHTKCLTVVLDAIGDTVHKIFWSVMIKSVRHVPSISSELDDIQGKSTRIFIVVKIPEGCNPKKSSSATTETQVSHLFNSFSELLDVHLTTTEMSQEVRCWQGALELQVSVIFWLLARNIHPPKIEVQVLEFLLRVLIGSLSEKYSEKWTSGSVPSSYIALADKYKTSSFSMVYCSKLNHSHKTIIVHLLIRNKLKTWISEMIGRTDRVDAKFTIVCQLSRSLQSGTHILDLYSAEEHIFDNFLNAIMWCSVPIKNLHKQWDPGGSGDTLHRLGDKPKFKERRLLGTQMGCQPLSKQG

SEQ ID NO: 167713 - protein, 74 aa, Oryza sativa
  Clone ID: PAT_MRT4530_66299C.1.pep
GLGFFFFFFFFFFFFFFFFFFFFFFFFFFIKNLKEIMGTQALGLEFPKQGGWDGVKQGGERTTNKGKAPLWGSF

SEQ ID NO: 167714 - protein, 88 aa, Oryza sativa
  Clone ID: PAT_MRT4530_6629C.1.pep
AIMTPRKRAAMRAFRARHMTYTVCYDAVRYAAGPFPECDVSDVEKESFSAWGESKNVVMKARGRGRRRGRKAGVAGAGAMSRLDVSSS

SEQ ID NO: 167715 - protein, 63 aa, Oryza sativa
  unsure (1)..(63): unsure at all Xaa locations
  Clone ID: PAT_MRT4530_662C.1.pep
GRSSQICAVSRGSRSTRLLENICCAVKILRDGVLCCHWPTIGSSSSLSRDAXIWVESRQLWEA

SEQ ID NO: 167716 - protein, 533 aa, Oryza sativa
  unsure (1)..(533): unsure at all Xaa locations
  Clone ID: PAT_MRT4530_66300C.1.pep
SLCPIVSVVGFRLPKLSPPAPEKSPPPVEPPASPKLPAGFPPKLPSPPKLIPEKASADPSATPXPPPPPPLLPYPPLLPPXPPPPPWXPPPPPPPPLXPPPPXPPPPLXPPPPXPPPPPPXPPPPXPPPPLRKPPPMVTSTHPPPPFKPPPSLQPKKPXPHEPSNNSATLIDRLSYEPRRSPRTLTHPAHRQPTKQTHPPTQPPKSPPKEWGTDSHQIAGSHRRAKNPAPPPPPPRPPSPPTRPAPSSDPTPPPPPLVRRLRGIDRAARPRPSSLPDPARKVRALPESASPPRGPFRAPPPPPWCVSKLSPTAPSPPPQAAVCRSCSPPTPPPPPAAAAAXATLPPPPRRRARPSPXPPTPQPHQQXPPPPRTYPPRRTCPPSPPRRPPPPPASPPAPESHRPPRSSAATPPRPRAAVPPHPSXPPGPPXSLPPGPPXSLPRRPPPPPPVGPLPPSSLSNVPTQRPTSPPEPPTRSPSSATSTSPPSSSPPRATSSTTPPPTPPRQPRPPRPRSRPQLVAMARCRRRPIAPDE

SEQ ID NO: 167717 - protein, 165 aa, Oryza sativa
  unsure (1)..(165): unsure at all Xaa locations
  Clone ID: PAT_MRT4530_66301C.1.pep
LFLTGMKKFKKRQNMIFAHILCIGCVRGKNSLRDSRDELLSINANIGTRGCVVFXRNEKVQKAPKHDFWTYWSVLGAVLGAFVAKTYFVIRAANFCQLVPILAHEGSLFFVRNEKVQKAPKHDFWTYWSVLGAFVAKTHFVIRAANFCQLMPILAYVEPPRVRCF

SEQ ID NO: 167718 - protein, 576 aa, Oryza sativa
  Clone ID: PAT_MRT4530_66302C.1.pep
MEGEDKLDLILRRMEEFERRQVEADQRRAEYQSLKAAVELWMPEIQKNAEDLQFLVGDEQSKVTLTTCSTECPNGSSPSRTARSIYDDEGSTPTIILELGGGEDKIHDPYIIAKDSLEVTPTMCSMKCSIPDTESNLTMVAEVTYASTATVSMELVAAQEAIDATYSDTSDHSKVMHTKCLTVVLDAIGDTGQAMVVFQTWTDAFKDVPTSVQFMDFFSSSMMANIKWNTPIPIKYSVQFLGHDMLATNALDVNSWPPPWSDGVIREAKKFVVGRELFELQVSVLFWLLARNINPPKFEVQVLEFLLRVLIGSLSEKYSGNTIDLEVCFSKIGICLHRDVLKFPISQSTNACITILCDRHAAFSFDTSMEWNSDTRKIIQETMSLLEHSVMIFTSMLDLHWSVINTEKWTSGSLPSSCIALADKYKTSSFAMLSRSLQSGTHILDLYSAEEHISDNFLNVIMWCSVPIKNLHKQWDPGGSGETLHRLGDKPKFKERRLLGTQMGCLWAVNHFQSKAQASKSGAHINSRSSTREEIEQRTTEPVEGLLGGDGGGGDLEPGLVPCRSLLSLFFYLSRS

SEQ ID NO: 167719 - protein, 86 aa, Oryza sativa
  Clone ID: PAT_MRT4530_66303C.1.pep
MTLTSSPRTLLSVTPTICSMKCSIPDTESNLTMVAEVTYASTATVSMELVAAQEAIDATYSDTSDHSKMMHTKCLTVVLDAIGDTG

SEQ ID NO: 167720 - protein, 356 aa, Oryza sativa
  Clone ID: PAT_MRT4530_66304C.1.pep
CFLNLFNPVKNIAPVGSQHMPILVLIDKSTRANHEVSFCHERTQYTPICPKFMFECFLNLFNPVKNIAPVGSQHMPILVLTDKSTRANHEVSFCHERTQYTPICPKFMFGCFLNLFNPVKNIAPVGSQHMPILVLIDKSTRANHEVSFCYERTQYTPICPKFMFGCFLNLFNPVKNIAPVGSQHMPILVLIDKSTRANHEVSFCHERTQYTPICPKFMFGCFLNLFNPVKNIAPVGSQHMPILVLIDKSTRANHEVSFCHERTQYTPICPKFMFWCFLNFFIPVKNIAPVKAQYMPILALIDKSSPRESRNEFLPRMQPIDSNMSKNHVLVLFQHFHSGQKHRTRVGLYMLNIGTY

SEQ ID NO: 167721 - protein, 55 aa, Oryza sativa
  Clone ID: PAT_MRT4530_66305C.1.pep
CHHLRQRAQQYSRQAICQKGQSMMQQVPADASYVRTARWSGPGAERLSSWPPCVE

SEQ ID NO: 167722 - protein, 48 aa, Oryza sativa
  Clone ID: PAT_MRT4530_66306C.1.pep
SRNTQFRDGVLMPVMICLLGDCVYIAITKSVGPSQKNDFPVVPGQPLY

SEQ ID NO: 167723 - protein, 126 aa, Oryza sativa
  Clone ID: PAT_MRT4530_66307C.1.pep
MSISMTSTAAAVAVALLVVAGGAGLAAAGTSDLCGLAETAFGECTAYVAGGEPAVSRRCCRALGDIRDLAATAAERRAVCACILSEMLAAGDGRVDSGRAAGLPAACNVRVGFIPTSPNFNCFRVR

SEQ ID NO: 167724 - protein, 276 aa, Oryza sativa
  Clone ID: PAT_MRT4530_66308C.1.pep
MKIIPVACLEDNYAYLYPPESILVSCLIVDESTKSAAAVDPVEPEKVLAAAAEVGVRIDCVLTTHHHWDHAGGNEKMAQSVPGIKVYGGSLDNVKGCTDQVENGTKLSLGKDIEILCLHTPCHTKGHISYYVTSKEEEDPAVFTGDTLFIAGCGRFFEGTAEQMYQSLCVTLGSLPKPTQVYCGHEYTVKNLKFILTVEPDNEKVKQKLEWAQKQREANQPTIPSTIGEEFETNTFMRVDLPEIQIMPSILQAKFGAKSPVEALREVRKTKDNWKS

SEQ ID NO: 167725 - protein, 408 aa, Oryza sativa
  Clone ID: PAT_MRT4530_66309C.1.pep
MAKAIKLVLTKAHHRICVWHMNQNACKHLAGVVKDYKKFNAAFQHCTYDIEEEDEFLNAWHAMLNMFELQDNKWLERLFDKREHWALVYGRNTFSADMSSTQRSESMNNELKVVLNKRLEEVKCDFKATQTTPKLKAELNILRHASRVYTAAMFKIFQDQVLQTLNCDIFFCASSDAEKVLDINNVKYIPEHYIMKRWTIDAKALQITRNCNLQEDSKTILSNRYKELCRMFVQIAARAANSKESYFMAANCAEKLAQDVEKCLQIRSDPDMDDLPTSQDATVHASIIPKQNEEVVKPRGIKVKPKTILGSRRHVSGLDKSKRRRTKNKVQSVPEAHHIDTLTPIATTSIRMPEQYDNFMGHFQVPMTQPYMFWPHYNSVPSASPQPFVDITALMTEQNKGLQQQKPF

SEQ ID NO: 167726 - protein, 98 aa, Oryza sativa
  Clone ID: PAT_MRT4530_6630C.1.pep
TLSDLCVAASSSSASSSSATSAWAWASTGAGAGSSAEARSRQQRRGADAATGREHREAGRDGAEGTPRVLYASRRRGSVAVAMAGARGGRAVWMRECA

SEQ ID NO: 167727 - protein, 107 aa, Oryza sativa
  unsure (1)..(107): unsure at all Xaa locations
  Clone ID: PAT_MRT4530_66310C.1.pep
IHKMXPXTFSLHXXTSPYVFFXXKRXKXXAXXEXCHXXVYRHXVXXMXLXTKRXXEESXFSLLKXXPXTLXIXXFXCRKXKSXXFSXDQXAGYVKLSXNLNFLSIDF

SEQ ID NO: 167728 - protein, 83 aa, Oryza sativa
  Clone ID: PAT_MRT4530_66311C.1.pep
MAHPSPSLLFLSQIRFSPSSVVVLPVLTGGENPVPFGMSIDSILDVVPLLEALLRRPTYIHNKNNDPLGNLRFQFVFASINRY

SEQ ID NO: 167729 - protein, 645 aa, Oryza sativa
  unsure (1)..(645): unsure at all Xaa locations
  Clone ID: PAT_MRT4530_66312C.1.pep
MARRSAPLLRRILSSPAPAPAHHGGAGARRTVTYMPRPGDGNPRAVTLIPGDGIGPLVTGAVQQVMEVMHAPVYFETYEVRGDMPTVPPAVIESIRRNKVCLKGGLATPVGGGVSSLNMQLRKELDLYASLVNCSNFPGLPTRHQDVDIVVIRENTEGEYSGLEHEVVPGVVESLKFCSERIAKYAXEYAYLNNRXKVTAVHKAXIMKLADGLFLESCREVASKYPGIQYNEIIVDNCCMQLVAKPEQFDVMVTPNLYGNLVANTAAGIAGGTGVMPGGNVGQDHAVFEQGASAGNVGNENILEQKKANPIALLLSSAMMLRHLQFPSFADRLETAVKRVIAEGNIMAYHGQLDGRQASGLMRDGAFPAASLSGRQPLDRAATALEILEKKLAEQTAEAEKLIRENQRLASSHVVLRQDIVDTEKEMQMIRAHLGDVQTETDMHMRDLMERMRLMEADIQAGDAVKKELHQVHMEAKRLIAERQMLTVEMDKVTKELHKFSGDSKKLPELLTELDGLRKEHQSLRSAFEYEKNTNIKQVEQMRTMEMNLMTMTKEADKLRADVANAEKRAQGYTQAALPGYPSAYAAPQQPISSGVATDVASMYGAISSAGYPAGVVQSSSGAANAGQAPATYPVAYDPTRAGQR

SEQ ID NO: 167730 - protein, 378 aa, Oryza sativa
  Clone ID: PAT_MRT4530_66313C.1.pep
MARRSAPLLQRLLSPTPSPSPSPPHPLAAAAVSRRTVTYMPRPGDGAPRAVTLIPGDGIGPLVTGAVRQVMEAMHAPVYFESYEVRGDMPTVPPEVIDSIRRNKVCLKGGLATPVGGGVSSLNVQLRKELDLYASLVNCFNLPGLPTRHHDVDIVVIRENTEGEYSGLEHEVVPGVVESLKVITKFCSERIAKYAFEYAYLNNRKKVTAVHKANIMKLADGLFLESCREVATKYPGIQYNEIIVDNCCMQLVAKPEQFDVMVTPNLYGNLVANTAAGIAGGTGVMPGGNVGQDHAVFEQGASAGNVGNVKVVEQKKANPVALLLSSAMMLRHLQFPSFADRLETAVKRVIAEGKYRTKDLGGSSTTQEVTDAVIAHLD

SEQ ID NO: 167731 - protein, 58 aa, Oryza sativa
  Clone ID: PAT_MRT4530_66314C.1.pep
MKLGTLRYFYLQDHRGSHVTSVSNIDEDKVPIGDKEDTFTQSVYYALHAVFSIEIYNL

SEQ ID NO: 167732 - protein, 406 aa, Oryza sativa
  Clone ID: PAT_MRT4530_66315C.1.pep
MAYHGQLDGRQASGLMRDGAFPAASLSGRQPLDRAATALEILEKKLAEQTAEAEKLIRENQRLASSHVVLRQDIVDTEKEMQMIRAHLGDVQTETDMHMRDLMERMRLMEADIQAGDAVKKELHQVHMEAKRLIAERQMLTVEMDKVTKELHKFSGDSKKLPELLTELDGLRKEHQSLRSAFEYEKNTNIKQVEQMRTMEMNLMTMTKEADKLRADVANAEKRAQVAAAQAVAAQAGVAHVTASQPGAAQAVAVPAASNPYSSAFTGHPSAYHQGATQAGVYQQGTTQAGAYQQGSTQAGAYAYPTYDAATAYQMHAAQANAYAGYPGYPVAGYTQAALPGYPSAYAAPQQPISSGVATDVASMYGAISSAGYPAGVVQSSSGAANAGQAPATYPVAYDPTRAGQR

SEQ ID NO: 167733 - protein, 151 aa, Oryza sativa
  unsure (1)..(151): unsure at all Xaa locations
  Clone ID: PAT_MRT4530_66316C.1.pep
HALWEVQGIQYNEIIVDNCCMQLVAKPEQFDVMVTPNXLYGNLVANTAAGIAGGTGVMPGGNVGQDHAVFEQGASAGNVGNENILEQKKANPIALLLSSAMMLRHLQFPSFADRLETAVKRVIAEGKYRTKDLGGTSTTQEVTDAVIANLD

SEQ ID NO: 167734 - protein, 45 aa, Oryza sativa
  Clone ID: PAT_MRT4530_66317C.1.pep
LGVHSPVTKLYMCSGHFNPVTSIWWGGFHMLKLIQGNPLAFKMFS

SEQ ID NO: 167735 - protein, 94 aa, Oryza sativa
  unsure (1)..(94): unsure at all Xaa locations
  Clone ID: PAT_MRT4530_66318C.1.pep
MTVVTVGMVGNTLQPSLGLHLNRPAKTWIQRRRGRFGRTRGRPNQPTFRLAATSVAPFCRLMNFGPVXRVNSEFLAHSCISLILDIVRLIYLPC

SEQ ID NO: 167736 - protein, 56 aa, Oryza sativa
  Clone ID: PAT_MRT4530_66319C.1.pep
MAQDTGDTVFPSSRITADRHLSLPRKIMPDGAVVRAGQSRPWPRYPERSVHLLSFA

SEQ ID NO: 167737 - protein, 36 aa, Oryza sativa
  Clone ID: PAT_MRT4530_6631C.1.pep
RIDMKSCRDIATHTSAQYQLEPRESYPQLRINDHRS

SEQ ID NO: 167738 - protein, 559 aa, Oryza sativa
  Clone ID: PAT_MRT4530_66320C.1.pep
MGIDLNNTASGGEEDAPAPGPVCRDLWHACAGPVVSLPRRGSAVVYLPQGHLSAAGAGGGIRGEVAVALPPHVACRVVDVELCVFERNLHGGGIEREDDMEDGDEERKSRMLHMFCKTLTASDTSTHGGFSVPRRAAEDCFPPLDHKQLRPSQELVAKDLHGAKWRFRHIYRGQPRRHLLTTGWSSFVNKKKLVSGDAVLFLRGDDGELRLGVRRATQLKNEAIFKAFSSESSKMRTLSAVADSLKHGSVFHICYNPRATASEYVVPYWKFVKSFNHPVCIGMRFKFHFESEDVNERRSGMIAGVSEVDPIRWPGSKWRSLLVRWEDATDCNSQNRVSPWEIEIVGGSISVAHSLSASSSKRTKLCPQGNLDVPALYGNGRPDSVETEKFPRVLQGQELMGSRTHRATCSPQSIDITKIQQADFQCSTLAIPTNLLMLYQTGVPQLELASKNNDKSGNDSQPALRQHKLLSETSWDQFKIGKASTPGNATKPGNGGREVDRTSCRLFGFSLTEKIIPTDKDGEKEVRIRTCGDAATPRFIPDVNGIGLVMVPPFLMLCM

SEQ ID NO: 167739 - protein, 81 aa, Oryza sativa
  Clone ID: PAT_MRT4530_66321C.1.pep
MERADRAAGGRAANGWRQPGGGGARRTRDRRPCGGQVAAAAGFGRATAGMGSGMVLLYPCPTRPAAIPDPRYKDLIFMDYC

SEQ ID NO: 167740 - protein, 70 aa, Oryza sativa
  Clone ID: PAT_MRT4530_66322C.1.pep
MADEEEEGEEGEGTQRRVEFPINGRPPEGQCGGSPTGVWGHGRNAAAAARRYGPNCSWTGAFVTCRVGMT

SEQ ID NO: 167741 - protein, 113 aa, Oryza sativa
  Clone ID: PAT_MRT4530_66323C.1.pep
EIVRDIDPVVQLIKDILHSDRYGDGECLSPKDENIIVEKLLAYHPRVDDKIGCGLDAIMVDKHPQFRKSRCLFVVRTDGVWIDFSYQKCLRAYIREKYPSHAERFIREHFKRT

SEQ ID NO: 167742 - protein, 66 aa, Oryza sativa
  Clone ID: PAT_MRT4530_66324C.1.pep
MVCSPKKAACWRTRRQCGTQHEERAVQAVDPTPSSAPADGPRDGESLARHLPEPATVMPSSNVTLY

SEQ ID NO: 167743 - protein, 108 aa, Oryza sativa
  Clone ID: PAT_MRT4530_66325C.1.pep
MGRRRSGPLFLSLSVGLIGSSQIWGGGGQGGGLVAAMCGGSGGQGSIGDEDGIKEEFEMEIAPETEKGSAEVRIGCNQDRQSLSWTRIKSTGTLIHLKASFWTCTGVK

SEQ ID NO: 167744 - protein, 215 aa, Oryza sativa
  unsure (1)..(215): unsure at all Xaa locations
  Clone ID: PAT_MRT4530_66326C.1.pep
IFPLVYSPLGSXKPXNWSPFPWRFPGKNFIHKGKWEHFPLFXLSRIAISKEKVYPLGPRALQKGCXIAPXIWCHCRXASGGGLESPGTRFATLLAPCYIGFFHPXCFXKPLLGXNRVWXGGSRSKFPKGTPXSKFXCXPXECXEKIDSCSQXQXPSLKXLFLLFQFNKFWSLFXXXLEKLGPXAQHFLAGGPSPGNXLVFXNKNSYSFXKGXIXX

SEQ ID NO: 167745 - protein, 64 aa, Oryza sativa
  Clone ID: PAT_MRT4530_66327C.1.pep
QSHTAFGERRQPGVRRGGTPGVEEGRGAQRGDAMAGSRVTMLPPRAVAAAKMLSAGSEGDWLIF

SEQ ID NO: 167746 - protein, 102 aa, Oryza sativa
  Clone ID: PAT_MRT4530_66328C.1.pep
DPMFAGDMSLRKWVSEAFPVLADVANDILLQGEILIQQGVLENNVTSLPCSTTWANEDPLVAVFKVGLMCCNSSPAKRLEINNVVVKLKSIRKDYSPCKKVM

SEQ ID NO: 167747 - protein, 235 aa, Oryza sativa
  Clone ID: PAT_MRT4530_66329C.1.pep
MEVEVVEGTTMVGWVVSGVAFWWTAFLLARGAFPKRSYDFCNRAVSAAHAAAAVSLACLSVADWSRPLSPLAAASSPPQMKALAVTLSYMVYDAACCYLNDDVRVDNTVHHLVSIVGIAAGLAYRRCGTEMVASLFVTEISSPLLHLREILKEFGIKDTDLNLLVDILFAVIFSVARMGFGPYLTYVTVTADNPILIKAMATGLQLVSAYWFLRILRMVRHKLGKKRPAPKVAGD

SEQ ID NO: 167748 - protein, 44 aa, Oryza sativa
  Clone ID: PAT_MRT4530_6632C.1.pep
MDPNGQRNGDDSSEGRNVCWEKDRRGQTRMASEEVTWGPIFIPA

SEQ ID NO: 167749 - protein, 37 aa, Oryza sativa
  Clone ID: PAT_MRT4530_66330C.1.pep
MAAVACKAFHVGQRATVVTPLMMAASSLFDDDNWQLA

SEQ ID NO: 167750 - protein, 236 aa, Oryza sativa
  Clone ID: PAT_MRT4530_66331C.1.pep
MHDLPNFIVNSRVRIEDVAVERSLVAAASSARRSGHCYEDVDGMLDVVQYSVQCIFNLQPEPSSCARVLLPPPPPSKSDLPVAPLSKLVAEWNPLNLLYNFPTKSSNVSMEILSNFADQSFLFPARILNFPGVSPVDLGPDPSSRAYIKDPLVVLHLSPQVPSSTVAGNALPASTFSLHRRPPLQPRRSSSSIVALGRRCHRWVREEEKKIVLHFPEAEIHRSSIVAVNPKFAVVF

SEQ ID NO: 167751 - protein, 56 aa, Oryza sativa
  Clone ID: PAT_MRT4530_66332C.1.pep
NAIRFYRPCFKMSQVGPRNENTTPRKPPCNQQHMDTVIFLYLFALPALLICHVNLT

SEQ ID NO: 167752 - protein, 64 aa, Oryza sativa
  Clone ID: PAT_MRT4530_66333C.1.pep
EFVRLPPHHLNELNAGNIHHFTFVPVHQNRTPTDIKVKARGGNGNFKFKGSTGDNRLAIRCSAP

SEQ ID NO: 167753 - protein, 217 aa, Oryza sativa
  Clone ID: PAT_MRT4530_66334C.1.pep
MEMEEAVDGKHPKRGRGRPRGRRGRGRGRGRGGRSLASPAAGPGDQGPRRRRGVVPAAAAAAGGRALRERRPAPGAYRESGADNDDDGGGDDEHDEQNDDGAEKSDNQVVDSLNEPNRSNTGKKRGRPKKVKAEQEDSNQLSNGKHLGENNGIFYPPKRYYTSFDTVEHYISMESHQPSSLHSCQVLSHYRSAILHGIWWHRTGITIVGVAVDKLTA

SEQ ID NO: 167754 - protein, 88 aa, Oryza sativa
  Clone ID: PAT_MRT4530_66335C.1.pep
MASTKVQRIMTQPINLIFRFLQSKARIQIWLFEQKDLRIEGRIIGFDEYMNLVLDEAEEINIKKDTRKSLGRILLKGDNITLMMNTGK

SEQ ID NO: 167755 - protein, 81 aa, Oryza sativa
  Clone ID: PAT_MRT4530_66336C.1.pep
MAPLASFGLRAADPQMPHRHIVSTRRRYMLVAVEVRIYARNAPDWLMATKSLGISVKLEEKNILENVVGLFGAVGFAQPAR

SEQ ID NO: 167756 - protein, 141 aa, Oryza sativa
  Clone ID: PAT_MRT4530_66337C.1.pep
MASTKVQRIMTQPINLIFRFLQSKARIQIWLFEQKDLRIEGRIIMYVNSVLYVVFIHNISWDRTDDKTFEDLILLTRELLFFTTIIVVSVTLHVHAKGFDEYMNLVLDEAEEINIKKDTRKSLGRILLKGDNITLMMNTGK

SEQ ID NO: 167757 - protein, 207 aa, Oryza sativa
  Clone ID: PAT_MRT4530_66338C.1.pep
MTTTCASGGRWRVCDGNDAVRVEEDGEERRGNAHEGRRTARRRRLRRMRGEEPRRRAWRRAEGGGRVRVRGWGATGLGFGASRPNPHRPFRIQRFHGLSRQFNYIDGSHHDTWGVVLLDMEQRVLKEEIVTLLPIERGIAMMRFVLGLLCTDMILHAGMYRDTLEKEATHEDLLIPNTGNFVETPYDVDCMERMPTNTSVLATSPKI

SEQ ID NO: 167758 - protein, 71 aa, Oryza sativa
  Clone ID: PAT_MRT4530_66339C.1.pep
SLSLSLCLFQEPQSREEAGSPIHGPLLSAGHQLIQPLLQTNEEPLQWGESRNRKCRQFNGAAGITLTRWEQ

SEQ ID NO: 167759 - protein, 89 aa, Oryza sativa
  unsure (1)..(89): unsure at all Xaa locations
  Clone ID: PAT_MRT4530_6633C.1.pep
RCALTVVPLPXHALPPFHRSAPHARXQRRCRHQVAITPSCRHGSSRQRRHSPVPSSLCRSVTLCPFCSRLTTPPLXSTGACPIGRHGAS

SEQ ID NO: 167760 - protein, 90 aa, Oryza sativa
  Clone ID: PAT_MRT4530_66340C.1.pep
MELTVEWSGSLGGGGESSMLGRNQSFSCWLCCGVVDDESGEQRECLSGELGGDCRIGLVEEMTNSEREKEEGGEGRRRGAFVQFFNCVEG

SEQ ID NO: 167761 - protein, 104 aa, Oryza sativa
  unsure (1)..(104): unsure at all Xaa locations
  Clone ID: PAT_MRT4530_66341C.1.pep
QQRGAAFFKASXLGSALSISSSACDHIRDWVFGTPTPPFVSLGVYSXGSHGAPPFLFSSFPPPCSGGEWTPPQGLPFYEFSRKKLXLTAQEQSEYXRLFFSCLN

SEQ ID NO: 167762 - protein, 60 aa, Oryza sativa
  Clone ID: PAT_MRT4530_66342C.1.pep
TAPGSGATSSLAGSASGSAGSGSASLTSYAAGSAASGSASLVSATSASAGHASSATASAG

SEQ ID NO: 167763 - protein, 662 aa, Oryza sativa
  Clone ID: PAT_MRT4530_66343C.1.pep
STQRLPKTRARMAATPATATFPHLGLRPKPLLRRRLRRIAVSVSPSGPDETPADDPPVIPSILVKNTEPEDVARRRSWVEHGWAPWEEIMTPEVAFARHSLNEGEEVPLQTPESQEAFRMLTPAYREKVESEPGYEERLFATRDTPEPLETSWAGELPLRLVPPRDWPPPGWEVDPGELEFIREAHREFTERLDMAAVAAKGVTHVDKVENAPDDLGLDRYKMFLKQYKEWVEANRDRLEEESYKFDQDYYPGRRKRGEDYKEDMLELPFFYPGQICRGRVISVHLYQGAFVDIGCVHDGWVPIKGNDWYWIRHHIRPGMEVHVEILAKRDPYRFRFPLEMRFVYPNIDHLIFNRFDYPPIFHRKEDTNPEQLWREGGRPPIPRKKPLKDMEKEPLVSDHPFVETLWLWHNAEQMILDHEEENPDKFKDTTYESTVDSSIVHEENRVQHTEGYFKDTLLKKEVVNIDIKELDLDAARAERQLIKKLRKEAEERGEEYKVGKLRRNKEMDEYDLMQWRRSFEEREALIRDICCRKAFGLPVDEPGRYDVDETEVYGKDYYDPSKPMYRYDYWGEPKNTEKTKLEREVELHNQQVIGDAKKWCEMSYDDYVRQKVRMEAAEARERQRKASEPQEEDEKYEDEMDLDLKKMMDPQAPHNRCFITK

SEQ ID NO: 167764 - protein, 124 aa, Oryza sativa
  Clone ID: PAT_MRT4530_66344C.1.pep
MAITESSKGAKLLEFISAGLQQDTVCPLLMGACGVRTIDKPHSAPNITTAAESIYWYADTLHAASSRTSIWLLGAQQKLSFQNAEDGSIQQWSTGQVSRIPKEIGYAMVQAQVYSARCYKYSRQ

SEQ ID NO: 167765 - protein, 137 aa, Oryza sativa
  Clone ID: PAT_MRT4530_66345C.1.pep
MSLSRALTASRAAGSRAVAATHDRKATSRGPRHPPANCLDDSVRAAGGGGGRGGARYTTQPQDGTRRNDVFILLCPFQVLRTTAQVEWPSCLPIVQTVNSRTRGTDALADLRLPPGGELPGLHAMSTVRYRQLHYSE

SEQ ID NO: 167766 - protein, 122 aa, Oryza sativa
  Clone ID: PAT_MRT4530_66346C.1.pep
MEEDDEWADDEGMASAIFRLGKEAEDDGLGAADSKMMMMGNSSSWREQRPEEGDGVGVGAGFTIPTGPSVLGAGGIRNFAKFGGKSNVFFNTPEHNFANIREELADFTLQEIISLKGTYRTR

SEQ ID NO: 167767 - protein, 585 aa, Oryza sativa
  Clone ID: PAT_MRT4530_66347C.1.pep
MMLCCGVDCWCGALRLWRRVVLRKWLNVGSGSGDSDFSADECDASDGELDGEDRDNESYGEGTSLDGLGAGTIGRADWLPYVQHKHLFDKTDMAGDEIKSMPYRLRRRKSETLRAQYIDIRELRICVGTWNLAGKFPPSDLDIQDWLDKEEQADIYVLGFQEIVPLNAGNIFGSEDNSPIAVWEHIIRETLNKICPDKPQYKCHSDPPSPSRFNPSDYVMVMKDELLSESDSDNYGELHPLIKQNDDIAIDNDVVHDKTYENFSAASNGRVHKGKDFSRMDSVKTSDQSPNLSYEKDRSKLEETTKLLYHPERLGMIWPEQPLDMMAQCLRASTSLKALATPASLKSTVNFPNDDLSHQVNSDNGVIKSKRPCFLRIGSISVSMSIHQTHFCFVCCHLTSGEKDGDELKRNADVEEILRRTVFNPLPGLSTPKGILGHERIIWFGDLNYRINLSYERAHELISKQDWDGLFENDQLKRELSKGHTFDGWIEGDISFPPTYKYEFDSEKYVSDEPKSGRRTPAWCDRILSRGKGIRLISYRRGELKLSDHRPVTAVFMADVEVLCHRKLQKALTFTDAEVEYHLAS

SEQ ID NO: 167768 - protein, 57 aa, Oryza sativa
  unsure (1)..(57): unsure at all Xaa locations
  Clone ID: PAT_MRT4530_66348C.1.pep
QRCIHPTAPKVDRRVVIFAMAXLYLTEHNYVTELFRCVLLRCFACNDQYLLSKKKKK

SEQ ID NO: 167769 - protein, 80 aa, Oryza sativa
  Clone ID: PAT_MRT4530_66349C.1.pep
ITDKEVTPEGKKKKTQKKEGNAGKKKQPFFLGRKKKKKNPKKAKKSLAPQPKEKLGTRGENPKKPKRNRPGGQLTQKGGG

SEQ ID NO: 167770 - protein, 475 aa, Oryza sativa
  Clone ID: PAT_MRT4530_6634C.1.pep
MDNARESEDEHCLYAQELVFAYNRSMVLRAAIQLGLLDALAAGGDALTTDELAGKIQATDGVAVDRILRFLASFDVVRCSTETSPDGGAALIRRYTPAPVCRWLTKNNGEGSLAPFSMFIIDEDHLLPWQHIAEAVASGGPAPSERTHGMPYHEYIGKNKRLGGLFDHAMAQHSAIRARKMLERFEGFDGIQRLVDAGVEHIAGDMYESVPNGDAILLQWMLLMFSDEDCIKILKNCHQALPEGGKVIIVEGLLPETPNTTPAAQDSFTMDMILFVLFKVGKHRTEQEFAKLAKESGFTGFTAGLNVGMDSESNTIKSARRSPRIKSSSKSQSNTQYPTLIFVLPMTVVPLYGGGRIDREDDHIGEKNVMAFTAPPPTCAAVVEVVATCACLPPHLNARLLVTGRERKRVGAPAREEERRAPAPGRHGGSRGSNDKVKDDIGGRRCQWRWRELEGKRCGPPSTSKPGPGPDSRMR

SEQ ID NO: 167771 - protein, 34 aa, Oryza sativa
  Clone ID: PAT_MRT4530_66350C.1.pep
RPTSSVNRGASSGRRWISCYGSGSSDTVDDRCME

SEQ ID NO: 167772 - protein, 475 aa, Oryza sativa
  Clone ID: PAT_MRT4530_66351C.1.pep
MDAATVAGYFKDKSILITGSTGFLGKIFVEKILRIQPDVKKIFLLVRAADTSSAEQRVLNEVIGNELFGPLRENYGSNFYSFMKEKISPLAGDIINENLGLESLEILKLSKEIDIIVNGAATTNFYERYDVSLASNVLGAKYVCKFAKKCANLKMFLHISTAFVSGEQEGLLLEKVFQIGETLKEGCHLDIAAELQLVESVKAELTHSTNARQFGWPNTYVFTKAMGEMLVGHFGRELPVVIIRPSIVSSIYHDPLPGWIEGTRTIDSIISAYAKQTIPHFIGAGHVILDVIPGDMVVNAMLVAMAVHWSERGQVIIHVTSSQQNPLSTSTMLDLMYRYFTANPQTMGKNGKVVKTKRLNITNKTGFRAYMFLKYKLPLEVLHLVNPLLGGYFSQYYNKSIRSYRYFVLLAKLYMPYAFFNACFNGTNLARLQTATTQDQSKEACVLNFDPKSIDWEYYLYNSHIPGVMKYAHKK

SEQ ID NO: 167773 - protein, 51 aa, Oryza sativa
  Clone ID: PAT_MRT4530_66352C.1.pep
MERSGGRSRRERAAASAHGGSSGVGTREEGVASAAAAVLEAERGSSGVGGD

SEQ ID NO: 167774 - protein, 86 aa, Oryza sativa
  Clone ID: PAT_MRT4530_66353C.1.pep
NRHTLPITDTWTVNYCMLVQLVNSFAFMVSYNRSFKMVQIGRFVPCTKKGTFNLKAFKNHGRNKDTSYDDRYGGLGWRSDHETTTH

SEQ ID NO: 167775 - protein, 91 aa, Oryza sativa
  Clone ID: PAT_MRT4530_66354C.1.pep
PPGPRGRLFKQKRLKGPGFFFFPRGLLQREKREGEKLLAQIFIKKKTGETGNGAGRQPRGGGKKKTFMEGGGGAKEAIPPIAAPWKDSSIN

SEQ ID NO: 167776 - protein, 250 aa, Oryza sativa
  Clone ID: PAT_MRT4530_66355C.1.pep
YDFSINWSIRFKNSLQLLLPIHQIDDETLDSFYSENSLLLLDSLRQNFIDVQQPFFYIWGAKSCGKSHLLKAVSNQYLLSQKPASYIPLTKSHYFSPLVLDNIEQMDVICLDDSQAIANNEEWELAIFALFNKIREQHSLFNQGHKALLLISANCSPHQLKIRSPDLKSRLTWGEVYQLYDLTDDQKIVILQRKANQKGIELSEEVAIFLLKRLDRDLPVLLAELNKLDRASLQAKRKLTMPFVKEIIGL

SEQ ID NO: 167777 - protein, 47 aa, Oryza sativa
  unsure (1)..(47): unsure at all Xaa locations
  Clone ID: PAT_MRT4530_66356C.1.pep
FFFFFFGISNRFIPFNSNKLKXPCQKPVHLECLYKYXIMHLWILYKL

SEQ ID NO: 167778 - protein, 218 aa, Oryza sativa
  unsure (1)..(218): unsure at all Xaa locations
  Clone ID: PAT_MRT4530_66357C.1.pep
MSIRRLQEEAGTGSSRREFAVFETARGDALFTQSWTPVAAADRVKGIVVLLHGLNEHSGRYNHFANLLNDHGLKVYAMDWIGHGGSDGVHGYVSSLDHAVGDLKEFLEDVVLEENYGLPCFLFGHSTGGAIVLKAVLDPCVEVHVEGVILTSPAIHVQPSHPIIXKRGPPVSRDPEAXKIKYADPLVYTGPIRVRTGNEILSISSYLQRNLSRVTVPF

SEQ ID NO: 167779 - protein, 958 aa, Oryza sativa
  Clone ID: PAT_MRT4530_66358C.1.pep
MTGETRKERSKWDTKGPPDIVEISEDESLPMNMDDHKKGNDDHRKGSDLLPSQDFGHGNDKQIGESLNLKSTVSMHHGSAGHEQDRADGLNKDIKERSSKASSERLPLRMGDEDHNKNDWHNRGFEKAAGNQGMSRYADDRRRGDGWGTTLSRGYSSRISSSGPDAWKRSRSPLSPRGGWNRSRRNRSRSRSRSRSIGRGRGRSRSRSRSPYFSDRGSEWRVERSRSSGGPALPCRDFVAGRCRRGSNCRFPHEDGVRRQFDEHYPVDSREKYGHQNRDFMDPREQDDYLRNRPPRGGHYDEGTWERSEPRREYRSTMPCHDFVKGRCSRGANCRYVHDDSTPHGGWRDEVRDNAIGRSGPDSSYGNRTEHRRTNKNPCKFFANGGCRRGQNCPYLHEEASQSQMGLGAPDEPGYTGGPTTRGDYLSWSEQNNSVQASSHVLSRDDRENPVPQGTGRNDSRYENKNRHSKDAGSSQYQIFPQDDFGSVGQNKPEIAASQLPQFIPSVQTGTESINIDKVSDMGGQSGPGTVGNLSMQIGMHSANLLGGHNLGQKAESQDAISQISAAPSLPGATQLQNTTSSVPLNSQVQQSDFSLHPNRQDQFAVPHATTNNSAPSMQSQPVAPYMGHSQHGYIMGAQSLPDLSVHNGQIFNVGQVPQNLPTIVHAGQNQATSDTPNLGRDSGDQGLQNTHNFQPVAPNEQTQSQTLQGLSVVASSSSVDMAGAPLSHNAVSSQEEVRRVTASLAQYFVPSLTADTSGLQSSQPDPNSSLMNNSSAAPQAVQPNHWPWLQQAGMVQPSHIVPPEQPAPQTFQAPMAAGSSNGNPLLLPHSVAPTVPAAALATNETTPAENKKEEPKDTDAEANEDGENKKSKDSKALKMFKLALADFVKDALKPTWKEGQMSREVHKTIVKKVVDKVTTTVENTPQTKEKIDIYMSYSREKLNKLVQAYVGKYAKKD

SEQ ID NO: 167780 - protein, 304 aa, Oryza sativa
  Clone ID: PAT_MRT4530_66359C.1.pep
MAIRRLQEEAGTGSSRREFAVFETARGDALFTQSWTPVAAADRVKGIVVLLHGLNEHSGRYNHFAKLLNDHGLKVYAMDWIGHGGSDGVHGYVSSLDHAVGDLKEFLEDVVLEENYGLPCFLFGHSTGGAIVLKAVLDPCVEVHVEGVILTSPAIHVQPSHPIIKVVAPIFSVLAPKYRVAALHRRGPPVSRDPEALKIKYADPLVYTGPIRVRTGNEILRISSYLQRNLSRVTVPFLVLHGTADTITDPGASQRLYQSSASAHKSIKLYDGYLHDLLFEPERDDIANDIINWLSSRLDVLQRW

SEQ ID NO: 167781 - protein, 106 aa, Oryza sativa
  Clone ID: PAT_MRT4530_6635C.1.pep
MMIIKIMSEEEGPQTSARVNHSTSVNKIIHAVIPTMICLQFSLRNTTLLALFDDHAERPVGGYFQACSAAALDLEAIFRLACSATAIHLVGLMTSKGLPTGPSTSQ

SEQ ID NO: 167782 - protein, 78 aa, Oryza sativa
  Clone ID: PAT_MRT4530_66360C.1.pep
MVYGRGSVRQTIGRKGVRDAPTEESDVLDFCKLGCTSSVCSTINIFAVNEEGNGAVDSCNNARYRFCSKEAEVVTVAS

SEQ ID NO: 167783 - protein, 52 aa, Oryza sativa
  Clone ID: PAT_MRT4530_66361C.1.pep
FLVLSFYLFFFFFFFNREQGRIFILEQGGMQINLNAIQEWHKGSQKFLHFPF

SEQ ID NO: 167784 - protein, 82 aa, Oryza sativa
  unsure (1)..(82): unsure at all Xaa locations
  Clone ID: PAT_MRT4530_66362C.1.pep
YFTNVSAVLKLLGTTNWGYILRMRGGPLMVTAKYGYSSAPVYNPKLITWGGYSSVFSPGCMVMTGXGWLLETPRGHWVRGIG

SEQ ID NO: 167785 - protein, 96 aa, Oryza sativa
  Clone ID: PAT_MRT4530_66363C.1.pep
FGLRGSCARLRGASLLGFAASPRLWGSPPSLFGLGGGAPLSSFFGARPIGPPEHPLSVQTGGCFYFGRVCAPGPFFPGNSPPFHLFPRGGPPHFLP

SEQ ID NO: 167786 - protein, 316 aa, Oryza sativa
  unsure (1)..(316): unsure at all Xaa locations
  Clone ID: PAT_MRT4530_66364C.1.pep
MAAESSLVPQTSSESIAQKMGFFRVPDLLVKLSSKCLIELDAVRSPTSPLDLIFFPGLGAKSPRSSFLGDRVGLGLVDSLTDDSSTPLGSRKVLLGSEMRITDNVTSKNSFTAPVEAGVVDQKDESMCDDLKGSFMSLDDIVNSEDYTRVVCRGPNPRTTHFFGDHVLEFEGEQLMPDESKSEESLPPRLEEAAAEAGGWGELHGERGGLDAAIAEQGSGCVGGGGGGEVEKLRRELQAFARANPFLFVDGRVPXTTRDMVKLDIEDHERRHPCIDVSGLLARYDEREERRLRAGNKRAKLLAKFVLXNPNEESLN

SEQ ID NO: 167787 - protein, 89 aa, Oryza sativa
  Clone ID: PAT_MRT4530_66365C.1.pep
MDLFLSSPLKRSPWAGVIRAEPSSPRLLEIIAIGFCCGAQLRQVTRSRRCGHRAAHIAAPRGCATYIWAITTYRSLHAQPNPPPPAIEA

SEQ ID NO: 167788 - protein, 149 aa, Oryza sativa
  unsure (1)..(149): unsure at all Xaa locations
  Clone ID: PAT_MRT4530_66366C.1.pep
ICMLGPDSSDRGSRSHGGELAGIPTXARGAAFPPPRSVVILPIEATEKFLLVKLAEGSSLAVDLSSVNTDREADWALDHCHRREVIPGEAAACGGDRASKRVEAIDGGGDGEAKGDARRRGLRRGGGVGGVGGEVKGVGGATVKIGGGA

SEQ ID NO: 167789 - protein, 159 aa, Oryza sativa
  Clone ID: PAT_MRT4530_66367C.1.pep
MAASPISAPATLRLFFHDCAVRGCDASIMIVNSNGDDEWRNSDNQSLKPEGFTTVLNAKAAVDSDPQCRYKVSCADILALAARESVYQSGGPNYQVELGRYDGRVSTRDSVVLPHANFNLDQLNAFFAGLGLSQTDMIALSGGHTFGAADCRFFQYRIG

SEQ ID NO: 167790 - protein, 282 aa, Oryza sativa
  unsure (1)..(282): unsure at all Xaa locations
  Clone ID: PAT_MRT4530_66368C.1.pep
MLAKAAAIAAGVNDCPTDXPSSPASARRASACRDTSSCTRRSQRGFAARSHKSHVSAGARARPPRDGGAPPTPRRRERRERRAEMSAVEEGAAPPHLLPLQPPHHPRPPPPPFLVPPGSGPLILSLVLLLFPSPDAVDLXFLVPIHASARASQPDAATPRWDMEACQGDAGRQPPVFVLLRLVPVSLLVYCDVGAGGVEVVEDDDGGGGGLRRRACAAPSLLRLREEMGREEEEGEGSEIDMWGPRTYDKLIPIEYDKLTTNRIVDSLQPTNLAQGDGGIEA

SEQ ID NO: 167791 - protein, 383 aa, Oryza sativa
  Clone ID: PAT_MRT4530_66369C.1.pep
MAASLAGLAFLAVTSAALLSPLAVVGQLRTDYYSTICPNLETIVRSSVKQSMAASPISAPATLRLFFHDCAVRVHLEIATDNDRSTAIDRCKQCGDQNIRSVEGCDASIMIVNSNGDDEWRNSDNQSLKPEGFTTVLNAKAAVDSDPQCRYKVSCADILALAARESVYQMKALRPAFTKKHKSSYIEKRGKAVKTRETVLSTRSGGPNYQVELGRYDGRVSTRDSVVLPHANFNLDQLNAFFAGLGLSQTDMIALSGGHTFGAADCRFFQYRIGADPAMDQGFAAQLRNTCGGNPNNFAFLNGATPAAFDNAYYRGLQQGRGLLGSDQALHADQRSRGTVDYYAWSQSAFFGGFAAAMTRLGRVGVKTAATGGEIRRDCRFPN

SEQ ID NO: 167792 - protein, 3368 aa, Oryza sativa
  Clone ID: PAT_MRT4530_6636C.1.pep
MFEDLVSKVLPALLGRYVSFQKDQLTINIWNQEIILVDVELILEAFDYLQLPFALKKGRIGKLSVRIPWKTLGWGAIIIAIEDWSSDSLDKRELDGKLAKLKAIELAKISRRITDNQTGQSLLSYILAKILDNIQVSIRNVHITYADNYKDQMKKKSYEVFKVSDRWDISSATANTNLWMLSLETIVFNLYLLDLSWWNASYIILKPYESLEVIISSLYQFCLQQGDYLGIVLFGNSTMGNFMFGLEFSSLSIQTDPKKQSFAMSLMVMSRQDEVNKTVEISNVGIYCHHLDEQQGSCDTGGLTETNFSFSHELAHPRDAYLLNPFNVTIFVLANKAGKLDGAPRYNITVELTALILSIDEIQIQQILNLCDYFSICALRTKYGRYRPSQSSLSKRHKGWQRMWWHYAQRSVLADVRRELRKTSWNYLGQRLDCRRKYVNFYRMKLELLQKGQLVSEDILQELENMDREGDIDDILNYRTIAEQKLQEALVKSTKDNFSSPGSPRIDDQSAGAGQGWLKWLSRGMLGAGGTADTSSFADVSDDIIKDIYEGTEFHPISSAENHLTKENHYSLFVRKIGMKLVDAMFTGLGVECKIWDDSTTILACLDSLEIINPLNENKVLLAEKCSTGDGLGTPVISVQVDCPKSNHSPEALTRVVVQEFSAIYEPVFIYNLMHIYDLFSSFQFQHDRVGAIWCNNLKNERSSATTWHVLSSLNRFDSFGARLLSKLKYTSANRKKLLWDLRIHHFVVRLPSRNCGTEELIMVFEAGDVSMQSKDTVRDASRTQERNSFLDYISKTLPSNFSDDLLIGVKLDDLYNHFEVKVLMPDKHDISSTFVKLDASIVFGLCIFLDEPVLKQLEVSFIVPFANMYFCQTLYSAFINLCFYYAKETDLIRNNTSDDTKSEPKKLALNMFASLKLAKLSLRVDLEDHHEESSAITVCIGDVDIRYAIQELSDIWVIVKMVQITSNNLKEESYSCVLCLSGNCKTCVNLTGFPESSTSDACLKLHYRTLKYEDQMHHVYQLNLNDVDLHLIPSVFGQIRRFLKSLDAAYPDGTNVVLSELDLGSMKLGSANTKFPKFALSSFCGVDGTLFAGIPVDHFPFVRMDFISGHQASGGSSSKGKCNETSDLNCYCAQGPASNSLCKTKHSNCSSNSSQNSMNASLTVLDLSLVSVRVHFHESCGILATLSVPESIAALSLSDASSWDLLLSAKDIMLSSSWTSPSVHELLWSRSSHGNANILNIRIKKDFPALSTEVCIGIQNVCCVLPSKLLAMFIGFFLLDDWTSLPEEHHSVENHNLESSGESLDSMTYTFELCDCVVLFPVENQHFFGLRLGVPYFFGEFISTGSTAEFANRIPKEFFSSECMVSSRVDIISLCVVKASISLLFPDDQANFILKLDENMPRRIQSLVEKLDAGIWIQIPCIELSCSEQSSLPTFIMSKISKCNLIAEDLYFVDGMEAVFAVTDELISIGKASKLYKGNALQFLEQRILNEESPGPNDSINITVSVSDLAIFFCHSKDKGLALEKIANANMKFDVSAVLVSEKPERIDMDIVSLALQSSDSHTLVSIMSDGSLSPVFIKFAKHDGRDEILMSVPSFEFMYLSGRKQKIVQAMLCLGLMVLVQCKLPVITLQMIFDLLNQKIASDSRMNFRCDLDRMKIILEMIQGDKGTSVPFMHISKAKAAGYIHQPEGKPLHLSVDLQAEYMDVGFSHQIFSFCRSMELKFPVSSSSASSFYSVTFKVGLRKGSILLNDGRWGSHGPVIETLVKNLLVQFSQMSDRIEVSAFVDLLVNYNNIDKVMWEPFIEPSKFQLNVIRKCANHALDISPSTEVWLNSSNQLNLNISEPLIEAILRLGQMITNSLNPVSEGGLREDIGILRLSRDDVHTRRYAPYILANDTSLPFKFRVYRGAVNSDDIDSFSVVDENSVPAGYAVPIYVEEALDEFFFQHREARSSEHLIEKRMSAVSHYMISIEFDATSGSSKPMSMDLVGIYFFEVNFSSSKKPLSEESWEAFASNRKGSHESGLIVPVVLDVSLHNYSKLIRVYSTVKLYNATSMPLELRFDIPFGVSSKVLGPILPDKEFPLPVHLSEAGQIRWHPVGRTYLWSETHSLSSLLSHESRVGFMKSSVCYPSHPSNDPFRCCVSVEEYSIPTSSSTQKSQPNYGNPIPKASKQILARKHFIRKVRLSTPLLIKNYLPVCISLTIDNGGVANEVSLKEVSFASIFFVDPSNDLGITFHIQDYRSLAIKFPRVESFSTAAKSNGPKFSLTETITFYSNELNCPLNVTLEKAMDANSGARELYLSVPFLLYNCTDLLLTITESSCERNGSTLVIPSSFELDGQTRHLLGKNGLFLVSEDPPIQSVSFWRLKSFANKIPQLDFADGGSSYSNRTAANNTKDAPKECNKEAKAYMFAPSGHTPATELLVKLNASVPNSGTETTRRDWSSPFLLVPASGSMNATIPQSSSSGAFLVAATSIPVSTELFGRTRAIAFQPRELLVSIRFDGPGWQWSGSFFPDRLGDVQLKMRNSASGVSNMIRVEVQNADIDVHSNKFAGRNNSNTGTILILLSDDKTGFVPYRVDNFSMEKLRIYQQKCESIETIVYPYTSCQYAWDEPCYPHRLTVEVPGERSLGTYNLDILNDDIHVSLPLTSEFCVEKDFILLGPSQKRLKVLSVIDSNCHNMDKRETNLLGSREPKDADQKQELELNFSDVFRIHLPFIGISLISSLSQELLFASARETRIVAMQSLDQQQITIEMQSMQIDNQFSDSPYPVMLSFEGSHKGKNMNFFKSRDTKVRSPNENSSPEPILRLAAAKWRSNDAPFVSYQCINMSIAPFHLELEERLVFSMIDFIRSVSTRIHLGQLDRSFDLGILDDATDIFGRYEKISKRISGKPQSSYMVEAQQDQLLPSVVPIGAPWQQIHLLARKQKKVYIELFELTPIKLTFSFTSTPWLNRNESSSDPSTSFNNSTAIQRGLMALIDVEGVPVHLGEIVVENLMASWQSIQDILVRHYSRQLLHEVYKVFGSAGVIGNPMGFARNVGFGLKDFVSASRRGILQSPVELLNGIAQGSKTLIGSTVYAVSSATSHFSKTAYKGLVAFTYDEQAASKMDERERQLSLHGEGVLNGFLEGLTGLLQSPIKGAEKHGLPGVISGIAMGTAGLVARPMASILEATGRTAQSIRNRSNPHESNRLRVRFPRPVARDRPLFPYSWEEAIGISLLFQADGGRLREETFVMCKTLREPGKFLVLTEKLLLLVSSPYLVDLGSPQFVGVPPDPQWAIETEMSLKSIVHLDRAQEVVNIVGSNGETSPRDKRGSIRNRGASSAFIPLFHFSVEMPNIEDAEGTLQILLALIEKGKARRWDKNIIHRSNIY

SEQ ID NO: 167793 - protein, 62 aa, Oryza sativa
  Clone ID: PAT_MRT4530_66370C.1.pep
QTPGGVTGRDSGDDQGGELTANHPHQQPLVTPDSFTPTGAVSADMVWPLGTTGDGGQRHTTI

SEQ ID NO: 167794 - protein, 107 aa, Oryza sativa
  Clone ID: PAT_MRT4530_66371C.1.pep
MPMPHRRCLRCAGLLLPPATSHDLLPSLARLALPNVLLPSPAELALPPSAPCLKPSAKVTSSSLPGRSSAPPPPPPSPLWPPPSVFSLAPREKTQGWAAPPPSRHRP

SEQ ID NO: 167795 - protein, 673 aa, Oryza sativa
  Clone ID: PAT_MRT4530_66372C.1.pep
MVLPKPEMPFFVLLLFLGLGCLRPAAATDERFVFNGFTGANLSFDGMATVTSNGLLMLTNGTNQLKGHAFFPSPLQFQRGPNSTAMQSFSTAFVIGIIGAFEDLSSHGMAFIIAKSKNLTSALPGQFMGLVNSANNGNATNHLFAVEFDTILNSEFNDMSGNHVGIDVNGLNSVDADNAGYYDDGTGDFKNMSLVSRRPMQVWVDFDGQTMQVNVTMAPLEVARPKKPLLSKIVNISSVIDDTAYVGFSSATGILFCRHYVLGWSFKMNGAAPALNISSLPSLPVTFPKPRSKTLEIVLPIASAVLVFAVAAAVFVFMRRRRMFSELKEEWEVTFGPHRFSYKDLFHATDGFSDKRLLGIGGFGRVYRGVLPSSKAEVAVKKVAHGSRQGMREFVAEVVSIGRLRHRNLVQLLGYCRRKGELLLVYDYMPNGSLDKQLYDQGKITLRWAQRFRIIRGVASGLLYLHEDWEQVVVHRDIKASNVLLDADMNGRLGDFGLARLYDHGTDPHTTHVVGTMGYLAPELGHTGKASKASDVFAFGAFMLEVACGRKPVAQDARDNRVVLVDWVLDRWRAGAITDTVDPRLHGDFVESEASLVLRLGLLCSHPLPGARPGTRQLVQYLEGDVPLPELSPTYQSFNMLALMQDQGFDPYVMSYPMTSTSAGTFSDLSGGR

SEQ ID NO: 167796 - protein, 182 aa, Oryza sativa
  Clone ID: PAT_MRT4530_66373C.1.pep
MEVWRCRPLLRNARLCTRWPAPWARTARPRAHAGLPRIGRSASRSGHGRDSVAVAIAIARANTAERARCWTKNFCRPGYRGECGPRSRGSRQSRLAARDSQPPLARDSSVTPIPTQAAMRESVLRWWRAASALLLGLLSSRLSRHRVRLPLFTAGGTRGQRCTYAFKNHVHLVHVMQGEYRK

SEQ ID NO: 167797 - protein, 57 aa, Oryza sativa
  Clone ID: PAT_MRT4530_66374C.1.pep
HETGLETSIRTVMSKHRKMHNRLIVEALSWPEGWADDIDDRPIDPCDEPKLLTNILS

SEQ ID NO: 167798 - protein, 392 aa, Oryza sativa
  Clone ID: PAT_MRT4530_66375C.1.pep
MAAWRLRHSGISGVLRQRRAAAATSSGVGKRRRRRIRWRSTELRDDVEMTHRQRAVDAGVEEERGKRRGRKRGSASGLYQRLRCGRKTVTTTARLLAAARSNGGGGGGFGKRGKKGRWPARGGCRAEGSTWARGLASPGLQLKKRELETGEIQYNLTEHIAQTQEWQQTTDAQFANINNMMQQQHDDLQADAPDLLLMAVAGYFRHFADVYDFTDRLAFVAVDWCLRFHGWPIMLPLLGVYDFIAGLPSLPLTGVLAYTNITIGLLSSPPTGVFAYTVGWSHRRLLGIYVFTDRLAFVTDWCLRLHGWPIMPPLLGVYVFTDGSPSPPPTGVSACTAGLLCRRCRTSTSSPTGHLLHDSASVDWPYRLHCRSSRLLLSSALASTAGLYRYHY

SEQ ID NO: 167799 - protein, 188 aa, Oryza sativa
  Clone ID: PAT_MRT4530_66376C.1.pep
MAVSVDVGNRKKRRPDWGRKLSKETIHLISGTFDLWIWTDEPRAIPRGGPFSLTSADEEGLPTDIPLPDLEPHRNPPPSEPKEGWTYNVLIHVDTLEDLHSRKARAYKWDYEVQDDGSRYKEYPLPCRAEPDPARGPRDDNDDNDDQSRGRHRSRSLWNRLGGHSSSRSREPDRRDVQRRIGKDNIPL

SEQ ID NO: 167800 - protein, 146 aa, Oryza sativa
  Clone ID: PAT_MRT4530_66377C.1.pep
MRQWPSPAAQRATRRLPGAADGAGARPGHAAVAATRPRKKGSADLAALLLLRQQASAPNPQASLPFSPADIHLRLPPQLDMFSLHICFFRYGLNSGVADEQPNHHAFQRQPSILVAREPVGAIDEDEPHLPPFAAAGTQDEVGLRL

SEQ ID NO: 167801 - protein, 128 aa, Oryza sativa
  Clone ID: PAT_MRT4530_66378C.1.pep
MADILSKRQKYVINIIKRSGPMTRFCSMCMLEAYHEGSSAGPAETKDLSDKLRLEATGEDREGNRVVESLMTKTMARTLRLRRTRTSSEGGVGEGDKVKALAGGPGFRQMPNLTEKWLNGPLCPGRFR

SEQ ID NO: 167802 - protein, 53 aa, Oryza sativa
  Clone ID: PAT_MRT4530_66379C.1.pep
MEKGWWIGLAADAKDVEAVGLFGADAQSKAVSRRDVILMASSSSLLWPIDAPS

SEQ ID NO: 167803 - protein, 62 aa, Oryza sativa
  Clone ID: PAT_MRT4530_6637C.1.pep
YSLCLSDIWNVSLWCLYGLENPLMLWCYKFLPLNSCALFPLGCETLMVMLKHYANPRPCFNA

SEQ ID NO: 167804 - protein, 74 aa, Oryza sativa
  Clone ID: PAT_MRT4530_66380C.1.pep
MPKAPGAVLAPSFGGGYFTRSDKEGFGGVFGQNDPVFSPGAGGPPPPPGFTPSPGSGVKEKEKAPPLKGAKPPP

SEQ ID NO: 167805 - protein, 54 aa, Oryza sativa
  unsure (1)..(54): unsure at all Xaa locations
  Clone ID: PAT_MRT4530_66381C.1.pep
PEXHEQLRAGXLNFRGRVTIASXKNFQLVAAPSPPPAGXPTPSNLVSRERYCEV

SEQ ID NO: 167806 - protein, 1093 aa, Oryza sativa
  Clone ID: PAT_MRT4530_66382C.1.pep
MASMKQQQTPASSAVTAAAAASSSATAAVAACEGERKAAAINSELWHACAGPLVSLPPVGSLVVYFPQGHSEQLLITVLVHYQSGWEHWAYWLPFSVALLVWSIDSLGRTNPAIIRAFLFRKMRKKVYKSNIILRNAFSMLLETAEYLLNLSFLFQVAASMQKDVDAHVPSYPNLPSKLICLLHGVNLHADPDTDEVYAQMTLQPVNTYGKEALQISELALKQARPQMEFFCKTLTASDTSTHGGFSVPRRAAEKIFPPLDFSMQPPAQELQARDIHDNVWTFRHIYRGQPKRHLLTTGWSLFVSGKRLFAGDSVIVVRASPTEFVIPFAKYQKALYSNQISLGMRFRMMFETEELGTRRYMGTITGISDLDPVGWDESAAGERRNRVSIWEIEPVAAPFFLCPQPFFGVKRPRQLDDESEMENLFKRAMPWLGEEVCIKDTQNQNSTAPGLSLVQWMNMNRQQSSSLANTAAQSEYLQALGNPAMQNLAADELARQLYVQNNLLQQNCIQFNSPKLPQQMQTMNDLSKAAIPLNQLGAIINPQDQKQDAVNHQRQQNSIQVIPLSQAQSNLVQAQVIVQNQMQQQKPSPTQNPQRINGQRLLLSHQQKDQNLQLQQQLLLQQKQQLQQQQQQQQQNQQQLNKSLGQLVNLASQQSKLFDEELQLQILQKLQQQSLMSQSTSTLSQPPLIQEQQKLITDMQKQLSNSHSLAQQQMMPQQEIKPSLQATPLLPTVQQEQQQKLLQKQVSLADVSGVAFQPISSTNVIPKTGGAMIISGATQSVVTEEMPSCSTSPSTANGNHFTQSTKNRHCINTERLPPSTAPMLIPTSIDAVTATPLMTKELPKPNNNVKQSVVNSKLPNVAPGPQNCINHALQTDNLETSSSATSLCPSRTDGLVHQGFPSSNFNQHQMFKDALPDVEMEGVDPSNSGLFGINNDNLLGFPIETEDLLINALDSVKYQNHISTDVENNYPMQKDALQEISTSMVSQSFGQSDMAFNSIDSAINDGAFLNKNSWPAAPLLQRMRTFTKVYKRGAVGRSIDIGRYSGYEELKHALARMFGIEGQLEDRQRIGWKLVYKDHEDDILLLGDDPWE

SEQ ID NO: 167807 - protein, 49 aa, Oryza sativa
  Clone ID: PAT_MRT4530_66383C.1.pep
SMGILPRTEHCISRFCDNTLIMSYVTTLTYVKKVFLIGLNSMFWYANHP

SEQ ID NO: 167808 - protein, 158 aa, Oryza sativa
  Clone ID: PAT_MRT4530_66384C.1.pep
MAVGPARRRPKGGQAASGGWGEKAAKHVFGIAFRRNRFLKVAKCPFLPGDGKVIHCVDEVKALDLLSVGTVTTRRAGGAMGASKQRTATAALAFTRITSTSYTRCSGAHRGSRAQWRCLRCRGVALVPPPDATRNVGVAATAAVHRNRSSPPSARLPP

SEQ ID NO: 167809 - protein, 372 aa, Oryza sativa
  Clone ID: PAT_MRT4530_66385C.1.pep
LEIAVLLNADTRRSPEMVHLTVTGASYRDSNAATIGSTVPASAELALLNAARRPSPSPSPSHADAVYDIHCADPLKVATNRAAPTLERNGNGIKSDFLFLLHRYFSPEPCFTIDLAILRIHDETLNWRNGPMSTSMDTIRSTRRSNLAVAPNLTVILFMAGGSRPVGEECRRLAEEEVRRGSWRRRAGREAAADGEELGVGGGGRRLDPASAVLCQERVAARPDVEPGGLVREVELDTHGVRKLPVAVGKEEHLITAASSETLQTRRPPHFTPSASSPPAGCGGGGGGDGACSGGEPPHRGHGGERLRLRLLAGAEVDADAQYRVIVEPTRRAEAACLPAGSPREEKSERERRRKKGESERRGEREDDDVAY

SEQ ID NO: 167810 - protein, 194 aa, Oryza sativa
  Clone ID: PAT_MRT4530_66386C.1.pep
MGTSLIWWINMAGVKKKIEEHPNKWHKVLSEALWAHRISKHGATKVTPFELIYVYEAVLSVEALEEIEKEKKRVAKAYNKRVKAKLFQVGEGTRSKEFGSIEPYETKRERETAGGDDVVEWWVRRAVKKRRSSPASSERVKCSSGSARVEWNDLILRLANIILSNEKDCFVWSFHKNGQILIKSMYGAIMNCKF

SEQ ID NO: 167811 - protein, 122 aa, Oryza sativa
  unsure (1)..(122): unsure at all Xaa locations
  Clone ID: PAT_MRT4530_66387C.1.pep
GLTDLSARASTGVIIMQDLITSIRVISMDTCTQYMIRTWTMGSSTRMLISQSTPLLQYXCCMQLHGMRPKRYCGTRCHMMHRMQHVISSGLGHQKIIKTAYHMPYMCNMGAVNFQLSKCGCC

SEQ ID NO: 167812 - protein, 371 aa, Oryza sativa
  Clone ID: PAT_MRT4530_66388C.1.pep
MGGKKAKTVERNDHRLLCSDVLTEVFHRLPARTLASCRLVCKSWMSELTDPHFVHEHLKRSQQKLLLFANDKANDRSLAMVLADDTGATYQLTRPMASRSLFVHNSCNGLLCLGDSTGAVQLLNPTTGESATLPMPMYTAGSSQFSSCNWHCLGFCPSTKEHKVVHFYLGAHFDSFNVCCEIFTIGDKSWRQIGSFHGAPTDRGVHVNGAVYYLTKFRYIASSRINCLNLESENFDVMMLPPRKSYGGHCSLAELEGKLCLLVVEGGHDNPPRTMDILMLDSGDKTTWTHRYHISLPWLMPSCYFTPKHTLFHEGKIWVQLLARNLYCYDPSSSSTELKMACPESEFPFSTHTFIESIVPLRKDYFIKQIQ

SEQ ID NO: 167813 - protein, 386 aa, Oryza sativa
  Clone ID: PAT_MRT4530_66389C.1.pep
MDHRLLLLGLLLLSPAVAAASVPGEEEPLIRQVVGGGDDNELELNAERHFASFVQRFGKSYRDADEHAYRLSVFKANLRRARRHQLLDPSAEHGVTKFSDLTPAEFRRAYLGLRTSRRAFLRGLGGSAHEAPVLPTDGLPDDFDWRDHGAVGPVKNQGSCGSCWSFSASGALEGANYLATGKMDVLSEQQMVDCDHEVHSAQQMVDCDDECDSSEPDSCDAGCNGGLMTNAFSYLLKSGGLESEKDYPYTGRDGTCKFDKSKIVTSVQNFSVVSVDEDQIAANLVKHGPLAIGINAAYMQTYIGGVSCPYICGRHLDHGVLLVGYGASGFAPIRLKDKAYWIIKNSWGENWGEHGYYKICRGSNVRNKCGVDSMVSTVSAIHTSKE

SEQ ID NO: 167814 - protein, 43 aa, Oryza sativa
  Clone ID: PAT_MRT4530_6638C.1.pep
MNKYENDDGKGPPINLQLKKQLGGGAHRSTDQTLPPSITTFHV

SEQ ID NO: 167815 - protein, 209 aa, Oryza sativa
  Clone ID: PAT_MRT4530_66390C.1.pep
KSATTHNWPSSILVRRAGGPSLACTLAGCATHARTTTVAGSSSPSATRPLPGWTTRSSTASPTWEWPWWPRPSLRRHQLLCTHVLSSPIRPRRPRSGCWRWCLERAGIAGWADAVPVRRCRSYNADDFPATEFNVAVGKWLSAVKFLPEQVPSNYSPPAWLLPRYVRLIDRPGRGILAVNLFKMCFKIAIAVSVSILLLPKIMQLQFSP

SEQ ID NO: 167816 - protein, 44 aa, Oryza sativa
  unsure (1)..(44): unsure at all Xaa locations
  Clone ID: PAT_MRT4530_66391C.1.pep
RIVLCKLLFVMVLTNCNIGNISVSTSPXMISNLEKNVKGRRDYT

SEQ ID NO: 167817 - protein, 86 aa, Oryza sativa
  Clone ID: PAT_MRT4530_66392C.1.pep
MGAARIRCMRAGSGSGRYLGRKWAAAEVAVLRRPWHGIGQATVDLQSVWAMTPFSKMDTNLRCQSYPAARRNGISHFHRFLILFTM

SEQ ID NO: 167818 - protein, 107 aa, Oryza sativa
  Clone ID: PAT_MRT4530_66393C.1.pep
QIKGGPSICKPVFFPEDAKDRCRAKVDEARRPQLPPTSSPGNALIHAPLPDPARMQRIRAAPILSFDRPLPWTLSPSPNPKIAYDGDLHRFLPKPSPFAIRHRWNFD

SEQ ID NO: 167819 - protein, 657 aa, Oryza sativa
  Clone ID: PAT_MRT4530_66394C.1.pep
MPLLLHPRFPSSHAAACAHRAAAAHRDARPALRLPELHATRRRRNNVACRATRAREAPPQQQNTAAALSKEAHKYFDHAVVTVRAGDGGHGAVLAMPASPSTDAPKSPRRRSDKGKRSGVKKVSYKRNYDGSVALPMGGHGGDVVVYADEAEETLLRFHEKARYCAKRGGNVGATGTLSSRMHNGFAGETLRIPVPVGTVVKRKKGAVLADLAHPGDEVIVARGGQGGISLIDVPEYRRRKAMVLSPNIMRDVSDRVLIHGQPGEEVSLELILRVVADVGLVGLPNAGKSTLLSAITLARPDIADYPFTTLMPNLGRLGGDPALGALQFSSEATLADLPGLIEGAHLGKGLGRNFLRHLRRTRVIVHVVDAAADDPVDDYKIVREELRMYNPQYLERPYVVVLNKIDLPKAQDRLSSLAFEISSIGCEECDGNNTSEDSLNGNTGEHNTSSETKVEGGEKELRDYPRPQAVVGASVLKHIGIDEMLKEIRAALRKCFDHSLNLLLPTENSVICLLAYKPKPSFAPTPRAGEQLNMRLVEKGPSPSSTEPGTDTESCTNKQGPVAAEENNKKCCPRKQASMALGTEIEERKKELLKLMLQMKNIPHCDECFPNKEEQWIRFLQGSQASEQQRQPAFGKSVDVLVIVLYVLNIGFMLRD

SEQ ID NO: 167820 - protein, 127 aa, Oryza sativa
  Clone ID: PAT_MRT4530_66395C.1.pep
PVLPLPNKPGTILFSPTHKPGRKFGVENGPSTANPLRWVSIFNCPTVPVGRSSQLFDPTPRVVTGTPRTLGWSPGSCGKTHPWWLPPHRKKKSWETTKKKKITKKKKKDIQTVCNPLKCVAQKNRGR

SEQ ID NO: 167821 - protein, 108 aa, Oryza sativa
  Clone ID: PAT_MRT4530_66396C.1.pep
MASGRPHIPSKYSSASLHRPTCSGVSAGGGGSSRGAWDDDDDDCAARRGTPAKRAAAIALPRELVPFPVAAAVGAYWPEAGGEGLAGIAAAAAAVVAEAMETRGIKTR

SEQ ID NO: 167822 - protein, 90 aa, Oryza sativa
  Clone ID: PAT_MRT4530_66397C.1.pep
PGPQLNGFLFKTNQFLQHLPLVGQQFPIQDINIVQAKGQQFQFQQFGGFSFYRNLGQAQTFLAFNGPFKNGFSPRVYGGPRTLSPLGGFF

SEQ ID NO: 167823 - protein, 288 aa, Oryza sativa
  Clone ID: PAT_MRT4530_66398C.1.pep
MRGSRRPVAVVLSWVRRQPPKVKAFLAVVAGMAALVFIRFIVHDHDNLFVAAEAAHALGLGVLIYKLTKEKTCAVFKDFCNVGVFVNENGGLSLKSQDLTALFLAVRLYCSFVMEYDIHTILDTATLAATLFVIYMIRFKLRSTYMLDKDNFALYYVVLPCAGLALLVHPSTSHNIINRISWAFCVYLEAVSVLPQLRLMQNTKIVEPFTAHYVFALGVARFLSCAHWVLQVLDTRGRLLTALGYGLWPSMVLLSEIVQTFILADFCYYYVKSVFGGQLVLRLPSGVV

SEQ ID NO: 167824 - protein, 40 aa, Oryza sativa
  Clone ID: PAT_MRT4530_66399C.1.pep
KALGLDQIVLHSTHLDQLKHTHVWPAYNRIVIFLSAYSTF

SEQ ID NO: 167825 - protein, 149 aa, Oryza sativa
  Clone ID: PAT_MRT4530_6639C.1.pep
KKTQSSSPFLDLGGVWMGRLLKIRMFQFHPLQNGKLMPQTGCGPQQGPHPRAVFFVKPRKSLFLALVGPAPLRNQKRCLKRNPRGFPRKMTRNFQLFQEGNTPLRVDSPIVFFPFSVFPEPAIFLGKGFFCLVPPLKPLLVGPGASLNV

SEQ ID NO: 167826 - protein, 468 aa, Oryza sativa
  Clone ID: PAT_MRT4530_663C.1.pep
MGLLMRPVALLIYCTTASLFFLTSSSSAAIAGGTPDGSEEWGYVQVRPKAHMFWWLYRSPQRVNNKGSTPWPTVLWLQGGPGASGVGYGNFMEIGPLDTNLKPRPSTWLSKADLLFVDNPVGTGFSYVEGGDRTLLARTDAEAATDLTTLLSQLYRSNNTRLQGSPLYIVAESYGGKFAVTTALAALKAIHAGRLAASLAGVALGNSWISPEDSVLSWGPLLYQVSRLDENGLYLSDSLAQQIKAQVKAAQFLEAENTWQSLESIILEQANFIDFYNFLKDDSSSDANLEQQQRQRLLASLGQSRRRYSSYLSSKVTTEGGFEGIMNTVIRDKLRIIPKNVTWSEQSDDVFEALAGDFMKPRILEVDELLNLGLNVTIYSGQLDLICATKGTLDWIQKLKWDGLKNFTNSRRVPLYCSGGEAAGTQAFLKSYKNLKFYWILGAGHMVPIDNPCPALKMLGDITQSPAQ

SEQ ID NO: 167827 - protein, 154 aa, Oryza sativa
  unsure (1)..(154): unsure at all Xaa locations
  Clone ID: PAT_MRT4530_66400C.1.pep
TGDAPATHHLMEEDLGGMHAPGTQSRACLEQSSRLQTXVERSKASHHYDGTGNTFHTPPDTRSGCECIAAVSSVIWPVIDRSQAHSTPHLMXRGALAPSALNXTSYAWRPRDDCRWGRPLPSKLCTPGPISPIGHTSVTGGRKHFTVSVLLLPA

SEQ ID NO: 167828 - protein, 160 aa, Oryza sativa
  unsure (1)..(160): unsure at all Xaa locations
  Clone ID: PAT_MRT4530_66401C.1.pep
MRVRRQLAVFGPVYMLGLHFGPQLRQVRKCTDKSQVGGNKLYRIRFAIDEDITSSDTLITSHVPMIIPSPSPVRPPETALTSNGPSAFMPTPIWVILDFVESLSRYLSNASGLMSXNSSRVNGNRQNKTVLLLKPNLGLGPCNRLGPSRKCHPPPPRIST

SEQ ID NO: 167829 - protein, 67 aa, Oryza sativa
  Clone ID: PAT_MRT4530_66402C.1.pep
TWMQDVRCLVTITLHRVPEFLRMVLSRVIPSRLPVWFGRWAYRRTYVSLPSPLRLNSFIWPVGLTTM

SEQ ID NO: 167830 - protein, 106 aa, Oryza sativa
  Clone ID: PAT_MRT4530_66403C.1.pep
EDSGTHTPRMRTAFLGLHDQSQRAPWGAGAQVKRSSHCPSSAALELRETHMQPCAYCPVSRHGRLGLSVKWWLPDLAVGPLATLLRARLTPGTDGLRLNCYQLLRV

SEQ ID NO: 167831 - protein, 101 aa, Oryza sativa
  Clone ID: PAT_MRT4530_66404C.1.pep
LVLFFFFFCFFFKSFFFFFFFFFLFFFLKALYPQLFFFKNFSFSIFGLENFLGGGKKKTGGPFSLWGRPVYPFSGRGEKSSPVGAKPGTLTGVAPVIALPW

SEQ ID NO: 167832 - protein, 58 aa, Oryza sativa
  Clone ID: PAT_MRT4530_66405C.1.pep
FFPSSGCPPWWAATMRMLPPPAANAHEPAAGGIVSPSCYLPDSKLPLYAFKASPKKPS

SEQ ID NO: 167833 - protein, 648 aa, Oryza sativa
  Clone ID: PAT_MRT4530_66406C.1.pep
MLSAMKFMKLGSKPDAFQTDGGGDSRYVLSELPSDIVIHVEEARFYLHKFPLLSKSSLLQRLIIEASQNGTDEVYIHDIPGGVKIFEICAKFCYGMVVTLNAYNVVAARCAAELLGMTEDVDKSNLVFKIEVFLNSGIFRSWKDSIIALQTTDALLPWSEQLKLAARCIDSIASKATSNPCNVVWSYTYNRKSASSDEIVEARKNSQPVPKDWWVEDLCELDVDLYKRVMVAVKSRGRITSDVVGEALKAYASRWLPECFDTAAIDDDAYSMAYNHLLETIVWLLPSDKGSSCCSCRFFLKLLKVAVLIGSGEMLKEELMDRVILQLHKASVCDLLIPARPPALTTYDIQLVLTLVGRFMRRAGVTEDGIFLNNLDQEMFETDVDDESLLALSKIVDGYLAEVASDPNLSVSSFVAVATSMPDAARATHDGLYTAIDVFLKLHPNLPKAEKRKISSLMDVKKLSKEACIHAAQNDRLPLRVVVQVLFFEQLRAAAGGNNPAAAAAAASGGIARLLVEEEDDDDDDVGGGGGGDWSKSRALPTPTPSLLKKQLGSLKLAAAGDEGGGGDDGRQLARVSSVANQSSRLSLSSRSRRMFDRLWAGGKPPGGEVVSKSSDTSGSSQSPRSSAKPPASKSSSSSSRNRRYSVS

SEQ ID NO: 167834 - protein, 53 aa, Oryza sativa
  Clone ID: PAT_MRT4530_66407C.1.pep
SGTIDGGGEYNGHGEDGGYYSISASAKPAGWWTWWTQAAVAACVAVLMRMMAL

SEQ ID NO: 167835 - protein, 123 aa, Oryza sativa
  Clone ID: PAT_MRT4530_66408C.1.pep
MTIADQKESPLRSPTESPELTEGVAIIQSCSKLFTKGGGGNGGLGQQGRAEEARDGTDPTATALSPRGGSCAGEARRLSPTRRSGGSSGHETWWPLPARIRRWPSSPHTAAVDRTVGRHGGGG

SEQ ID NO: 167836 - protein, 330 aa, Oryza sativa
  Clone ID: PAT_MRT4530_66409C.1.pep
MKDHFSPPQSAQLCSSLSTGAAASTSLAGSAFGRFSYSATICLGCGAGILPAAHGFYSAAAVVRARAGAGRACPGAAGGGGRRDGGGRRPHTLAPASPPPTPSSTASSVAVTATECGCQDDMNAYAVQFNAAAKNLLERLNAKLPSASMSLTDCYSIVMELIEHPQKYGLKLVIMQLCDDRTAFVFWDAYHTSDAANQVIADRLYADMVSAGAVQGSGNATTRLHPRASRCRRRRRAVEPRRATSKALKSVAAWSGHGRPRRGIGVAGPPAATASSVDKEEVEEHLPPPPPPLVARENSTSRCRPPAACRRRQRPSKLCLLPSSHAAAVL

SEQ ID NO: 167837 - protein, 46 aa, Oryza sativa
  Clone ID: PAT_MRT4530_6640C.1.pep
DSWAWVITPPPGRYGRATAVCWTGQIPKLRGSKVVLYSDLPEQGES

SEQ ID NO: 167838 - protein, 74 aa, Oryza sativa
  Clone ID: PAT_MRT4530_66410C.1.pep
MAVKDRIVTLERPRTPELLLFLPGMVVNPNNTYHMYYGIVQRITKMPSPLVVRVVLPIGCQPAAPHRLPPAVAP

SEQ ID NO: 167839 - protein, 68 aa, Oryza sativa
  unsure (1)..(68): unsure at all Xaa locations
  Clone ID: PAT_MRT4530_66411C.1.pep
MAARKGEPPLFTPSPTCRHAGATAARRPGLRHTLXRFPGSQSRTIPMAWGGDGIRXRPVSDSDEESGS

SEQ ID NO: 167840 - protein, 63 aa, Oryza sativa
  Clone ID: PAT_MRT4530_66412C.1.pep
LCVDMEIMSIPHVYMQKTSSFIGTLQLGRLKIWDMLDDVLRFAAEYMNECMLNVVKKMDGFWF

SEQ ID NO: 167841 - protein, 110 aa, Oryza sativa
  unsure (1)..(110): unsure at all Xaa locations
  Clone ID: PAT_MRT4530_66413C.1.pep
AQSAASLSDERHLLFSCSVHASLPHASPRLARSLTPXPPAAAARXRPPRWWRRRRWIRCAXGRRSSPRGXPARPRCRLXGEITFYQLYVLSIEMVNGQFLCQAKDQGXSL

SEQ ID NO: 167842 - protein, 40 aa, Oryza sativa
  Clone ID: PAT_MRT4530_66414C.1.pep
FLPTGGVVPIVNCVAFSMQSSQAMAPVESDLERFTRRASC

SEQ ID NO: 167843 - protein, 379 aa, Oryza sativa
  unsure (1)..(379): unsure at all Xaa locations
  Clone ID: PAT_MRT4530_66415C.1.pep
MTMTPTPTRTPPTPTPTRTPPTPATTISAAEAAGPTPPPPARAVGGGLPGQPAQGPAMARHVXPPRRRPGPPTTPSXAGTAPPCPAAAPAPPPPPSPSRRHLPASRXQLPAPRPSPSSKEAPPPSSSASAATPPPLNPPPFVVDTFLGEDDHLAADEDDRFGFGLADLGHLPLPRREPRRRLADARVVQRHEAPAARRVVGVLPALVVVVHVAPVPVAPPPPTPLLVAAASSLLLAVGVVVVVAVVVILVAAAATAAPRLEPVPAAPAAVIDRSGLSQSNARRRSHLPHPLPLSALPETRTHPLSRVHPKNHAAPPSHQLHSDASSQPLRPRIAPPSISASRASLHAACHQIGVTVADIDLAPLSESQTSAINPRLSGV

SEQ ID NO: 167844 - protein, 114 aa, Oryza sativa
  Clone ID: PAT_MRT4530_66416C.1.pep
GRRSCRRARSSSTRRRSPAAGAAGTGSSLGAAVAAAATSMTTTATTTTTPTARSREEAAATRRGVGGGGATGTGATWTTTTRAGRTPTTRRAAGASCRWTTRASARRRRGSRRS

SEQ ID NO: 167845 - protein, 108 aa, Oryza sativa
  Clone ID: PAT_MRT4530_66417C.1.pep
HHHRIPLHPSQASPPPLAAESATAAPPLTVHRRRNWGRWGTGSGGGSRTGRQEGDAGETALPLGRQEGESGMWGGWGTGQEKARTAAVRWLDAGKTAPPPPHGRPDAW

SEQ ID NO: 167846 - protein, 49 aa, Oryza sativa
  Clone ID: PAT_MRT4530_66418C.1.pep
MAIILKHINLNPMTYTELSDNLNGVEICRLNASLRPNTGAMLSGKDASV

SEQ ID NO: 167847 - protein, 61 aa, Oryza sativa
  Clone ID: PAT_MRT4530_66419C.1.pep
SDGRSLCKNASGWAFSVFVPAEGHSGHMLVHHLQDPPEGIRVTGFQPGSSSPPWWAPMSTQ

SEQ ID NO: 167848 - protein, 109 aa, Oryza sativa
  Clone ID: PAT_MRT4530_6641C.1.pep
SALSPPTLSPGASNRVCNALALLQCVASHPETRILFLTAHIPLYLYPFLNTTSKTRPFEYLRLTSLGVIGALVKVDDTEVISFLLQTEIIPLCLRTMEMGSELSKTVCR

SEQ ID NO: 167849 - protein, 172 aa, Oryza sativa
  Clone ID: PAT_MRT4530_66420C.1.pep
MAAAAARLLLLAVVAAVFLLSPAAAGRPCGHAQTLLISFSSVSRPNPDPNNPTPLTTTVVTVLRVRRLGPHHPLQIPRPDPLPAASDAASSVQERAKDILVVVSGLLFGFGCGALTAATMYLVWSLLASTCAPSYDEVYGEDDDDELSDSESPKKAGYVIIHDAEQYVGGKN

SEQ ID NO: 167850 - protein, 312 aa, Oryza sativa
  Clone ID: PAT_MRT4530_66421C.1.pep
MVAFRRIRISYSDPDATDSDSDSDSADAGDHDISSRSSRTNAAARRKVIVISLSRKKGRSLSQSGRHYRRRRSEIPAAAAKAVEAEDWPSSSDGMRRGAVAAARSASAAAKKGSRGGVYQRQPGRWAVDFRDSQLKVRQWLGTFPSEEEARAAYDAFEVQVRASLSRGGAGASSPAVAIAPSPARVKIQLPAPRRASGRRKKTQTTATVTTTTTTESLSQVTASSASPSSKEAPPPSSSASAATPPPLNPPPFVVDTFLGEDDHLAADEDDRFGFGLADLGHLPLPFLDDNDMDFKLSDSDDLSFLFDIGFM

SEQ ID NO: 167851 - protein, 434 aa, Oryza sativa
  Clone ID: PAT_MRT4530_66422C.1.pep
MDESIPKAWERLQEYVAACPHHGMEEWVILQSCYNGLTPMSCDHLDVAAGGAFFSKTVCGSTGHFGNDCSETREEAMYMGNKNNNGFRPQGGQGWNQPSPYYQGGNNGNFSNQPSLKDLIFSQAKTTDALSKKLAANEKILKNINVKLDGISSAFQNQLSFNKMIETQLAQLAAFIPANESGRITGQLEHSVKNVKAITTRGGKSTRDPPYPNPAGTRSSSSQEALPNNTAETEEVAQPKGIVPQEYCDTRLLPFPQRYRKPSVDEQFARFVEVIQNIHIHVPLLDAMQVPTYALYLKDILNNKRPLPTTEVKFDQALYDLEASVSIMPKEVFDKLNFTVLAPTPMRRELANSSVRYSAGIAEDVPVKIRDFFIPVDFVVLEMESDKETPLILGCLFHSTAGANIDVGTGSIHFRINRRNRSSSFSQGLSNAPW

SEQ ID NO: 167852 - protein, 76 aa, Oryza sativa
  unsure (1)..(76): unsure at all Xaa locations
  Clone ID: PAT_MRT4530_66423C.1.pep
ATTVRALTPHTTGARPSDVSVPSFSRMICGCIMDAXARSSRXRGXXXAGRWRSEGRPEGEGEGEESSEGFSPDAGS

SEQ ID NO: 167853 - protein, 186 aa, Oryza sativa
  Clone ID: PAT_MRT4530_66424C.1.pep
MALLVWLEEVVGVGGRPAMLTGADSARAAPSTSPAPSTRPAPSGGAGSWHLRAPPPPRVTPIRPLLPPPHAASTARTWRTKRAHLCRASPCSRDHRVTPALRPAAGQPLLVPLQCGCPSCSPNAYVPMQFGDRGGRPKGRLIGARLRQQRRRPPPSNSSRSPLGLTATATPPRRRYHRPCTAGLTE

SEQ ID NO: 167854 - protein, 400 aa, Oryza sativa
  Clone ID: PAT_MRT4530_66425C.1.pep
MACLAPHFKWAPCPHAHHHHSTSLPSSSSSSTSAPSSSSRCSFSRGGPFRVHCAVTATTSAAAPVVVEAPGGGMRLAYAAAPDSSAPALQKKIQSALASEVFLNEEAVVTAAAAEAVALARAAAEAAQEVVRMVQNNKNERNTRPKKAVVNYLANEILRTEMKPNILDKYSDGILSEEIESYGILSDEAELDGDTQDIPSIAVKSARQTERRARRTRAAIKAATIVRTSPKPATSSKKKRSKGASSGTNPLGSLWKMTGRRLLTAKEEVEFSEGIQDLLKLEAIQAELAEYNGGQPTFAQWATAAGVDERTLRKRLDHGIYCKNRMVTSNVRLVISIAREFEGPGMELYDLIQEGMQGLIRGAEKFDASKGFRFSTYSHWWIKQAMRKSVSEQSQIFRLP

SEQ ID NO: 167855 - protein, 65 aa, Oryza sativa
  Clone ID: PAT_MRT4530_66426C.1.pep
MSSGGAATALAPGLAAARRRTKAGSSTAACHERQTALKHARDVTGRFTKMWEKNTSSGMDVVVPA

SEQ ID NO: 167856 - protein, 116 aa, Oryza sativa
  Clone ID: PAT_MRT4530_66427C.1.pep
ADPVSPPPSPPPPPSPPSRAPPPPPPLPAVPCRASPRCPHVVFRSGARLAPLPPRRPPARLRWRGAPPPTPPPRGWPARLRIRSGGWSEEGASAFPQGRLLTWSMIGLELLEVLRE

SEQ ID NO: 167857 - protein, 476 aa, Oryza sativa
  Clone ID: PAT_MRT4530_66428C.1.pep
MSSRKKSTGPSTRGSYHHPSIDSSVKPLHDYQQLLISAIGVNCIISQAAPKLTKRSDKTAASTTSTGLADFSMLLFVTGVYIRMMHSTMSKFLGLETYITAASLVMADYAVLLLINTRYIGVFIIPVILLVFIAALCTKLWDKSSPYIQQDYRISRVSLLHVPNTEWLLKLATLPCWLQLLSSTILNPDNEQQDDTIVFSQFLLFFSSALGALAVMVAKLPAGVSPGAAQVLPVLQKTCIVLLLITVHTMAAEWIGEDVIVACIPGLVAVLVWFTVHFDHDARNATAVSIDNVLSYRSQAVTILSSTVGLLAYLTGSYAAYERELVKSRCRWSLCMVSSSSALSHVNLWMLQHWPERTFHLEELLKLFRFCRKICLSATLVLALMSIGGWVRNLIAGSIAIVSALVGFALFVTMGRKPEPRNVCRTRKNAASRFGQDDQNPSSQRFSKESRPSGGFFAPAFESFGDFIDRKLGIAN

SEQ ID NO: 167858 - protein, 108 aa, Oryza sativa
  Clone ID: PAT_MRT4530_66429C.1.pep
SGPCLSVSLHSSSSSRDSRWGSLPAARREEEQGWRWRLVEDERQRRHLGEERRRLKGCGLDGAGVRRGWRRHSVGRGGDGAASASGGGALALDGSKATLQLGGVRGVR

SEQ ID NO: 167859 - protein, 341 aa, Oryza sativa
  Clone ID: PAT_MRT4530_6642C.1.pep
MANLQPSLSIPPSFAGASPPSPSPIGGGGVGGGVGQPAKDMKMASAEQLVLDLCDPELRENALLELSKKREIFQDLAPLLWHSFGTVAALLQEIVSIYSALSPPTLSPGASNRVCNALALLQCVASHPETRILFLTVLVFETHEDEDKVGAPHIPLYLYPFLNTTSKTRPFEYLRLTSLGVIGALVKVDDTEVISFLLQTEIIPLCLRTMEMGSELSKTVATFIVQKILLDDVGLRYICATAERFFAVGSVLANMVVSLAEQPSTRLLKHIIRCYLRLSDNSRACAALQTCLPDMLKDGTFNNCLRDDPTTRRWLQQLLLNVTGAGMGAAPQPGLDHMMGI

SEQ ID NO: 167860 - protein, 51 aa, Oryza sativa
  Clone ID: PAT_MRT4530_66430C.1.pep
IIGEPRVRPGEVITHLSPKAQMRYIGAGALYCVYQFASPFIRLPTISCVFC

SEQ ID NO: 167861 - protein, 37 aa, Oryza sativa
  Clone ID: PAT_MRT4530_66431C.1.pep
RCSQHILTRQFLSNVVILSNITDQKIIHPQTCYSMYG

SEQ ID NO: 167862 - protein, 136 aa, Oryza sativa
  unsure (1)..(136): unsure at all Xaa locations
  Clone ID: PAT_MRT4530_66432C.1.pep
MERRPEPGRLGAQQKKRRRSARVSPPATARRDGHHTHGATDRFEVDPWRRVGGEQDLQTAACGGGDGAVGLSFETHHGGGVAPSPEFAACTASSCXRGELLVHHDRPSHHHRRRFPTPQPAEAAAAVEVGWGFQVL

SEQ ID NO: 167863 - protein, 64 aa, Oryza sativa
  unsure (1)..(64): unsure at all Xaa locations
  Clone ID: PAT_MRT4530_66433C.1.pep
LQALLHVQLGVETKGNPKHAFPSKETSKPNETQSDSDLPVRPATHXRRSDRHSIGDLTAQHTTV

SEQ ID NO: 167864 - protein, 152 aa, Oryza sativa
  unsure (1)..(152): unsure at all Xaa locations
  Clone ID: PAT_MRT4530_66434C.1.pep
FVAAAAGSCWCGYGVGGADLAKLCXAAAALQSGCSSGWWWRAAPSPLFEVDPWRRVGGEQELQTVACGGSDGAVGLSFETHHGGGVAPSPEFAACAASSCSAEIMVLLLLQRGELLVHHDRPSHHHRRRFPTPQPAEAAAAVEVGWGFQEIQ

SEQ ID NO: 167865 - protein, 236 aa, Oryza sativa
  unsure (1)..(236): unsure at all Xaa locations
  Clone ID: PAT_MRT4530_66435C.1.pep
SACIAAGCKPPMLRRIAALRPPPPPXVAAGYASKSTTAASAGPRLRRHHGVRRFLVLYSVLLYAATPTALAGGGGGAMSVPFSRLGXQLRLAPLDAGRFLLRHPHAFHRVLHAXRLTPRAATALRLEADTIASSLPASIIRIRKLLLLAPPPAHNRLRLRLEHILLLGETRKANLDRMFTSTGRGWDELGGGRRGGAELREEFLGEASDRRANIKADGDYGGDCGHDSGVESLYIE

SEQ ID NO: 167866 - protein, 117 aa, Oryza sativa
  Clone ID: PAT_MRT4530_66436C.1.pep
IKGKPITEIVAPEVIKEAIEDEINIFASIAQACLRLRGEERPPMKQVEISLQSIRNKVLSSGSASSESTHEIETPLCESYVDLHQTMGVDINGIANLISSNCYSLEHEFMLSASFGR

SEQ ID NO: 167867 - protein, 124 aa, Oryza sativa
  Clone ID: PAT_MRT4530_66437C.1.pep
MTTPTAWRVWMEGVGEAVKQWIGSWHWAARWSLARQMKHFPLVSAQKAQWAAERGRNETHPKLPSRPRTTSAKERGAPADSDLGRETSGDLRRRRTGVGDADGSVGAGGWGGSGVGMSGFFYYY

SEQ ID NO: 167868 - protein, 895 aa, Oryza sativa
  unsure (1)..(895): unsure at all Xaa locations
  Clone ID: PAT_MRT4530_66438C.1.pep
MSSRQDKEKSVNVQVLLRCRPFSDDEVRSNAPQVITCNDYQREVAVTQTIAGKQIDRVFTFDKVFGPTAKQRDLYDQAIIPIVNEVLEGLNGAETSKLQSHSNHTHEAQVKSLEDFQKAYEEQSKSEEQKLLADITSLVSKHVTRQRELVGGRLNSLGDAARGNKAFLDEHTSAMEVVTKDAKRKWEMFAEQAENDCKVGSNFSAAKHCRMETILQECACTVDTAAQQWKASHATVNDLCRKQIAEVEALVRSAIETNEQHEAEIASSRATAEEHASNSSKDLLQDVDNMLQEARNSSSRVVSTVEAHLGEIQHLQESHSSHTAGINTHADNAFQSSYKDYEPTGETPVRSEPEVPSKDAIESLRAMPMESLMDXSSARTTPTSRARTAGHRSSLARRSPPSTTDENPLETQRNAICLCVCTSVILLAVSRSSNAGFWCPLVVVAQCQCQCQSSFLLWKKDEKNSEKRKAENALIQQACLLRSDLEKSNRENAALYSKIARGDKLNAANRSVVNSFQADLASKLDILSTTLATSIDQQNKHLKSVENLCKSCVDSHDTLLACVEGEAQKIFGDIQNLLADHRSEVAHFTQELRESFRISLDRTKDMSSFILGLFDKYVEETSKLQSHSNHTHEAQVKSLEDFQKAYEEQSKSEEQKLLADITSLVSKHVTRQRELVGGRLNSLGDAARGNKAFLDEHTSAMEVVTKDAKRKWEMFAEQAENDCKVGSNFSAAKHCRMETILQEWSAIETNEQHEAEIASSRATAEEHASNSSKDLLQDVDNMLQEARNSSSRVVSTVEAHLGESQHLQESHSSHTAGINTHADNAFQSSYKDYEPTGETPVRSEPEVPSKDAIESLRAMPMESLMDEFRENHPYEPSKDRRPSLIPRSPLATINN

SEQ ID NO: 167869 - protein, 68 aa, Oryza sativa
  Clone ID: PAT_MRT4530_66439C.1.pep
GAGAGATDEPSHDPAALYGGFGFLLRFLPCALDWSVGGIGVWQGHSILQSGFSSPVRQCFVHFSPWHF

SEQ ID NO: 167870 - protein, 230 aa, Oryza sativa
  Clone ID: PAT_MRT4530_6643C.1.pep
MTTAARPTWAPAKGGNEQGGTRIFGPSQKYSSRDLAAHTTLKPRKEGQHTQEELQKRNLRDELEERERKHYSSKDKSYAEERDRRKSTSLLLEGSRREAEDKIVPREIDADDSDVEPRSDDESDEDDDDDDDTEALMAELERIKKERAEENLRKERQQAEEEAKMKEAELMRGNPLININNAGSFNVKRRWDDDVVFKNQARGETKTPKRFINDTIRSDFHRKFLQRYMK

SEQ ID NO: 167871 - protein, 1363 aa, Oryza sativa
  unsure (1)..(1363): unsure at all Xaa locations
  Clone ID: PAT_MRT4530_66440C.1.pep
MAPHPHLRLLLVVGVAVGSPGRGCGGGEVEEDAAGPEVVGPYSILIRHDLAPPSTPAPTQLAVSRAATCLGAHHGKREICPCCHFLEELNQVLETNMAGEALRVVLSSAFVGCHTFGXGIYPPLTPEVRVGSSVCVSACTVSLDEVNXTLADLSVVTSTALVFGPPAPTLAAPEGXPGWDHVVGGRNGTCFVKERQTQDLSFGXISLRDPGSCSRLHRPSQGLPVTAFGSMXGIIGGIGCSCSEELIMSRAGVXDECFSADQSNGSTQSTLYLKAXVLIVHWLTLCSLRVGSGCTXKVLFTLYVYNRHTIAXIFLRGXKCSGCGGNAGNDRTLYETVPTSLVVSNNNFSIQNKGVLEQLLSRXLDTIEFINSSQAXLKRCDFVVVFSSXLSVLCTLPLDVDLXRQALTVKLVLPAWKLLMSDSTIKVFGALRMSVKMLLMWNSKMLIDGGGDSIVATSLLDASNLIVLKESSVIHSNANLGVRGQVKSGSGGVHLRIFRAALAGAGVVKYSSHLFLCASIRAPKLNCDDDICPVEIIHPPEDCNLNSSLSFTLQVCRVEDIDIWGLVQGTVIHFNRARSVSVHTSGTISATGLGCRSGVGQGKILNSGVSGGGGHGGRGGDGFYNESHAEGGSMYGSADLPCELGSGSGNDTTKLSTAGGGIIVMGSWEYSLPSLSLYGSVESNGQSSTDVVTNASIGGPGGGSGGTILLFVRALSLAESSILSSVGGLGNFGSGGGGGGRIHFHWSNIPTGDEYVPVAAVKGSIRTSGGISKGKGFPGENGTVTGKACPKGLYGTFCKECPLGTYKNVTGSSKSLCVQCPPDELPHRAIYTSVRGGAYETPCPYKCVSDRYRMPHCYTALEELIYTFGGPWLFGLLLSGLLVLLALVLSVARMKFVGTDELPGPAPTQQGSQIDHSFPFLESLNEVLETNRAEESHGHVHRMYFMGPNTFSEPWHLPHTPPEQISEIVYEDAFNRFVDEINTLAAYQWWEGSIHSILCVLAYPLAWSWQQFRRRKKLQRLREFVRSEYDHSCLRSCRSRALYEGLKVTATPDFMLGYLDFFLGGDEKRPDLPPRLRQRFPMCLIFGGDGSYMAPFSLHSDSVLTSLMSQAVPSSIWHRLVAGLNAQLRLVRRGSLRGTFLPVLDWLETHANPSLGVNGVRVDLAWFQATALGYCQLGLVVYAVEEPMSAELDGSPRIKIEQHSLTQNMHADTQLGHSRIKEALMRKRITGGILDSNSLRTLKDRRDLFYPFSLILHNTKPVGHQDLVGLVISILLLADFSLVLLTFLQLYSYSMADVLLVLFVLPLGILSPFPAGINALFSHGPRRSAGLARVLVAFACGLVHYKSSTKRHPSTQPWNLGTV

SEQ ID NO: 167872 - protein, 94 aa, Oryza sativa
  Clone ID: PAT_MRT4530_66441C.1.pep
TIIEELGRRLAADGREALVRPPSFFFGVFFFFFFFFWGSNSFFFFHGKKTPRTQLTQGRWALPSTHLEIYPPGGLKNVCTFITGGKTSLPASSF

SEQ ID NO: 167873 - protein, 95 aa, Oryza sativa
  Clone ID: PAT_MRT4530_66442C.1.pep
MMVGKPGSSGFDGSGGGGGNGFDGGRWRQRRVRRRLVSGSRKHAAEAALMMVREPDGSGFEAEVKAKATAANYIIFGCPRDNFAYGKTDVDYDNI

SEQ ID NO: 167874 - protein, 261 aa, Oryza sativa
  unsure (1)..(261): unsure at all Xaa locations
  Clone ID: PAT_MRT4530_66443C.1.pep
MLSGPARVDASVITHGPWIFVGITKSVEAWNTQTGMKSSLREPSGLVCSMTIKDEMLFAGTGDGRIMAWKIPDKKGDSGPVAILSGHERQVISLGVSVTRLYSGSLDKTIKVWYXDLKTLQCVQTLSEHKAAVTSVLCWDEKLLSCSLDKTVKIWAASKSGDLQVIYTHSEEHGVRTLFGMHRVGKTPVLFCSLHNSNCIRLFDLPSFDEMGKLFSKKEVRTIELAAGGLLFTGDGAGELKVWRWAPXEEPATPALVKSSM

SEQ ID NO: 167875 - protein, 154 aa, Oryza sativa
  Clone ID: PAT_MRT4530_66444C.1.pep
VAWDFLTPLRFLQRFEWFLHDCIFSKIPEWIGELDNLCILNIAVRELVKNGINILRGLPALTSLSLNVHTTSIEKVIFDKGGFSVLKYLEFRCSAPWLKFESDALPNLRKLKLVFNSLFENIHGTAPISIEHLSCLEEISAKIRGGGNVERTRG

SEQ ID NO: 167876 - protein, 151 aa, Oryza sativa
  unsure (1)..(151): unsure at all Xaa locations
  Clone ID: PAT_MRT4530_66446C.1.pep
PRVRVVNGLLNLSGEGDIIEAQRLILSLFYSIKVGPGSILRGPLVNGSSGDVAPKLNCDDDICPVEIIHPPEDCNLNSSLSFTLQVCRVEDIDIWGLVQGTVIHFNRARSVSVHTSGTISATGLGCRSGVGQGKILNSGVSXGGGGHGGRG

SEQ ID NO: 167877 - protein, 47 aa, Oryza sativa
  Clone ID: PAT_MRT4530_66447C.1.pep
VRLVPHVGFACLPLRCLVLALVKFCSRPWPSFHEPLKPAHNVQYTSS

SEQ ID NO: 167878 - protein, 291 aa, Oryza sativa
  Clone ID: PAT_MRT4530_66448C.1.pep
SLASRLGPGGPTRWSPYARAPDPGHGAGRSSVPPGGGGNSRPPLRVAPATARLLGHPARKGAAAPPGSRCRAEAEAEATAASDAACPNPPRRGCEETNPNPNPKRNPKPAERGEEPPVRAVGCGGFAFLCALAGHTEAISGISLPVGSDKLYSGSADGSVRVWDCNSGKFSLADGPYMCVDAIKMGGKIGCMITHGPWIFVGITKSVEAWNTQTGMKSSLREPSGLVCSMTIKDEMLFAGTGDGRIMAWKIPDKKGDSGPVAILSGHERQVISLGVSVTRLYSGSLDKTIK

SEQ ID NO: 167879 - protein, 69 aa, Oryza sativa
  Clone ID: PAT_MRT4530_66449C.1.pep
AINSFQNPLLSACQKILFFLPQIDNSDVGYVLPMTSHPPLVRNDVMQPTKKCFLFIADSSRLTWSANVF

SEQ ID NO: 167880 - protein, 133 aa, Oryza sativa
  unsure (1)..(133): unsure at all Xaa locations
  Clone ID: PAT_MRT4530_6644C.1.pep
GYRRRCGDRGTGTADFFFFFCGGGGATCAHXQGGGGSSGQGRWCWWLARQRRPWRGVXGRRGEASTPTVTXAPVEEAAPQQAEDGVEEARRDHPRHCPDLADAGPLSSTSAAGDDDGDPFLLAGFISMLLDFS

SEQ ID NO: 167881 - protein, 283 aa, Oryza sativa
  unsure (1)..(283): unsure at all Xaa locations
  Clone ID: PAT_MRT4530_66450C.1.pep
GRALSTAIRAPPPRVNQTLTRPNPPLDLASAVRRRRLRRRPPKPYRLSSPPSAADAPGIQQGDRRLKMPSASKSKSKDRSAAKAPKEQPKVAAKPMGNGTVASAYNNFSGKFHLLEPSSSLLVSQGNDKLRNTDEIDEHSRSSHGTGDFDCASNNGSCSGESEDPKEKSTSTAPRVDSVPGCDVDKREKIRQKNEKKHQRQKERRAQELHERCKGYLMSRKLEALAQKLVAMGFSSDQATXALIQNEGCPXESVAWLCSFDGSEEANSNSSRSTPGXNLKMIY

SEQ ID NO: 167882 - protein, 375 aa, Oryza sativa
  Clone ID: PAT_MRT4530_66451C.1.pep
MTDVELRVEALSLSGVSAIPPEYVRPEEERADLGDALELARAASDDDATARIPVVDISAFDNDGDGRHACVEAVRAAAEEWGVMHIAGHGLPGDVLGRLRAAGEAFFALPIAEKEAYANDPAAGRLQGYGSKLAANASGKREWEDYLFHLVHPDHLADHSLWPANPPEYVPVSRDFGGRVRTLASKLLAILSLGLGLPEETLERRLRRHDQHGVDDDLLLQLKINYYPRCPRPDLAVGVEAHTDVSALSFILHNGVPGLQAHHAGTWVTARSEQGTIVVHVGDALEILTNGRYTSVLHRGLVSRDAVRLSWVVFCEPPPESVLLQPVPELLADGAGKPLFAPRTFKQHVQRKLFKKLKDQQDNNAAAASNGMITK

SEQ ID NO: 167883 - protein, 171 aa, Oryza sativa
  Clone ID: PAT_MRT4530_66452C.1.pep
GKGIGGRRAAGSAANVGTLATAATREGRGHDGGSAGVGRRICPPPATTAAAGLSGGRTRREGEPGRIQRASLHPPPPSPQVDGEGGGEQRRQQGRVPPPSSPRGRNHKVEEAIMVEEGSTGGMVEGGNVVVPLLRRLCKRRRRPCPRPGGGGRMDWPGMGMADWPGGGLDR

SEQ ID NO: 167884 - protein, 225 aa, Oryza sativa
  Clone ID: PAT_MRT4530_66453C.1.pep
MENHKDHTCKIATTTLVIVPLLLSLHQLYLFFLHLLPYACVVSVAEMTKMSSMKADGSVPKRRRQDVQKVVVSLKDHKVEQGPPADSWSWRKYGQKPIKGSPHPRGYYKCSSYRGCPARKQVDKCRNDASLLIITYTSDHNHDNYAATTTNSVQEQAHNPDTSDPLSNGMSLAEVVTVASSKLSGEEESCDFFDELEELPVSASPLPSLSFMVQECSFSDARTLL

SEQ ID NO: 167885 - protein, 109 aa, Oryza sativa
  Clone ID: PAT_MRT4530_66454C.1.pep
IVDPPGCRLTTTFFGFLFVASSAIASTAPPWTSLLRAAARAPDSPVNWPTRMNIAMGVARGLHHLHAEASIVHGNLTSRNILLDEGNDARIADCGLSRLMNATANSNVI

SEQ ID NO: 167886 - protein, 57 aa, Oryza sativa
  Clone ID: PAT_MRT4530_66455C.1.pep
RGDAKALELSLGNHGGLGAQSKPVVPCMPRPLFLVLVSEWGYWCGCFGMLFPMYWLG

SEQ ID NO: 167887 - protein, 70 aa, Oryza sativa
  Clone ID: PAT_MRT4530_66456C.1.pep
ERQPLSHAQPPCPLSSMFLVHPTICNTARPVGTGPQFPGDPPPPPTPGGPLGGPPGNIYQIKQTKINTPP

SEQ ID NO: 167888 - protein, 463 aa, Oryza sativa
  Clone ID: PAT_MRT4530_66457C.1.pep
MAAERKDVGILAMDIYFPPTCVLQDELENHDGVSKGKYTIGLGQDSMAFCTEVEDVISMSLTVVKSLLENYKIDPKCIGRLEVGSETVIDKSKSIKTWLMQIFEECGNTDIEGVDSSNACYGGTAALFNCVNWVESNSWDGRYGLVVCTDSAVYAEGPARPTGGAAAIAMLIGPNAPVSFESKYRGSHMAHVYDFYKPDLASEYPVVDGKLSQTCYLMALDSCYNVFCKKYEKLEGKQFSIHDADYFVFHSPYNKLVQKSFARLYYNDFLRKCSTVEDGSREKLEPYSGLSSEESYQSRELEKASQQVAKHLYDSKVQPTTLIPKQVGNMYTASLYAALASVMHNKNETLAGQRIVMFSYGSGLTSTMFSFKINEGQHPFILSNIAGILDVSKKLESRHVVAPEKFVAALKLMEHRYGAKDFTTSQDTSLLAPGTYYLTHVDSMYRRFYAVKGQAVTEVSNGH

SEQ ID NO: 167889 - protein, 350 aa, Oryza sativa
  Clone ID: PAT_MRT4530_66458C.1.pep
MGTETDVWDDTLALAATNHDPEEERRPWLAAAAAAAAAKCRCSRRRRLPEREWTAEEDERLRRLAKENLFRQWWKVAREMPGRSGDSCRARWRHHLARDVYHRPFTARDDEELVRLHRHTGGSWRKISRSVYGRTSAIMRDRWIQLRRSGLVPDAAKTAENAGCPPPAADDSEYMGSEAELKSPPPPPQQQHPLADVLASSLDSCTLASDATDPRDGILALDFAFIGDDLLLHPPLAVVEQRRRRRPLQAAVAVPSPTVSSGGGGALLRLPTGGSGGDVGFPRRSSRPPAPPRPPLLIEAAPFPGSGYDLLLVGRRSRRRLEQVLRWRTRQRRAGGGGGHARAPLFVMNF

SEQ ID NO: 167890 - protein, 73 aa, Oryza sativa
  unsure (1)..(73): unsure at all Xaa locations
  Clone ID: PAT_MRT4530_66459C.1.pep
TNYIHTNRHCFNNKNTPPPTTYTLHIYLIIHNLYPLPSIPLPIIFSIXHTKKKHTFLHTFTHIHIHIYIYKNS

SEQ ID NO: 167891 - protein, 1264 aa, Oryza sativa
  Clone ID: PAT_MRT4530_6645C.1.pep
MAAVRMTLRWDGSYQPPLRRKQMPRYKPEYLFGVEGFVQELRTMSFAIGFGTAPFYAQIPHDRHEEKCRVKVTLNSNSEDIPSVMFEAGGRNYIHACQEVARIAIGELRDRYCDQLADTEYRYHPRQPQGSDRGSYLETEGIENDATTKHLVEMLWAMDETRAETVLAAQDREDRNRGKICKLEDKVDRLEKELAALKGEAPPQKARIRLTARKRALFVPRYQLAPKVRVVEKEVTPALADPPVVNNKLAEFLRVRPPTFSSTTNPVEAGDWLHAIEKKLDLLQCTDQEKVSFASHQLHGPASEWWDHFRLNRTTAEPITWLEFTAAFRKTHIPSGVVSLKKKEFRSLTQGSRSVTEYLHEFNRLARYAPEDVRTDEERQEKFLEGLNDELSYPLMTGDYPDFQKLVDKAIRQEDKYNRMEQKKRRIAYFKAQQGNSQRPRLTLGPQSMPQGGSSSVVRPQRQFFNNNAGNNIRNQAPRPVAAPTQQQPAKKEQGSKPGVCFNCGDPGHYADKCPKPRRVKVVPAQSNSTIPASKARVNHVAAAEAQDAPDMILGTFLVNLVPATVLFDSGATHSFLSMSFAGNHRMEVEDLRRPLMVSTPSNQALSLQRSPSIRIEIQGVPFLANLILLESKDLDVILGMDWLARYKGVIDCANRKVTLTSNDGRVVTVHALSSESLRSSLNQITLEEIPVVREYPDVFPDDLPGMPPKRDIEFRIDLVPGTTPIHKRPYRMAANELAEVKRQVDDLLQKGYIRPSSSPWGAPVIFVEKKDHTQRMCVDYRALNDVTIKNKYPLPRIDDLFDQLKGATVFSKIDLRSGYHQLRIKEEDIPKTAFTTRYGLFECTVMSFGLTNAPAFFMNLMNKVFMEYLDKFVVVFIDDILIYSRTKEEHEEHLRLALEKLREHQLYAKFSKCEFWLSEVKFLGHVISAGGVAVDPSNVESVTNWKQPKTVSEICSFLGLAGYYRRFIENFSKIAKPMTRLLQEEMGSKLNFSTAYHPQTDGQTERVNQILEDMLRACALDFGGSWDKNLPYAEFSYNNSYQASLQMAPYEALYGRKCRTPLLWDQTGERQVFGTDILREAEEKVKIIQEILRVAQSRHKSYADNRRRDLSFDEGDYVYLRVTPLRGVHRFHTKGKLAPRFVGPYKIVSRRGEVAYQLELPQSLAGVHNVFHVSQLKKCLRVPTEETNLEQIEVQEDLTYVEKPIRILEIDERRTRNRVIRFCKVQWSNHSEEESTWEREDELKSTHPHLFASSSESRGRDSV

SEQ ID NO: 167892 - protein, 285 aa, Oryza sativa
  Clone ID: PAT_MRT4530_66460C.1.pep
MQIGIKENEQSTLLDPKLAPMLWFHYNYYMPLEESDDEDNEKSGDDDDVSDEDEFSETSDEDESTEETDDDGISEDNKIDVSGDDDDNTTDEAKEVNDTLVLYNISSKQLVAHDKPDDLKDHFYWITPQVGGKFYTTFGDRIVTLEFFPYPTFDIIPIKSAHNIVYHFAEICLLESSGDLFILFFYHPMTCSQKTVEIDVHKLDITRRAWVKMDTLEDRAFVVNTIKNSGVSVNAKEVYLDGNCIYFLMRGDKGLYVHNMERGTTTALNPGADVNVAAQILMPAF

SEQ ID NO: 167893 - protein, 934 aa, Oryza sativa
  Clone ID: PAT_MRT4530_66461C.1.pep
MCCPRSGCVLIQSAKGIVQKEHVNPLAIVTIMWVGDLTEQALEEGFTQHFKWNWTWKARMQEKGLFHMRFLNKMKLDELAEFDSIRVKGTSVHVKVKKWTQEAEAVGRLHEVWVTVEGVPDEMKDYDPLHEVGSNLGPVIEVDMVALKTKDVVRIRVGMMTLKSLPLTMTLMTPKLLVYKAHFKLEQIVELGWFRDCAQEKRVVEVEEQNEPGNINHMQRNKKPRKEEAASNMRVLEKAGDKKKAIVVEEDSDNESAQAELVKLKQMEIDREMALRVQLEEHFKVKQIQLDKDVAGGMIEGGIREEAQAGEEENEKTKKTQEGMADKSGTSQRVENDSEEVIYDEDEPRVQLVGSEENMESQESSDFAVAVGVVLSQTNEDMTEEKRKKSLRLLEKEEKGCALEAADTNLNLIKNLELARINLFLKEKLNTSQKGECQNVGENLSDININIDEVLHSDDCMSDFDYAENMLRLSQSNSSEHKVDFIGIQETVKQDFTAKDLDLIGGGGKFSWNWTIPKGRSGGMLVGINEDKMEIMEVSKKNFLLHVKVKNRNDKFVWRLITVYGAAQPEHKEEFLRELAQDCYGCDEPLLIGVDFNILRQENEKNKRGGVNKWSLMFNSIIENANLREMALEGKKFTWANNKQSVTLEKLDRILFNDKWEIKFPLACGRVLERIYSDHTPLLINVEGEKWLSPLFKFENSWLMREDINTVVEQVWNSCNINGSSIDKWQWRLQKMRKKLKGWNMNWEGMYKRKKHEIMEKIEDIDKKCEAYGMTILERKERGDLEEELKKVDNLMELITDFMKRKIRVERLNYGVITLIPKCKEARMIQKFRPICLLNAKGFPDIWCDWILKVVKGGKVAIRVNDQIGHYFTTHKGLRQGDPLSPLLFNIAADALTILIKRAEQQGLIKGLGMDVMREGVAILQYAHDTICLI

SEQ ID NO: 167894 - protein, 104 aa, Oryza sativa
  Clone ID: PAT_MRT4530_66462C.1.pep
STLEDPPAQLGLKQEEVCRTLDMLPICCFSCSQHQMRAPYTQVEHLKCEDEAENDIFAGTTGFPTGKRAVSAPQLMSTLEDPLTMQPHVFMGGPPMGEAGVRAR

SEQ ID NO: 167895 - protein, 111 aa, Oryza sativa
  Clone ID: PAT_MRT4530_66463C.1.pep
MARAEIGVNSRGGPWRELDKAMPWSISAAAGLGIIDRASHRISRKAYAHRVAAPLRIRRALPLARCGAPRALRCRRRARARWDEENARNLGATYADRAARGGGRSGRVART

SEQ ID NO: 167896 - protein, 949 aa, Oryza sativa
  unsure (1)..(949): unsure at all Xaa locations
  Clone ID: PAT_MRT4530_66464C.1.pep
MCCPRSXGCVLIQSAKGIVQKEHVNPLAIVTIMWGGDLTEQALEEGFTQHFKWNWTWKARMQEKGLFHMRFPNKMKLDELAEFDSIRVKGTSVQVKVKKWTQEAEAVGRLHEVWVTVEGVPDEMKDYDPLHEVGSNLGPVIEVDMVALKTKNVVRIRVGMMTLKSLPLTMTLVTPKLLVYKAHFKLEQIVELGWFRDCAQEKRAVEVEEQNEPGNINHMQRNKKPRKEEAASNMRVLEKAGDKRKAIVVEEDSDNESAQAEMVKLKQMEIDREMALRVQLEEHFKAKQIQLDKDVAGGMIEGGIREEAQAGEEENEKTKKTQEGMADKSGTSQRVENDSEEVIYDEDEPRVQLVGSEENMESQESSDFAAAVGVVLSQTNEHMTEEKRKKSLRLLEKEDKKVADAAAERKGALXNLELARINLFLKEKLNTSQKGECENVRENLSDIDINIDEVLHSDDCMSDFDYAENMLRLSQSNSSGKKRRKNNRGNLEIFKHKVDFIGIQETVKQDFTAKDLDLIGGGGKFSWNWTIPRGRSGGMLVGINEDKMEIMEVSKKNFLLHVKVKNRNDKFVWRLITVYGAAQPEHKEEFLRELAQDCYGCDEPLLIGGDFNILRRENEKNKRGGVNKWSLMFNSIIENANLREMALEGKKFTWANNKQSVTLEKLDRILFNDKWEIKFPLACGRVLERIYSDHTPLLINVEGEKWQSPLFKFENIWLMREDINTVVEQVWNSCNINGSSIDKWQWSLQKMRKKLKGWNMNWEGMYKRKKHEIMEKIEDIDKKCEAYGMTILERKERGDLEEELKKVDDLMELIIDFMKRKIGVERLNYGVITLIPKCKEVRMIQKFRPICLLNAKGFPDIWCDWILKVVKGGKVAIRVNYQIGHYFTTHKGLRQGDPLSPLLFNIAADALTLLIKRAEQQGLIKGLGMDVMREGVDILQYADDTICLI

SEQ ID NO: 167897 - protein, 117 aa, Oryza sativa
  Clone ID: PAT_MRT4530_66465C.1.pep
MGMKPPTPLSPPDPSTGRRRISSAVATANGGIEKRGGGGSCRCQIRLQSPPSPTDPPADAFDTVVAVDAAVGKALLDLEGGEGAVTEREGRLSRPTRRGRGGGTPSPPHPAFPAPCR

SEQ ID NO: 167898 - protein, 75 aa, Oryza sativa
  Clone ID: PAT_MRT4530_66466C.1.pep
LSFFSKISLFCCPYFFIGLGFLLFCSPLFGQSLPSDTVFSSSLYLVWAAFFFPFICFLSFFFFFFFFFFFGPIIV

SEQ ID NO: 167899 - protein, 80 aa, Oryza sativa
  unsure (1)..(80): unsure at all Xaa locations
  Clone ID: PAT_MRT4530_66467C.1.pep
TTNTVNPPPKKKEKEKRNRLSWTMVMHPRLWLASCSCRVLHEESRRSAXLVVVAVPXAQAKRHAATQRAGVEQNQIQQLR

SEQ ID NO: 167900 - protein, 83 aa, Oryza sativa
  Clone ID: PAT_MRT4530_66468C.1.pep
LSRNCFLLYTSHIFVFTDNTAPMVFINTVLYDGNDRVTDDGIDHVIYNDNDCRRRGAAADLADIEASPELVQSPSKQANQIKQ

SEQ ID NO: 167901 - protein, 303 aa, Oryza sativa
  Clone ID: PAT_MRT4530_66469C.1.pep
MTGHSKLRAPEHHDHELTLTAGKESFRCDGCKEHGYHMRYVCKLGGCRAGFHLHEACAQHRFGDSYQDPFKRYSLVFHKSLPRYSAGRRSLRWMRRQHLPSPNIKDFGYIAENSKLVYVNGYAYVRDIGRLRTLLKRGRVLHPCCAALPKVIEAEGSVTKLRLTRKLRSPCCKCRHVKLGDRRHTWGYVSDGGGGAGVVQIHVACANDLFREEYEGARLQQQQRTRVERLKARLVNMLRGAATGGGGGVMILPQLPTGVPEESSPSPWTMDSPVVKALLWTICTVGAVITGNPVGISNFFLTL

SEQ ID NO: 167902 - protein, 332 aa, Oryza sativa
  unsure (1)..(332): unsure at all Xaa locations
  Clone ID: PAT_MRT4530_6646C.1.pep
SRVNKPRERXARTESTGVGPTRQPLGPRWTGRTRPTGGGRARPRWSPPATTGAAERHPRERREGGSEWSGLSLTPVDGDYGNGGRSGGRRRCGSGRQGRRRSDGRRAKRRSGLCRRLLGETQGGDPERGGSXERPRXATRNSSATADREXSCASAISTXGRAANGGNGGERHGEQLNSVWXEGKRPEEGETGAEISAAIDCAGELCGHKXRTNPRERERGKWGNRERESRGVIPPTLMRAGTAGCGGFGGGGGARARAXRRARREEANDRWAPPVSEGGGRARLSAARARGRSRWAGGEEREGGKRSGPSRPQKGRGGKRTSFRVFLFINLF

SEQ ID NO: 167903 - protein, 94 aa, Oryza sativa
  unsure (1)..(94): unsure at all Xaa locations
  Clone ID: PAT_MRT4530_66470C.1.pep
CRNSARGKEKVIDGLDSXVLNMKNGKVALVIVPEYAFGFXPPNNPVIHEVELAXFVKGKXXWDLNNVGKIETTVAKKKEEGNTLFKLGKSTSFS

SEQ ID NO: 167904 - protein, 203 aa, Oryza sativa
  unsure (1)..(203): unsure at all Xaa locations
  Clone ID: PAT_MRT4530_66471C.1.pep
DHRQIQHGAHKIGRIAIIVEHPGAGPKEMRAGRGTRLSLPGPELPMFXGQELPGNRTEMKFKFRNRRLSQSSQERAQVTLLGKPLESXHKNFINLTRSLSEERRSFTNLPGTSTICNGFSRATPNCLGDXISKSNKNRDXSPRDIPKLGSRLSGEGKKXKHLGEASNNSRFEKPELLDLEDRKFWTCXFWTDGVFAKMTPRET

SEQ ID NO: 167905 - protein, 54 aa, Oryza sativa
  unsure (1)..(54): unsure at all Xaa locations
  Clone ID: PAT_MRT4530_66472C.1.pep
AXSQLAFAFXQGVAHXCAASCAVPVPGQHQGDHLMXSRMRIPXXYSSHFHNIRS

SEQ ID NO: 167906 - protein, 166 aa, Oryza sativa
  unsure (1)..(166): unsure at all Xaa locations
  Clone ID: PAT_MRT4530_66473C.1.pep
LELPVFLGQELSDNRXKKKLKFRNRRLSQSSQDGAQVALLGKPLESQHKNFINLSRSLSEERRSFTNLPGTSTICNGFLRATPNRLGDXISKSNKHRDDSPXDIPKLGFRLSGEGKKHLGEASNSSRFEKPELPDLEDRKFWTCXFWTDGVFAKITHRETLTLGSH

SEQ ID NO: 167907 - protein, 73 aa, Oryza sativa
  Clone ID: PAT_MRT4530_66474C.1.pep
SSYFLITQPFSRTYKIGKPKGGGDGQGAEGKQGSDGAGRPRVRIITHNNDHEPRVVQHEQAPASSPAPAPVSY

SEQ ID NO: 167908 - protein, 163 aa, Oryza sativa
  unsure (1)..(163): unsure at all Xaa locations
  Clone ID: PAT_MRT4530_66475C.1.pep
FSSPELSVFLGQELPGYRLKMKFKFRNRRLSQSYQDDAQVALLGKPLESQHKNFTNLPRSLSEERGSFTNLPGTSTIYNGYSRSTPNRLGDXISKSNKHRDDNPRDIPKLGSRLSGEGKKHLGEASNSSRFEIPELPDLEDRKFWTCXFWTDGVFAKMTPRET

SEQ ID NO: 167909 - protein, 58 aa, Oryza sativa
  Clone ID: PAT_MRT4530_66476C.1.pep
LLYWKIQNKFPFLFKCDPWNCMTIYYVLHGNTNHLLCSTWKFNHLIMENSSTYSSDAW

SEQ ID NO: 167910 - protein, 1452 aa, Oryza sativa
  unsure (1)..(1452): unsure at all Xaa locations
  Clone ID: PAT_MRT4530_66477C.1.pep
LGSEPVGERPASAPIQSSSREVGVILQPHGTVSTEELDGYLSSPGVDSRPTDILEYDDFGYHYDYHNLDDFDEGYEDNYTPLFFGVFMADNETEEXVKPEKQKNSAHNKKPRVADWRRSVKHKSENGCSEDAPNHVVNILNQTKTMIAASVPVNSSSVRTPTGSRVPPLSSQDYHQPSLSIAGAGSSRRSSNHGGDSKAMANYLPVALADSARSWLHGLPRGTIGSWAEFHDHFIANFQGTFERPGTQFDLYNVIQKSRESLRDYIRRFSEQRNKISDITGNVIIAAFTKGIRHELLVGKFGFKPPKTVKQMFEKANEYAKAEDAVIASKQSGSTWKPKKDVPTTGGVEFTEQYAKNARKTTDGDQSTSKKKDDEDDASTSFQDSRKELNHMFGGPLAYESKRKQKLTEREINAVQPDTPQYLQWSETAIKFDHSDHPDRVVHPGRALNILFAKTLDDMQIPWTELKPSSAPFHGVIPGLSSTPLSQITLPVTFGTRENFRTENICFEVADFETAYHAILGRPALPKFMAVPHYTYMMMKMPGPRGVISLRSDIKQAVTCDKESCEMAQTREITLAREEIRLAASIATEEEVPATKMPKSGEGDAKTKAEYQITLPVAFGSRENFRTENICFEVADFETAYHAILRRPALPKFMAVPHYTYMMMKMPGPRGVISLRSDIKQVVTCDKESCEMAQTRKITLAREEIRLAASIATEEEVLATKMPKSGEGDAKTKKNPLDPSYPTKTADRKDAIKEELTKLLAAGFTKEVLHPDWLANPVLVRKKTAQWRMCVDYTDLNKSCPKDPFGLPRIDQIGRNVEAYVDDVVVKTKQKNNLIADLKETFASIRAFRMKLNPEKCIFGVSSGKLLGFMVSHRGIQANPEKINAILNMKPPSSQKDIQKLTGCMVALSRFISRLGERGMRFFKLLKKTDNFQWGPEAQKAFEDFKKLLTTPPVLASPHLQEPLLLYVSATFQVVSTVMVVEREEDGHVYFVSEVLTNSKTRYHQVQKLLYGVLITVRKLSHYFQGHSVTVVTSFPLGDILHNGEANGRIAKWALELMSLDLSFKPRTSIKSQALADFVAEWTECQEDMPLEKMEYWTMHFDGSKRLSGTGAGVVLISPTGERLNYVLWIHFSASHNMAEYEALLHGLRIAISLGIRHLIVRGDSQLVVNQVMKEWSCLDDNMAAYRLEVRKLEDKFDGLELTHVLRHNNEAADRLANFGSKREITPSDVFVEHFYEPTVPRKETTEAVDTQETHLPTQELQTIPLSWSFAVWGLDMVGPFKRATGGFTHLFVAINKFSKWIEAKPVVTITADKARDFFINIVHRFGVPNRIITDNGTQFTSSVFKDFCEDFGIKICYASVAHPMSNGQVERANGMVLQGIKARVFDRLHPYAAKWVDQLPSVLWSLRTTPSRATGQSPFFLVYGAEAMLSSEVEFESLRFLNFKEERYGED

SEQ ID NO: 167911 - protein, 165 aa, Oryza sativa
  unsure (1)..(165): unsure at all Xaa locations
  Clone ID: PAT_MRT4530_66478C.1.pep
PELPVFXGQELPGNRTRMEFKFRNRRLSQSSQDDAQVALLGKPLESQHKNFINLPRSLSKERRSFTNLPGTSTIXNGFSRATPNCLGDXISKSNKHRDDSPQDIPKLGSRLSGEGKKHLGEASNSSRVEKPELQNLEDRKSRTCXFWTDGVFAKITPRETCHLVH

SEQ ID NO: 167912 - protein, 1822 aa, Oryza sativa
  unsure (1)..(1822): unsure at all Xaa locations
  Clone ID: PAT_MRT4530_66479C.1.pep
MGSVSGIDDFAFPPGQAFRFGSLNFITNDFGKISLHDSDSNQSGRNQVPVPFGILNSAEAYSKIISPESAPNHSDEIQSTLPRPDQDDXEQRQAREADQDRARQEAERRRLEEERQXRSENDYSEAEDRRERALESGRRARELIGQQDVDGTAVFRTPQQNAVAAITLLDTLLKEDALNQADHVVNILNQMKTMIAASVPANSASTRTPTARGHRHSPNLYDDDVDGVAAFTNDLRRVDWPAGFKSTGIEKYDSTTNPESWLTVYGLAIRAAGGDSKAMANYLPVALADSARSWLHGLPRGTIGSWAELRDHFIANFQGTFERPGTQFDLYNVVQKSGESLRDYIRRFSELRNKISDITDDVIIAALTKGIRHEDLVGKFGRKPPKTVKQMFEKANEYAKVEDVVIASKQSGSTWKPKKDAPTTGGSGSANHKDRKRKPEELVATTTPSSRQRSHVNTFDKIMNSQCPHRPNSNHAAKYFFVXKQFAEQYAKNARKLTDGDQSMSKKKDDEDDAPTGFQDSRKELNDIFGGPLAYESKRKQKLTKRENNVVQPDTPQYLRWSETVIKFNRSDHPDRVVHPGWYPLVLDPVVRNVKLRRSLIDGGSALNILFAKTLDDMQIPRTELKPSSAPFHRFIPGLSSTPLGQITLLVTFGTRENFRTENICFEVADFETAYHAILGRPALAKFMVVPHYIYRMMKMPGPRGVISLRSDIKQTVTCDKESCEMAQTREITLAREEIRLAASTATEGEVPATKISKSGEGDAKTKKIPLDPSDPTKTANNKDIFAWKPSDMPGIPKEVIEHSLHIKEDAKPIKQRLRRFAQDRKDAITEELTKLLAAGFIKEVLHPDWLANPVLVRKRTVQWRMCVDYTDLNKSCPKDPFGLPRIDQVVDSTAGCELLSFLDCYSGYHQIRLKESDYLKTSFITPFGAXCYITMPFGLKNAGATYQRMIQRYFSTQIGRNVEAYVDDVVVKTKXKADLIADLEETFASIRAFRMKFNPEKCIFGVPSGKLLGFMISHRGIQANPXKINAILNMKPPSSQKDVQKLTGCMAVLSRFVSRLGERRMPFFKLLKKTDNFQWGPEVQKAFEDLKKLLTTPPVLTSPHPQEPLLLYVSATSQVVSTVLVVEREEDGHVEKVQRPIYFVSKVLADSKTRYPQVQKLVYGVLITVRKLSHYFQGHSVTVVTSFLLGDILHNREANGRIAKWALELMSLDLSFKPRISIKSQALADFIAEWTECQEDMPIEKMEYWTMHFDGSKRLSGTGAGVVLISPTXERLSYVLWIHFSTSHNVAEYEALLHVLRIAISLEIRRLIVCGDSQLVVNQVMKEWSCLDDNMAAYRQEVRKLEDKFDGLDLTHVLRNNNEAADRLANFGSKRETASSDVFVEHLYEPTIPRKEITEAVDTQEVSMIEADWREPLIKFLXQELPQDKDEAERISRRSMLYVIHETELYKKSPSGILQCXSLEEGRQLLKDIHSGICGNHAVARTIVGKAYRQGFFWPTTVSDADXIVRTCEGCQFFARQTHLPSQELQTIPLSWPFAVWGLDMVGPFKRATGGFTYLFVAIDKFSKWIEAKLVVTITADKARDFFINIVHRFGVPNRIITDNGTQFTGDVFKDFCEDFGIKICYASVAHPISNGXVERANGMVLQGIKAXVFDRLHPYAGKWVDQLPSVLWSLHTTPSRATGQSPFFLVYGAEAMLPSEVEFESLRFCNFKEERYGEDRVDDLNRLEEARGAALIQSARYLQGLRRCHNRNVXSRVFLVGDQVLRKIQTTRDRHKLSPLWEGPFIISKVTRPGSYRLKREDGTHVDNSWNIEHLHRFYA

SEQ ID NO: 167913 - protein, 93 aa, Oryza sativa
  Clone ID: PAT_MRT4530_6647C.1.pep
FKPHPRRSSSTLPPLRRILTGAAAAESYFFITAVAGADLGPFRRHRHRRALHRWPAPRSALFPICHFIIRSPMFAPLLKAYSTSKSLKSCFFS

SEQ ID NO: 167914 - protein, 174 aa, Oryza sativa
  unsure (1)..(174): unsure at all Xaa locations
  Clone ID: PAT_MRT4530_66480C.1.pep
SRLLAGWTETGTSGPELPVFLGQELLGYXWKMKIKFRNKRLSQSSQDGAQVALLGKPLESQHKNFTNLPRSLSEERRSFTNLPVTSTICNGFSRATPNHLGDXISKSNKHRDGSPQDIPKLGSRLSGEGKKHLEEASNSSRFEKPELPDLEDRKFRTCXFWIDGVFAKMTPRET

SEQ ID NO: 167915 - protein, 108 aa, Oryza sativa
  Clone ID: PAT_MRT4530_66481C.1.pep
FKPAIECYTQFVDVGTMVSPTVYARRSLCHLMSDQPDAALRDAMQAQCVYPDWPTAFYMQAVALSKLNMQSDAMDMLNEASQLEEKRQERLWSKDASAQSPLRLKGLC

SEQ ID NO: 167916 - protein, 2021 aa, Oryza sativa
  unsure (1)..(2021): unsure at all Xaa locations
  Clone ID: PAT_MRT4530_66482C.1.pep
MGFVSGIDDFVFPPRQAFRFGSLDFITNDFGKISLLDSDPNQSGRGQVSAPYGIPTRPKSTPRSSKXESASNHSDEIQSTSTRPDQDDGAYPSILMKLPDDLAVVFTTRASYPRRPRRDPASAPIQSSSREVGVILQPLGTVLTKELDGYLSSPGVDSLPTEILXYDDFGYHYDYRNLDDFDEGYKDNYTPLFFGVFMADNETXEQHQAREAEEQRVXQEAEHRRLEEERQVXEQERLQREQQEHERAAKKAEDRRQRALEAGRXAQELIGQQDIEGTAVFRTPQXNAVAAITHLDTLLKEDAPNHVVNILNQTKTMIAASVPVNSASVRTPTGSRVPPLRSXDYHQPSLSVASAGSSRRSRDHSERSVHSPPDRHRERQAEQPRSPRRRRPVDLRDTINQRRAARGYIPHHSPDHYDDDVDGVAAFTSDLRRVDWPAGFKPTGIEKYDGTINPESWLTVYDLVIRAAGGDSKAMANYLPVALVDFARSRLHGLPRGTIGSWAELCGHFIANFQGTFERPGTQFDLYNVIQKSGESLRNYIRRFSEQRNKISDITEDVIIAAFTKGIRHELLVGKFGRKPPKTVKXMFEKANEYAKAEDAVIASKQSGSTWKPKKDTPTTGGSGSANHKDRKHKPEELVATTTPSSRQHSRVNTFDKIMNSQYPHHPNSNHAAKDCFIYKQFAEQYANNTRKPTYGDQSTSKKKDDEDDAPTGFQDPRKELNHIFGGPLAYESKRKQKLTEREINAVQPDTPQYLRWSETAIKFDRSDNPDRVVHPGRYPLVLDPVVHNVKLRRSLIDGGSTLNILFAKTLDNMQIPRTELKPSSAPFHGVIPGLSSTPLGQITLPVTFGTRENFRTENIXFEVADFETAFHAILARPALAKFMAVPHYTHMMMKMPGPRGVISLRSDIKQAVTCDKESCEMAQIREITLAREEIRLAASTATEGEVPATKTSKSGEGNAKTKKIPLDPSDPTKTTNNKDIFAWKPSDMPGIPREVIEHSLYVKEDAKPIKQRLRRFAQNRKDAIKEELTKLLAAGFIKEVLHPDWLANPVLVRKKTGQWRMCVDXTDLNKSCPKDPFGLPRIDQVVDSTAGYELLSFLDCYSGYHQILLKESDCLKTSFITPFGAYCXITMPFGLKNAGAAYQRMIQRCFSTXIGRNVEAYVDDVVVKTKQNDDLVANLEETFASIRAFRMKLNPEKCIFGVPSGKLLGFMVSHRGIQANPEKISAILNMKPPSSQKXQKLTGCIVTLSRFVSRLGEXGMPFFKLLKKTDNFQWGPEAQKAFEDFKKLLTTPPVLASPHPQEPLLLYASATSQVVSTVLVVEREEDGHVQKVQRPIYFVSEVLADSKTRYPQVQKLLYGVLITVRKLSHYFQGHSVTVVTSFPLGDILHNREANGQIAKWALELMSLDLSFKQRTSIKSQALADFVAEWTECQEDMPIEKMEYWTMHFDGSKRLSDTGAGIVLISPTGEKLSYVLWIHFSASHNVAEYEALLHGLRIAVSFGIRHLIVHGDSQLVANQVMKEWSCLDDNMAAYWHEVRKLEDKFDGLELTHVLRHNNDAADRLANFDSKREATPSDVFVEYLYEPTVLRKETTEAMNTQEVNMIEADXREPLIKFLTKQELPQDKVEAERISRCSKLYVIHETELYKKSPSGILQRCVSLEDGRQLLRDIHPGICGNHAAARTIVGKANRQGFFWPTAVSDADKIVRTCEGCQFFARQTHLPAQELQTIPLSWPFAVWGLDMVGPFKKATGGYTHLFVAVNKFSKYIEAKPVVMITADKARDFFINIVHRFGVPNQIITDNGTQFTGGVFKNFCEDFGIKICYASVAHPMSNGQVERANGMVLQGIKARVFDRLNPYAGKWVDQLPSVLWSLRTTPSRATGQSPFFLVYGAEAMLPSEVEFESLSFHNFKEERYGEDXVDDLNRLEEAREAALIQSARYLQGMRRYHNRNVRSRAFLVGDLVLRKIQTTRDRHKLSPLWEGQFIISEVTRPGSYRLKHEDLHDTHVDNSWNIEHLRRFYA

SEQ ID NO: 167917 - protein, 167 aa, Oryza sativa
  unsure (1)..(167): unsure at all Xaa locations
  Clone ID: PAT_MRT4530_66483C.1.pep
GPFEFHFGLPHIKQLGCQDLVRKSGTFGLPGPELLVFLGQELLGNRIEMKFKFRNRRLSQSSQDGAQVALLGKPLESQHKNFIHLPCSLSEERRSFTNLPGTSTICNGFSRATPNRLGDXISKSNKHRDDSPRDIPKLGSRLSGEGKKHLXESSNSSRFEKQEVPDL

SEQ ID NO: 167918 - protein, 181 aa, Oryza sativa
  unsure (1)..(181): unsure at all Xaa locations
  Clone ID: PAT_MRT4530_66484C.1.pep
QTNIPNSPLFYYPQKTPILLQFKFQKLPPFPSPELPLFXHRNFRVTRTKIKFQFSKPKYSNKNPPQVWVALLGRPLESQHKNFTNLPRSLSEERKSFTNLPGTSTICNGFSRVIPNRLGDNKHRDDSPRDIQELGSRLSGEGKKHLGEASNSSRFEKPELPDLEDRKFRTCTFGQMEYKQK

SEQ ID NO: 167919 - protein, 218 aa, Oryza sativa
  unsure (1)..(218): unsure at all Xaa locations
  Clone ID: PAT_MRT4530_66485C.1.pep
ATTGASPAAPSASVLQKTHRLVVXKRARGKRDSISPISLERTEPSSSGLPGPELPVFLGQELPGYXWKMKIKFRNRKLSVTNPPQVWVALLGKPLESQPKNFTNLPRSLSEERRSFTNLPRTSTICNGFSRATPNCLGDXISKSNKHRDGSPRDIPKLGSRLSGEGKKHLGEASNSSRFEKQEVPDLEDRNFRTWKTGSSGLVRNFRIKYQELPDKLT

SEQ ID NO: 167920 - protein, 171 aa, Oryza sativa
  unsure (1)..(171): unsure at all Xaa locations
  Clone ID: PAT_MRT4530_66486C.1.pep
AKGVPELSPRGPELPVFXGQELPGNRTEMKFKFRNRRLSQSSQDGAQVALLGKPLESQHKNFIHLPRSLSEERRSFTNLPGTSTIFNGFSRATPNRLGDXISKSNKHRDDSSXDIPKLGSRLSGEGKKHLGEASNSSRFEKPEFPDLDERKFRTCXFWTDGVFANMTPREI

SEQ ID NO: 167921 - protein, 206 aa, Oryza sativa
  Clone ID: PAT_MRT4530_66487C.1.pep
QWLGVAGVLIRQVYFEKQQQPRNPPAPFQLKNEFMPMPWLSEITTHTCFTYTPSVKDKQLIKDTFNRTIVVEVQLPTGTRVNLRQIGFFLSRVPEMMYFTFDTRLNKFNFFLTVPSTMYGKEICFDWCLERLSFIDQWAPIRIRVYDYLQPEQQLIRLMPVEFQPKLLGYSYVEAIHKARPTLEQLAKMQQSARPPPPPRPSPPRV

SEQ ID NO: 167922 - protein, 146 aa, Oryza sativa
  Clone ID: PAT_MRT4530_66488C.1.pep
ERRSPSRTTRRQTAPLATALRGQGARPLLRREQHTVAGTHAAAPPPPRPIAPPRTALLLSSGQVQKQGARSSHGGARSEASRRADVSPHLLPPFSTAAGCRRLYRLSAVVGRGLLLSTASRHKLGAGFGRCDDGGGRICRRDDGGG

SEQ ID NO: 167923 - protein, 395 aa, Oryza sativa
  Clone ID: PAT_MRT4530_66489C.1.pep
MASCAARAAAAADSSLGISRLRPCGWESEAGDGVGALERASGNRRRGQPRRSAATSPRGSVRTERGQASVDVKQARTGAIEKKKGKKNKNITEKPPTPSSPPNPTTGRRRIPSAVATTAGFIHDHRRRHHRRQRKKRGDGGSCRCQIRKRAPRPVRHAMCDEASPYLERRKLKALVPHTHTAELLSLAFFPSSDPDPASREGASARGRNGENECRVCTGAIQSQPQLPPSPAQVRQSVTPHHYAALCSRRASAHAQHAPSESRTGVNSLDTSPSIGDRVIDVRDTGAAIGSVFLGDRELFFTTATDTSRLTRRSPAVDARIMALDETTVTGFNGGFMHMHEHARCQLGSCTTLGIKRVRQRSRTAGRAVVRQIHATTAEFSVAAAIDPLVEFERG

SEQ ID NO: 167924 - protein, 127 aa, Oryza sativa
  unsure (1)..(127): unsure at all Xaa locations
  Clone ID: PAT_MRT4530_6648C.1.pep
SRPPLMTPARVSGINPSESEGEREGKEGGKREGITGSDFPLFMARGDGGXGGFGGGGGARARXGRRVRREDRDDRWAPPVSEGGGRARPSAARARGEAEWAAGRRRGXGKELGRAGPVREGGGKKTF

SEQ ID NO: 167925 - protein, 75 aa, Oryza sativa
  Clone ID: PAT_MRT4530_66490C.1.pep
MAKRGEVELDAVQDRGKRRRRKLRPGSLTMVISSGGERVIARRLRFIHWARMGATERAHMGAVAERRLAGAVFPS

SEQ ID NO: 167926 - protein, 50 aa, Oryza sativa
  Clone ID: PAT_MRT4530_66491C.1.pep
NLLLCASADSLVSFQPSPPPSPPVQQSSSDHTPLAAGSHHIEEEEQPAAP

SEQ ID NO: 167927 - protein, 157 aa, Oryza sativa
  unsure (1)..(157): unsure at all Xaa locations
  Clone ID: PAT_MRT4530_66492C.1.pep
LSRPSVFRRTNLEEGGREGNGNPAPAARHGRSGTDRHARAGAPPPPPPPPRVGGVSGGVSGGGERVVGDEEGEEVAGRGDEAGAGAAAGAGAAAAVRGGGGRDGGGVRRARRPRGRPRSRXALCRRAVRGGRRRRVRSTKPKETGAMDIASQRSLAA

SEQ ID NO: 167928 - protein, 277 aa, Oryza sativa
  Clone ID: PAT_MRT4530_66493C.1.pep
MESYTAGAKFDCLLFDMDDTLYPLSLGINLACRKNIQDYMLNKLQIEESLVPKMCLDLYREFGTTMAGLKVLGYDFDYDDFHACVHGTLPYEKLKPDPVLRHLLLSLPQRKIIFTNSDKAHAATVLKKLGLEDCFEGIICFETLNPSTEPEEDDSDSTDGGSSSDSSASHRKRKILCKPSLESMEAVIEIAKLDAMKTVFFDDSPRNIAAGKAAGFHTVIVGSSAAVAGADVALESIHNIKEAVPELWEAAGEHVQAQLAQAAVDLRSAAVETTVLA

SEQ ID NO: 167929 - protein, 235 aa, Oryza sativa
  Clone ID: PAT_MRT4530_66494C.1.pep
MAKEQDQLIKRVELKVSVNCCDGCRSKVLKALNLKGVLRTEVHPTAGRVAVVGDVDAGRLVKRLAKVGKIAEVIVVAQPSPEVERRRRDVGGSKKEASPDNGKMGGGTAPKHGGADDDKRGETNGGAGSGASSARIHGGGDDDVKAAMCCYHRAEPPAMAVPVLQPPYYAANFTMPPPQPPAAAYGFGGCYHGTPSPAMALCRRGRIPVVRPQPTRFADECCMYGDDDIAGCHVM

SEQ ID NO: 167930 - protein, 136 aa, Oryza sativa
  unsure (1)..(136): unsure at all Xaa locations
  Clone ID: PAT_MRT4530_66495C.1.pep
RVLTSKFGKPRGRHRPRVSISFRILESADGSCQVASSRILGRFACLXYNKGFIGVSADFMTSDLRPMYTLTIGSMXLFYYIIISRLISTGLYYXFITLSLANCLYTVIYIGHIGDCXNSINIGKNYSIGLLVDQLF

SEQ ID NO: 167931 - protein, 273 aa, Oryza sativa
  unsure (1)..(273): unsure at all Xaa locations
  Clone ID: PAT_MRT4530_66496C.1.pep
TGESWCGCVDQASVEAVEKXGRFVRLAEPGLHLVNPLAGECVAGALSTRVXIQSLDVRVETKTKTKVFVQLICAIQYRVVKEHADDAFYELQNPQQQIQAYAFDVVLALVPRMNLDDLFEXKNDVVKTVLEELEKVTQVPGLYIEHILMVDIIPDTSVRRAMNDINAAQSLQLASVYKGEAEKILLVKKSEAEAXKYLSGDGIAKQRQADGLRXTTAKEVMDLIMVTQYFDTIKELGDGSKNTTVFIPQGPGHVKDISEQIRNGMMEASSNNV

SEQ ID NO: 167932 - protein, 148 aa, Oryza sativa
  Clone ID: PAT_MRT4530_66497C.1.pep
IDPNSSISFPKGISFSPGMSEIIRFVEEHCDFCVIDPFKNIYPLLDRIQIQEILIRLEGLSAEGRPKLRAPCFLKIESFCGSELQKQLAEAKLSFPLIVKPQVACGVADAHNMALIFKIEEFSNLSVPLPAILQVYIDQNLCALSFFR

SEQ ID NO: 167933 - protein, 66 aa, Oryza sativa
  Clone ID: PAT_MRT4530_66498C.1.pep
DIWLKLKLYWLFNVPSRYGISPLGTMVHPSHHSPPLRCLVMSLPSIVVRKLKISSRYHHRGHGNFG

SEQ ID NO: 167934 - protein, 236 aa, Oryza sativa
  Clone ID: PAT_MRT4530_66499C.1.pep
MGAGGVIPPPKTYFEKVQAIVKKYDILFIADEVITAFGRLGTMFGSDMYNIKPDLVSMAKALSSAYVPIGAIMVSPEISDVIHSQSNKLGSFAHGFTYSGHPVACAVAIEALKIYQERNIPDHVKQISPRFQEGVKAFAGSPIVGEIRGVGLILGTEFADNKSPNDPFPAEWGVGAIFGAECQKRGMLVRVAGDNIMMSPPLIMTPDEVEELVSIYGDALKATEERVAELKSKKNN

SEQ ID NO: 167935 - protein, 393 aa, Oryza sativa
  unsure (1)..(393): unsure at all Xaa locations
  Clone ID: PAT_MRT4530_6649C.1.pep
NSCIVEPAIVGRIRLRQRERGKRRPPLSPAVTTGNNPTGIPYVRALFLIPGGKTEPQTKPYPLDMWKYGSALQQRPEDRSLYGRAGPHAVATRRARGRPLGAAGGRRRXAPMVAGGGHRHGGAAAERGEGKGEKRRRSTAHPRSTAAXEEAAGAEGGGGAARVDGVDGVPAVGDRNGEVDEVGEDAANPKEAAPRWELVRGDDGGGPELGGDGGERERCRELESGEEEGRREAETDGGGVGRVXIGLEEGESGRRGRKPAREVRPPSMAPARFAXGQIRPFEREREREKXGERERGSRGVIPPTLLHVGTTGGGGIRGGGGARARGRRRERREEGDDGWAPPVSEGGGRARPSAARAGRGRIGRGEXERERGGERWAGPAQGREGGLFRVFLF

SEQ ID NO: 167936 - protein, 210 aa, Oryza sativa
  Clone ID: PAT_MRT4530_664C.1.pep
MEAPPSLSIVDEDGFVIDLSLTLGLTSPPPSPGGASPSIPPGRGGGGGTSGGDNNRGSRGGGNGGGGGGVRLFPCLFCNKKFLKSQALGGHQNAHKKERSVGWNTHLYLPAGVAAATTTTTTTTAMAVPDMVGMPTHQMSSMALHSCRPHQGSHVTAADIATLAAPPHYTVDHGVAGIASGGGDSSVGWRQRQREAGGEKQRQVDLNLKL

SEQ ID NO: 167937 - protein, 58 aa, Oryza sativa
  Clone ID: PAT_MRT4530_66500C.1.pep
RLPIRNLYMAYRHRVIRQCGRYHSKHMDTDSPAPETLYTHVADTLPYILIRERDKNAL

SEQ ID NO: 167938 - protein, 411 aa, Oryza sativa
  Clone ID: PAT_MRT4530_66501C.1.pep
MASVGVVRSSLGFQNETSTSGDADRLPNEMSNMSIRDDNKDIDDIVVNGNGTEPGHVIVTSIDGRNGQAKQTISYMAERVVGHGSFGTVFQAKCLETGETVAIKKVLQDKRYKNRELQTMRVLDHPNVVSLKHCFFSKTEKEELYLNLVLEYVPETAHRVIKHYNKMNQRMPLIYAKLYMYQICRALAYIHNTIGVCHRDIKPQNLLVNPHTHQLKLCDFGSAKVLVKGEPNISYICSRYYRAPELIFGATEYTTAIDVWSAGCVLAELLLGQPLFPGDSGVDQLVEIIKVLGTPTREEIKCMNPNYTEFKFPQIKAHPWHKIFHKRMPAEAVDLVSRLLQYSPYLRSTASEALIHPFFDELRDPNTRLPNGRFLPPLFNFKPHELKGMPMEFLVKLIPEHARKQCAFVGW

SEQ ID NO: 167939 - protein, 145 aa, Oryza sativa
  unsure (1)..(145): unsure at all Xaa locations
  Clone ID: PAT_MRT4530_66502C.1.pep
GCACSRKPPMTSCSQTPAAAAAAATQRRRRHQLRPAGGAAAPPQRRRRRHAATPPPXRAARAPSSPRSQGHARLHRWPPPWPPRRRAGLHRQPPPGHRRHARPPPPCSPTDHRRRRQLPARGAAPPRLRRRHATTLPRRAARPPP

SEQ ID NO: 167940 - protein, 110 aa, Oryza sativa
  Clone ID: PAT_MRT4530_66503C.1.pep
RAARAPSSPRSQGHARLHRWPPPWPPRRRAGLHRQPPPGHRRHARPPPPHSQSPRMPIFFPGWCYQPSTSTCSPTDHRRRRQLPARGAAPPRLRRRHATTLPRRAARPPP

SEQ ID NO: 167941 - protein, 141 aa, Oryza sativa
  Clone ID: PAT_MRT4530_66504C.1.pep
AAAASRGGGGRAAAGGGGRRAGEEAMAVASGDRGDDGARAARHGGGVAACRRRRRSVAPPRRLLAGADAGGAVESPPPPPPLVSASKTSSGASDCTHNPTKPSTGPCPPNAPGGGCTLPSARSSWRGGGTMGGRAASGLRK

SEQ ID NO: 167942 - protein, 43 aa, Oryza sativa
  Clone ID: PAT_MRT4530_66505C.1.pep
MVSPDTVRRDESAIFDLAGHELEEDPVIDYESDLQTAMSTTVK

SEQ ID NO: 167943 - protein, 773 aa, Oryza sativa
  Clone ID: PAT_MRT4530_66506C.1.pep
MRGVYIFTTIFFLLMPTIALANHRKPFLARRSSISTQAFIARRSSISTQDDTTTILVSPNGDFSCGFYRVATNAFTFSIWFSRSSEKTVAWTANRDAPVNGKGSRLTFQKDGTLALLDYNGKVVWSTNTTATRADRAELLNNGNLVVMDPEGQHLWRSFDSPTDTLLPLQPITRNVKLPWKNGRTTYDSLRYGVLNQTGYFVSSDLFKFEASDLGDHVMRRLTLDYDGNLRLYSLNETSGNWSVSWMAFSRVCQMHGVCGTNAVCNYIPELHCSCLQGFEVIDPTDWSKGCKRKVDITAIWDKGNRHNITNNSTSQDFSIRKITATDFWGYDTAYTQLIPYSNCRNMCLTANNCQAFGYRKGTGESYPKYSLFNGWRFPDPYNDLYLKVPKGVPFREESDSRPTHSCGVTEKLAYPSSQMFEEVTSNFEFGYFLSSVLTLLLIEVVLIIVGFSVVRKWETRPEITDEGYAIISSQFRRFSYKELQKATNCFQEELGSGGSGVVYKGVLDDERKVAVKILNDVIYGEQELRSELSVIGRIYHMNLVRIWGFCVEKTKRLLVSEYSENGSLDRLLFDYHNLFPVLKWSQRYNIALGVAKGLAYLHHECLEWIVHCDIKPENILLDKDFEPKIADFGLVKLLKPEAAQMPSRVHGTRGYIAPEWALNLPITGKADVYSYGVVLLELVKGSRVSRWVVDGKEEVGLAVKRNVDTLREKLASEDQSWLLEFVDSRLDGEFNYSQAATVLKIAVLCLEEDRRMRPSMDTVVEVLLSLVE

SEQ ID NO: 167944 - protein, 146 aa, Oryza sativa
  Clone ID: PAT_MRT4530_66507C.1.pep
HLAKLLPSHPASTPPWQQGRPPPPLSSPPAEMPRSMSTSSTAKVAVAPSPPGWFPSPRSSSPDGPPCVSLSPRRPPPSPRIIQVIFIKEIPLSLGFHSSDTIKYMRNLTICHSIELALTGCHPMECPPVPAPPPPPAATATVTASA

SEQ ID NO: 167945 - protein, 818 aa, Oryza sativa
  Clone ID: PAT_MRT4530_66508C.1.pep
MRGVYIFTTIFFLLMPTIALANHRKPFLARRSSISTQAFIARRSSISTQDDTTTILVSPNGDFSCGFYRVATNAFTFSIWFSRSSEKTVAWTANRDAPVNGKGSRLTFQKDGTLALLDYNGKVVWSTNTTATRADRAELLNNGNLVVMDPEGQHLWRSFDSPTDTLLPLQPITRNVKLVYASARGLLYSGFYNFLFDSNNILTLVYNGPDTASIYWPNPSFDQPWKNGRTTYDSLRYGVLNQTGYFVSSDLFKFEASDLGDHVMRRLTLDYDGNLRLYSLNETSGNWSVSWMAFSRVCQMHGVCGTNAVCNYIPELHCSCLQGFEVIDPTDWSKGCKRKVDITAIWDKGNRHNITNNSTSQDFSIRKITATDFWGYDTAYTQLIPYSNCRNMCLTANNCQAFGYRKGTGESYPKYSLFNGWRFPDPYNDLYLKVPKGVPFREESDSRPTHSCGVTEKLAYPSSQMFEEVTSNFEFGYFLSSVLTLLLIEVVLIIVGFSVVRKWETRPEITDEGYAIISSQFRRFSYKELQKATNCFQEELGSGGSGVVYKGVLDDERKVAVKILNDVIYGEQELRSELSVIGRIYHMNLVRIWGFCVEKTKRLLVSEYSENGSLDRLLFDYHNLFPVLKWSQRYNIALGVAKGLAYLHHECLEWIVHCDIKPENILLDKDFEPKIADFGLVKLLKPEAAQMPSRVHGTRGYIAPEWALNLPITGKADVYSYGVVLLELVKGSRVSRWVVDGKEEVGLAVKRNVDTLREKLASEDQSWLLEFVDSRLDGEFNYSQAATVLKIAVLCLEEDRRMRPSMDTVVEVLLSLVE

SEQ ID NO: 167946 - protein, 777 aa, Oryza sativa
  unsure (1)..(777): unsure at all Xaa locations
  Clone ID: PAT_MRT4530_66509C.1.pep
MGKGGSGVPQIRREGGGRRSSPSPGALLLRGPWRSSRGILIIWADPSVISFLLMLPTAVAKDQKSFLTRRSSISTQDDTTAILVSPNDDFSCGFYKVATNAFTFSIWFSRSSEKTVAWTANRDAPVNGKGSRLTFQNDGTLALLDYNGKVVWSTNTTATQANRAELLNNGNLVVMDLQGQHLWRSFDSPTDTLLPLQPITRNVKLVSASARGLLYSGFYNFLFDSNNILTLVYNGPDTASIYWPNPSVHLPWKNGRTTYDSRRYGVLNQTGRFVSSDLFKFEDSDLGDHVMRRLTLDYDGNLRLYSLNETSGNWSVSWMAFSRLCQMHGVCGFEVIDPSDWSKGCKRKADMTVIWDKGNRTNTNNTISRDFSFRKNTGTDFWGYDMDYAESVPFSNCRNMCLANAKCQAFGYRRRTGLCYPKYTLFNGRSFPDPYNDIYLKVPKGVPFTKESDSRLTHSCGVTEKLAYPSSQMLEDVPSKFMFXQFRRFSYKELHKATNXFRKSGNGGSGVVYKGVLDDERQVAVKKLNDVIYGEQELRSELSVIGRIYHMNLVRVWGFCAEKTSRLLVSEYIENGSLDRLVFDHQNLFPLLKWNQRYNIAIGVAKGLAYLHHECLEWIVHCDIKPENILLDKDFEPKIADFGLVKLLKQGTALMLSRVHGTRGYIAPEWVLNLPITGKADVFSYGVVLLELVKGIRVSRWMVEGEKVELGVKRTADILKEKLVNEDQSWLLEFVDGRLEGEFNYSQAVKMLKIAVSCVEEERSQRPSMSQVVQNLL

SEQ ID NO: 167947 - protein, 42 aa, Oryza sativa
  Clone ID: PAT_MRT4530_6650C.1.pep
GKRQGLIQFEREEGAAEALVSKHAPSLGGNPIRVSFSPMQGI

SEQ ID NO: 167948 - protein, 49 aa, Oryza sativa
  Clone ID: PAT_MRT4530_66510C.1.pep
ASLVMKSICSRPMLIICHNHCKKYGRIFVQNNSISVGERASYVTTLVLN

SEQ ID NO: 167949 - protein, 885 aa, Oryza sativa
  Clone ID: PAT_MRT4530_66511C.1.pep
MSSLAIVEKRPAPFVGGGGGCAGGVLLHLLDWHRRLARKRRLFSPRRLLPTSLRSSPRRLPSPPQASHPPPAPRLSSAATAAGVAAPGVGVVARLMGLESWPATGPVGAPPAARRPQKQRKVEVASPTPRADEPDVVLVLPPSQRPPPLSPAARNHHGADLPARSPRRSRLVHAAATKLLEPSARASSRASARLALAYACSSPQHRMDGHSNALQSSSMPDDFLSRSDSLPLERSSRLQPVVAQPPVLPAETEWDNVITSSRHEKHSIDTISSSDAADVVSGDAIVVLRSGFDDANVSRSSSGADAMPKDHKARTDRLSNCSRMRSSGAGVRAGEERSLRKRGTHSLQDVEGNIGSRSLVSSTHPAAGSARELMSGSRRAAHHGSGQRRELMGTITPQRSSRREVMGSSNPQRNTRRSSIDRSGLTSTTTSRIAVSTVSGQKRGSRKNVGRDNAACNREVNNPVAFASSSSVNPVTRNSSQSKVSEKRGCRRTQVISTSCSTRLPVVESSPSVVGSSEKEEFSRLLKAKINELGLSDRIESSDALSGKLTASVLQELISALTNDTNTSDSQHSNYSNAYNSQHSNYSDAVDCLNNNMSACNSNDQSHDFQNCYQRDREVESSATCMNNEPNQPSPTSVLEACFSNDTSSLGSPTEKNEGKEYFVSIENKMEDLFNLESDIVDLAISIDKTKTDAEEIFHGIDKMSSVHNLMARDFKLLEARLHSIGEAISNAELLLGNSPLSTKTSNLSLHCFIIEMLEVIMDLFGGSKSLGLTEEKKYQQTNFIFDCIIESVNSKFCDFGKCGYKAWLRLPLSLTEDLLKREISKEICNWRETRETTPNRVAEKELDQMTPRWDACQVEAFDISIAIEHDILEALVDEFAFDQW

SEQ ID NO: 167950 - protein, 65 aa, Oryza sativa
  unsure (1)..(65): unsure at all Xaa locations
  Clone ID: PAT_MRT4530_66512C.1.pep
IRELKHAYDDWVATDMNGKSXAHHASSEEIKCCHNGADHPSGDCHHRRDLEPGLPRMRLQEPEWD

SEQ ID NO: 167951 - protein, 81 aa, Oryza sativa
  Clone ID: PAT_MRT4530_66513C.1.pep
MGNEIDTSVLAFLASRLQMHYSKALLSYDPNSFALNKDQLLPNAAKRRPPPTCAFLSTDRLGGSHDLNGRKEREFGMKKEE

SEQ ID NO: 167952 - protein, 120 aa, Oryza sativa
  Clone ID: PAT_MRT4530_66514C.1.pep
MSVQTLLSFFLLPLSLPSLSPVASLSTLARAMAAAVADDVGASVAVVEPEPEERPKVGGAAAAHGEAAEEEVVFPMAWTDDDELCPEGTVPVRQTTKRDLLSLFGDEAASCRRAAGVVRV

SEQ ID NO: 167953 - protein, 417 aa, Oryza sativa
  Clone ID: PAT_MRT4530_66515C.1.pep
MTDHGNTCLFGCAFLGDETTETFKWVFETFRTAMRGKDPISIITDQDSAMRSAIGQVFKKTKHRNCLFHIKKIAEREQLHNVKYLQSIWDTRQSCIPVYCKNDFFPFIQSTTLSEGTNARFKRGVGPRHSVTSFLKEYDRINDTIFDTLYWNAYNSNTKQPKNLWSGYYIEEQASEMYNLSIFKKFQLELKKSTRLQFSKDGILCSHILKVMLDLNVSKIPNKYIIERWRKKDNNITGLFRGESSNGPNAMLMYNVLSQKMSELASKGCKRPEIYSYLVGEVEKLDSIVDSMILEAHGNHTCQVQSNATNNAVVEGQQHGNLNDEEEIEDPEQANTKGRKSIRQKRLVEKIMDKECKKYKGKSGQSNENQLKTKRTSNVAQGGTACEMQPKPKRRKKGQENNTKEIIGKNRARKICN

SEQ ID NO: 167954 - protein, 85 aa, Oryza sativa
  unsure (1)..(85): unsure at all Xaa locations
  Clone ID: PAT_MRT4530_66516C.1.pep
TYTKDGFFVNLICTIXISCSRTTSRMTTSCPFQNAIKALSVYVFNVCTAIVARMYLDYLFEQKNDFSKAVLYXLKNVMGDFGYSI

SEQ ID NO: 167955 - protein, 113 aa, Oryza sativa
  Clone ID: PAT_MRT4530_66517C.1.pep
TLSKLAYLSLSISYEQKFFNGSSLSHVKTSQHIVSKPSCYNHNVTPIQASCNLPYWRTCLQWQPQQGPRAASSPATLFITDPCQSAPSSSISRPVERTMHNRSHFANPNACTL

SEQ ID NO: 167956 - protein, 333 aa, Oryza sativa
  unsure (1)..(333): unsure at all Xaa locations
  Clone ID: PAT_MRT4530_66518C.1.pep
MAWRREGVGQSSSAWLLGSLGVVILHEVLHELDTKKERGIIFKIDFEKAYDRVQWPFLFEVMRKKNFGEKFIGWVRNAVEGGKVAININGEQGEFFRTYRGLRQGDPLSPILFNLVGDALDLILESAKKAGVLVGLSPNLIEGGITHLQYADDTILFVKPCKQNIITLKFLLFCFEEMSGMKINYQKSEVFGVGLEDGDLQQFADILNCERGNMPIVYLGLPISTEKIGNKDLFFLGQKMEKRLGTWIGGYVSYGGKEILINSCLSSIPLYAMGFYKLPEGVHKKMDSVRGRFYWQGIQKKKKKYHMLSWGAMSRPKDYGGLGFXETRKMNCL

SEQ ID NO: 167957 - protein, 496 aa, Oryza sativa
  Clone ID: PAT_MRT4530_66519C.1.pep
MRKKNFGEKFIGWVRNAVEGGKVAININGEQGEFFRTYRGLRQGDPLSPILFNLIGDALDLILESAKKAGFLVGLSPDLIEGGITHLQYADDTILFVKPCKQNIITLKFLLFCFEEMSGMKINYQKSEVFGVGLEDGDLQQFADILNCERGNMPIVYLGLPISTEKIGIRDLFFLGQKMEKRLGTWIGGYVSYGGKEILINSCLSSIPLYAMGFYKLPEGVHKKMDSVRGRFYWQGIQKKKKKYHMLSLGAMSRPKDYGGLGFLETRKMNLYTKRVVNNGRRTSFWDDVWLLQVPLRVYFEDLYKINEQQGGTVREIWQEGEWCLTFRRNWEGVSWDNWVELKSLLEGVEIKEGWDELKWSLDEKKGYSSKSLYRALAFGGVIDTRAQGLWKAKIPLKIKHFLFMAMKGKIPCAAQLKKKKWKGEINCKMCDLEEDTEHILFRCALARFLCCLLLGNLKWSLLQNEEMKDVQKAWIEDMRGRMRSWKPDIQLPEDL

SEQ ID NO: 167958 - protein, 632 aa, Oryza sativa
  unsure (1)..(632): unsure at all Xaa locations
  Clone ID: PAT_MRT4530_6651C.1.pep
MEDTHDNQHTSTRSHNTQAYIRQDTPPDIDFRDRHGYSPTVSPDTVRRYESAISDLAGHGFKEEGYPVVDYESDLQPPFETSNVDSGAPGRGILVLQDFDEMGLRDGLSDNKLLDDFGCGKIQLVQVHLPTRSGPSSSLTTWSIEIIQASRYAAYQKMSDHMMSNEYAIRRDESAISDLTGHGFEEKGYPVVDYESDRHVDNTPGLEWYIPGLEIELCSXRNGCSEWLGLCNVRLKMPRFKPEHLFGIEGFVQELRMMSFTIGFETAPLYAQIPHDRDEEKCRVMVTLNSDREDIPSMMFEAGGGSYPQACQEAARIAIGELRDRYNDLLADTEYRCHPRQPQGSDRASYVDPEGIENDATIRHLVEMLWAMDESRAEVVSAAQACEDRNRGKICKLEDKVDRLEKELAELKGEAPPQKARVHLTARKRALFVPCYQLVPKMVNTRSNGNGPNNNNNNNGENLTLAQVLAQQAQLMNMMMQQLQNQQNQGNNHAPPQNKLAEFLRWDHFCLNRATAEPITWLEFTAAFRKTRVPSRVVSLKKKEFRALTQGSRSVTEYMHEFNRLARYVPEDVRTDEERQENFLAGLNDELSYPLMTGDYSDFQKLVDKAIRQEDKYNPMEQKKRRIAQFKA

SEQ ID NO: 167959 - protein, 69 aa, Oryza sativa
  Clone ID: PAT_MRT4530_66520C.1.pep
MAMANRPSGWGYSKVMEAGAPVHQITNQSGGFGPCRPSSSSWIAMCVPLAPSTLSTSWYLVPLVLGIDW

SEQ ID NO: 167960 - protein, 277 aa, Oryza sativa
  unsure (1)..(277): unsure at all Xaa locations
  Clone ID: PAT_MRT4530_66521C.1.pep
MWHLRGRSSVTAAAAAALHKPVAHLRLLLAVSAWSVPAAASNVAAASTTTRGGPSPSAGVAPRAMPSSSSSPPSAAEGTTAAAGGFRLTEPSFLESLMPKKEIGVDRFLAAHPEYDGRGALIAIFDSGVDPAAAGLQTTSDGKPKILDVIDCTGSGDVDTSKVVKADDDGSIVGASGTHLTINPSWKNPSQEWHVGCKLVYELFTDTLTXSRLKKERKKKWDEHNQEAISEALKQLNEFEKIHSKSDDAKQKRAREDLHSGLSTWXETAEGYDDRGP

SEQ ID NO: 167961 - protein, 1387 aa, Oryza sativa
  Clone ID: PAT_MRT4530_66522C.1.pep
MWHLRGRSSVTAAAAAALHKPVAHLRLLLAVSAWSVPAAASNVAAASTTTRGGPSPSAGVAPRAMPSSSSSPPSAAEGTTAAAGGFRLTEPSFLESLMPKKEIGVDRFLAAHPEYDGRGALIAIFDSGVDPAAAGLQTTSDGKPKILDVIDWCCNPSEIPIHIHVFKCSTGSGDVDTSKVVKADDDGSIVGASGTHLTINPSWKNPSQEWHVGCKLVYELFTDTLTSRLKVNFVLGACILKKERKKKWDEHNQEAISEALKQLNEFEKKHSKSDDAKQKMAREDLQSRLEYLRKQAEGYDDRGPVIDIVAWHDGDVWRVAVDTQGLEGNKNCGKLADFVPLTNYRLERKFGIFSKLDACSFVANIYDDGNLVSIVTDCSPHATHVAGIAAAFHPDEPLLNGVAPGAQLISCKIGDTRLGSMETGTGLVRALIAAVEHKCDLINMSYGEPTLLPDYGRFIDLASEVVDKHRIIFISSAGNNGPALNTVGAPGGTSSSIIGVGAYVSPAMAAGAHCVVQAPAEGMEYTWSSRGPTADGDLGVSISAPGGAVAPVPTWTLQSRMLMNGTSMSSPSACGGVALLVSAMKAEGIPLSPYTVRKAIENTAASISDVPEEKLTTGHGLLQVDRAFEYAQQAKELPLVSYRISINQVGKPTSKLRGIYLRGSNTCRQTSEWTVQLDPKFHEDASNMEQLVPFEECLQLHSTDSSVIKIPEYIMVTNNGRTFNIVVNPVNISSGLHYYEVYGIDCKAPWRGPIFRVPITVIKPIALSGEPPALTLSNLSFKSGHIERRFINVPIGASWVEVTMRTSAFDTPRRFFLDTVQICPLKRPIKWEAVVTFSSPSLKNFSFPVEGGLTLELSIAQFWSSGIASHEPTCVDFEIVFHGISVDQKIIGLDGSEAPVRVVARSLLASERLVPVATLNKVKTPYRPVESNLCSLPPSRDRLPSGKQIIALTLTYKFKLEDGAEIKPRVPLLNNRIYDNKFESQYYRISDSNKCVYSSGDVYPNYVKLSKGEYTLQLYIRHDNVQLLEKLKQLVLFIERKLEKKDFIQLSFYSEPDGPTVGNGTFKSSILVPGEPEAFYVGPPSREKLPKNVLPGSVLVGSITYGAVSSFSKKDDQNQHAPASYSISYLIPPSKVDNDKEKGVSSGRKSISERLDDEVRDTKIKFLSGFNQETEDDKSSWTALVASLKPEYPKYTPLLAKILECIVQKATSDDKFSHQKEIIAAADEVVDSIDKEDLAKSLSLKPDPEDEEAQKNKKKMEETRDQLADALYQKGLALAEIESLKTDESTEASAKDVFEENYKELIKWVDAKTTKYGSLTVLRERRCGRLGTALKVLNDMIQDDSEQPKKRLYDLKIQLIEEIGWVHVSAYEKQWMHVRFPPSLPPF

SEQ ID NO: 167962 - protein, 508 aa, Oryza sativa
  Clone ID: PAT_MRT4530_66523C.1.pep
MAAAAAAAPPSSSSLAPPEVPMELHAGNRDRLVAALRAHLSASGRPLRGLVLLQGGEEQTRYCTDHLELFRQESYFAYLFGVREPGFYGAIDIVSGQSILFSPRLPADYAVWMGEIKPLSYFKDRYKVDMVFYVDEITQVLQDRFSDHGKPLLFVLYGKNTDSGNYSKPASFEGMEKFDSDLSTLHPILTECRVIKSDMELALIQYANDVSSEAHIEVMRRAKPGMKEYQLESIFLHHVYMYGGCRHCSYTCICATGENSSVLHYGHAAAPNDRTLNDGDMALMDMGGEYHCYGSDITCSYPINGKFNSNQTIVYNAVLKAHNAVIAHMRPGVNWLDMHKLAEQTILESLKNERILHGDVTDMMAQRLGAVFMPHGLGHLLGIDTHDPGGYPEGLERPKEPGLSSLRTIRELKEGMVITVEPGCYFIDALLIPARDDPVSSKFFNWEEIEKYKSFGGVRIESDVYVTAHGCKNLTNCPRETWEIEAVMAGSVEDGPLEYRPLKTERYK

SEQ ID NO: 167963 - protein, 174 aa, Oryza sativa
  unsure (1)..(174): unsure at all Xaa locations
  Clone ID: PAT_MRT4530_66524C.1.pep
KRGTRDAEQKSVKSHVAPQPAPPPPRASIAAPHPPLASPPRRPSTSSRLHTAPAPLSSPPASPPSPLXRRRPSPSHHASTPSRRGAGRAAPPPPPEAVPTPRRRPSPLHPCRRRPHCAPPPLASPPPSTCAASSPLDALDRSRWSQTPSSEGMYPLLSPPAPPCRPTIWPPHVR

SEQ ID NO: 167964 - protein, 466 aa, Oryza sativa
  unsure (1)..(466): unsure at all Xaa locations
  Clone ID: PAT_MRT4530_66525C.1.pep
HPVPAYPPPPSRASRPPDPSRSAALRPHRYCPPGPPPPPAPPPPPSPLGRPTXPRAPPAPSPQLRAPFQHPNSASPPPSPPPPLPPSPXPAPPPAPPPAPPPRPPPTPAPSPPPXPPPPPPTSPPTPPPHPHPAYHPTPRRSPSPHLCPHPPSPPPPRPYQPNPPPPPTPPPTPAIGAPRATPPSPSSPPPRTPPISPASPIPPSPQXPSPIPFPPKSDCDLPDLPPRLRSSPLPDXDPSPPRGDFSSPPMPLPPNPRPPPHPHPRRPXPGRTTPPPSPPASPTSTRSTPPSVSSSTSPRPRPPSPPPTXPPRRLPPPRRRPRQLPGDRRRAQAGRRRGPGRHPPPRRRAPRLRGALAAQGREGARPPRRRREGRRQAVAPRARRERGGGGGDRPADGVGRGHRRRVRDAFQHRGVHVGVGFGGGVLLPEDGGVGVPDQEDVGVVGGGEGDDGAGGEAGGAGGVHR

SEQ ID NO: 167965 - protein, 74 aa, Oryza sativa
  Clone ID: PAT_MRT4530_66526C.1.pep
PEKSPSDGTEVLFFLIHCGCQTNETPSVGLQSVEFCKNKCPPQQWCISSYSGSVFPTSMEYARLPLVTGLCAHL

SEQ ID NO: 167966 - protein, 77 aa, Oryza sativa
  unsure (1)..(77): unsure at all Xaa locations
  Clone ID: PAT_MRT4530_66527C.1.pep
SYACLVVYQWVNAHNIVXFSKDMDGSRCSFRSVGACRRTPPRESPWWASSVLGSFRMRGSGWDLRIGPARCRSIRYT

SEQ ID NO: 167967 - protein, 642 aa, Oryza sativa
  Clone ID: PAT_MRT4530_66528C.1.pep
MLTILRVHLPSEIPIVGCEITPYVLLRRPDGGISTEDVHEAIPLDGHFMRSKWYRIQSDRRVAVCNVHPTEQATIQCLGCLKSKIPVAKSYHCSAKCFSDAWQHHRVLHERALSALNENGNEEEELFGRFGSGNAGIINASLSGSTSNIGQSSSVNNGPTPVYPTGTEKNSGETWFEVGRSRTYTPTADDIGHALRFECVAVDSETRSSVGAPTSIMTSRVIPAPTPTPRRLIPVNSADVMGHFDLDSRNSSFGTFTVLSYNILADTYATSDTYSYCPTWALSWPYRRQNLLREIIGYHADIICLQEVQSNHFEEFFAPELDKHGYQALFKKRTTEVYTGNLQSIDGCATFFRRDKFSHVKKYEVEFNKAAQSLTDAIIPAAQRKVALTRLIKDNIALIAVLEAKFGSHGADNPSKRQLLCVANTHINVHQDLKDVKLWQVNTLLKGLEKIAVSADIPMLVCGDFNATPGSTPHGLLAMGKVDLMHPDLAIDPLGILRPASKLTHQLPLVSAYSSFARMVGAGYDLEHQRRRMDPATNEPLFTNCTRDFTGTIDYIFYTACELLVVENLQSDSWGTHDDHLVQNYAVAIGPDKAFCLQLHDKLYCSMFNILPIGRLIAPAIPGCPILDLDILGQMDYVTTAL

SEQ ID NO: 167968 - protein, 47 aa, Oryza sativa
  Clone ID: PAT_MRT4530_66529C.1.pep
GLKPPNFLNLTFFPGNPRVYKSPTFQGKNPSRLSEDKHNILLLTNNF

SEQ ID NO: 167969 - protein, 119 aa, Oryza sativa
  unsure (1)..(119): unsure at all Xaa locations
  Clone ID: PAT_MRT4530_6652C.1.pep
KGKRDLLRQRLGFXVDRAHGDGSRERTAEIDXSKTDGRDRPIHGRTTRDDDDDVSGDVTTGGGSGAQARRRTMARRRERRAPGRRGRRGELTGDQNGGGRSTNGDGVEEEAASTFGYSK

SEQ ID NO: 167970 - protein, 710 aa, Oryza sativa
  Clone ID: PAT_MRT4530_66530C.1.pep
MAGLAVSASPAPAPASFRPAAAASRFGPCAQVAGPAANFRTRVCGLRCLIAAKLKFRKALKRHGWQLRRNLEVRANDKVPDWLEATPLTENIMSRDVQLAYDSGGETSNTCPDTLDSSVIEQSSMHHKLNPSETHPPVLKEDPVLFDDPPESAAPLCIAVIGATGELAKNKVFPALFALYYSGFLPQNVGIFGYSRKTLTDEDLRSMIEANLTCRVDHHENCDEKLNEFLKRTYYIDAGYDNKDGMVKLNSKMSQIEGLHGSLIGLFVSKGNCAANRIFYLAVPQEALLDVALSLADSAQTMQGWNRIIIEKPFGFTGLSSHRVTQSLLSRFEEEQIYRIDHLLGKDLIENLTVLRFSNLVFEPLWSRTYIRNVQVIFSEETAAEIQGRYFGNYGIIRDIVHSHILQTIALFAMEPPVSLDGEDIRDEKVKVLRSIRQVNLEDVVLGQLKDTSVKVDRYTKSLTPTYFAAAMYIDNSRWDGVPFLIKTGIGLMENRAEIRIQFRHVPGNIYRERFGHDIDLDTNELILRDQPEEAILLKVNNKVPGLGLQLDASELNLLYRDRYNVELPDSYEHLLLDVLDGDSHLFMRSDEVAAAWNVLTPLIHEIDQNRIAPELYEAGGRGPVNAYYLAAKHGIVKIVSPDCTTRGSGGGEMHVTPKVHLVTTTVVLESLPLSNSSVGKILFVNKSHGLFAIAGGQVGIWARKFGLRV

SEQ ID NO: 167971 - protein, 101 aa, Oryza sativa
  Clone ID: PAT_MRT4530_66531C.1.pep
GSSFAGHLAADKDKAIVRVSLEIASFGRWQQMAYSVNEECLQCHCNKGKDSESVSSWYPVVHCSIVGIPRSFFSNRTNAWCLSPACVHDRRGVVVPIAVSF

SEQ ID NO: 167972 - protein, 80 aa, Oryza sativa
  Clone ID: PAT_MRT4530_66532C.1.pep
MKTIVTARDSNLDDDEGCDRAWARRIRHTELRKGAQLQRRGEATAIEEGHEGDGSVEVDEACFYLMGLDYGPKRDGFGPR

SEQ ID NO: 167973 - protein, 36 aa, Oryza sativa
  Clone ID: PAT_MRT4530_66533C.1.pep
MAQVADQRSAVAGADGISIDIMHSQALSPRGSKYTP

SEQ ID NO: 167974 - protein, 37 aa, Oryza sativa
  Clone ID: PAT_MRT4530_66534C.1.pep
GRSTPSKWCFICFNHYNIFFLYIEQNPMGTKDSASHK

SEQ ID NO: 167975 - protein, 379 aa, Oryza sativa
  Clone ID: PAT_MRT4530_66535C.1.pep
MPADFGADQDRIRRLLRCFSGIAIAVLVVVAVLVLCALEASKAPRLSVAVAIVSGLDPATDLARPAVDPQFNLTLRVASRSLLSRACVGVSSTAVAVSYHGVRLASAPVAPRVCAARRKSADAGPFVAWGSSVRLPGFARDSLAADMRNGAAAFDVALMDGHLVVCRGRRVGDADALQAPLQHIPFLRLQKLPICQINVYKNPGRRTPALSIKNARTKRIEYKQRLKINKYYVAIDTASGLDPATDLPWPVLTPEFNLTLRVTSWSVVGAACLDPAMDVAVAYRGLALARASPPPRVCARGWGRTEQVPVVASSGNGVRLPGFALHGLEADAWGGAVAFDVALTMPPKGRDNRHQLWCRAVPVGDDGGLGIPCNANSEY

SEQ ID NO: 167976 - protein, 68 aa, Oryza sativa
  unsure (1)..(68): unsure at all Xaa locations
  Clone ID: PAT_MRT4530_66536C.1.pep
PGNQTTVKGPPPRTKSPPKRGPSRRPEATPWTPKGEKKRPPXKAPTTNGPTRPGTKGPPPGGEPRGGG

SEQ ID NO: 167977 - protein, 45 aa, Oryza sativa
  Clone ID: PAT_MRT4530_66537C.1.pep
LVYEDVGREICCMAAGVLEADQRWSLLHVTCFKKQLLTCIVHCHN

SEQ ID NO: 167978 - protein, 94 aa, Oryza sativa
  Clone ID: PAT_MRT4530_66538C.1.pep
VNFYPAPGPIPPLIPKSPPGKELSFPGMVPTPPDVGVNFSPAPGANPPHTPKGPPGKEMSLQGMVAAPPLVGVNYSRAPGATPPHNPKGPPGGD

SEQ ID NO: 167979 - protein, 109 aa, Oryza sativa
  unsure (1)..(109): unsure at all Xaa locations
  Clone ID: PAT_MRT4530_66539C.1.pep
CQXESQRKSVNSAWRLCLLFVVRRLVLITEFPKKDSQSALVDSNIXSEFHLHNGHGPGIKFKAGAMPNVQVLVCSFHACESVRVYGDFDFGVQHLVISRSYQCRDLLYR

SEQ ID NO: 167980 - protein, 76 aa, Oryza sativa
  Clone ID: PAT_MRT4530_6653C.1.pep
MGVRFPSRQSGHHPPLAPSGCATLPLHRRATPGHSPRADQVTALPSHYRTTPQPSPRADPAAALPLHHLAMAVLSR

SEQ ID NO: 167981 - protein, 57 aa, Oryza sativa
  Clone ID: PAT_MRT4530_66540C.1.pep
LSPNNKIFHKYRANQTRHHFFFFWGGGGGINIIPSMPFFSNISGSIMGQPGFNPIVK

SEQ ID NO: 167982 - protein, 106 aa, Oryza sativa
  Clone ID: PAT_MRT4530_66541C.1.pep
CFSFSCCCMYAPLNQYSLQTSWQLPASCRCELKPLAPWPPSPCRRRGRRLRSGGSARAAGDAMHATGYGRSARVGLSLSLSRVRPAVPAACCRLDESDHRRWAALV

SEQ ID NO: 167983 - protein, 484 aa, Oryza sativa
  unsure (1)..(484): unsure at all Xaa locations
  Clone ID: PAT_MRT4530_66542C.1.pep
VSSSSTPASSLSLSLSLSLVNSIAIPLADHALYYFLGSMGDEEPMEFINVDTNRISFKQSSPCIPDWNIGFKSRPSKLPGWKNWYRPMLEANHQVWYDVGIAQCLALSLAEPKKDESLIASATYLWFDALNVFMFNHAPMTXTLLDIVMLTVLDIASSANLFNLRVKCVNKLETKSVGGWSSYIAKHARIGALTDREHIAFKKLWLERFVFYDTTTVPTSNMQHIAQALSEGKLLPLGKYFLGATYQLLXQASAKLLAGQPIGHPGGPWXTCTTLAQVLPYRISQTAPLPTPDFQPILQKAMIELFAXCMSLGEAAIIYLGIALHLKISNSXFDKFCTDFPRAARNWIPYEEFKGYTRPSDFNPININSNETSREIFISAITPYILPTGITMGHYSRVSYEFYHPSMVTHQLVFGQVPITLHFFDKIQTRVPITSTLMSNRLLNLNGPDLGPFREMKLACEETQFRRIMSEHEIDGPTSQCKPT

SEQ ID NO: 167984 - protein, 102 aa, Oryza sativa
  Clone ID: PAT_MRT4530_66543C.1.pep
MDLADALVVLLILGFLELWLSWNHQIAALITRGFRTLATDLCSYAVAAAVRRRRRVRTEERNPVRPFAAAEDHRSAIAAVKPNRAAIEARRRSSSVVVRRSG

SEQ ID NO: 167985 - protein, 76 aa, Oryza sativa
  unsure (1)..(76): unsure at all Xaa locations
  Clone ID: PAT_MRT4530_66544C.1.pep
MRSPSPRTTSLHSDKHCTRTIGAFMWXAKSLVKSAPHPEFLDEITVLASLESLITELEAAATSYVEQVAEGMRSRI

SEQ ID NO: 167986 - protein, 143 aa, Oryza sativa
  Clone ID: PAT_MRT4530_66545C.1.pep
MDLADALVVLLILGFLELWLSWNHQIAALITRGFRTLATDLCSYAQDEKSNLPPRVLFIFKLGQKPELPSCALADAASSTKSAASPVAAAVRRRRRVRTEERNPVRPFAAAEDHRSAIAAVKPNRAAIEARRRSSSVVVRRSG

SEQ ID NO: 167987 - protein, 279 aa, Oryza sativa
  unsure (1)..(279): unsure at all Xaa locations
  Clone ID: PAT_MRT4530_66546C.1.pep
VVGVAAGADVFLEETSGVVGGRFQARRSSRLAAARRLRPSRPHPPRWPPPEXPDPASPPEAPSAKKGVFMRRIFPFLLAXFGKHSMFSLSEPLLPSEIALPTSRVVAMTGXMRCRCSGAAGGGTVVAALARRDGRHHHRPGHAARRRPPRLLLLRLRPRFLLRRALPPLQGNVCCINVPFSVPRPLRLNSRGVLLTDGLPPPRRRRRSSRGRPRSCVPRQCHVGXGPSQTNHVDATSFKTGYNTAEGSRLHGFGKLXGMRCIWFCGLRTKIGRQIKGPK

SEQ ID NO: 167988 - protein, 54 aa, Oryza sativa
  Clone ID: PAT_MRT4530_66547C.1.pep
GYIQWNGKIIGCRYGHRHTRIDGTPHTYPRSCKKRKLQRNNGGDDANIKKAAID

SEQ ID NO: 167989 - protein, 84 aa, Oryza sativa
  Clone ID: PAT_MRT4530_66548C.1.pep
MPKRSECWQGSNPCWRKDMTTWEGKGKRAADAPNREGEHAYLLTCEALDLTDDETWTTNVPLMEGNNARGETLREAKARKDSPA

SEQ ID NO: 167990 - protein, 40 aa, Oryza sativa
  Clone ID: PAT_MRT4530_66549C.1.pep
VPTSCWGRSISCRSTSYRVRHASLRDSDVRPSLQLLDILC

SEQ ID NO: 167991 - protein, 109 aa, Oryza sativa
  Clone ID: PAT_MRT4530_6654C.1.pep
FSSLIACSHGVLLGCLRIFCIHQLKMGCTWIWTFLCHTNNGTAALRRMHDADPALYLSPSADLAAVDREAYKHLYASLVPFSPAQPPPLCNLLAGPAFDGQQILSQIEL

SEQ ID NO: 167992 - protein, 121 aa, Oryza sativa
  Clone ID: PAT_MRT4530_66550C.1.pep
MDHFDLLALSGNNETLAKFAAFVVVQALVYLILSRSSAVFFSGAGAGTASFRRPAVERSESARRRMAALLAAEMTPRRSGDAPPTPAGIQRRGRRSNDDDGGDVCVDVELELMLIRCSFSS

SEQ ID NO: 167993 - protein, 140 aa, Oryza sativa
  unsure (1)..(140): unsure at all Xaa locations
  Clone ID: PAT_MRT4530_66551C.1.pep
PRVGRAGRRSPVPRGQRSCVLSRGFLPRRRPWRTKSHVLLIPRRAFRSPRLCARPGFSCXSGRFFYVPLPPRSPDALFPRGVPSSCCLTARRAHLMRLFPYARLTVIAVLGVRSRIRHFRRIWLAVSVAHCGAYSCFCLA

SEQ ID NO: 167994 - protein, 50 aa, Oryza sativa
  Clone ID: PAT_MRT4530_66552C.1.pep
DIVVSVLQHLFLDWYWVNIKYAANVHLISTFFFDLTVSNRCSVGIIDIVL

SEQ ID NO: 167995 - protein, 64 aa, Oryza sativa
  Clone ID: PAT_MRT4530_66553C.1.pep
MVHDSVGVDDTLRASSSGAPVGVLLERQANECEEDNSTDKSEWMSAVSRRRGCDRQGDNVQASQ

SEQ ID NO: 167996 - protein, 43 aa, Oryza sativa
  Clone ID: PAT_MRT4530_66554C.1.pep
LCLFCRPLAKYTLELCVSTPPPVAAAAMKECVLDEYATKHRIS

SEQ ID NO: 167997 - protein, 58 aa, Oryza sativa
  Clone ID: PAT_MRT4530_66555C.1.pep
RTVLLAVAPVTTQDLVSRFKSRLRGPEDKNAFAEILKKISKIQKTNGHNYVVLRDDKK

SEQ ID NO: 167998 - protein, 532 aa, Oryza sativa
  Clone ID: PAT_MRT4530_66556C.1.pep
MGSADLVLKAACEGCGSPSDLYGTSCKHTTLCSSCGKSMALSGARCLVCSAPITNLIREYNVRANATTDKSFSIGRFVTGLPPFSKKKSAENKWSLHKEGLQGRQIPENMREKYNRKPWILEDETGQYQYQGQMEGSQSSTATYYLLMMHGKEFHAYPAGSWYNFSKIAQYKQLTLEEAEEKMNKRKTSATGYERWMMKAATNGPAAFGSDIKKLEPTNGTEKENARPKKGKNNEEGNNSDKGEEDEEEEAARKNRLALNKKSMDDDEEGGKDLDFDLDDEIEKGDDWEHEETFTDDDEAVDIDPEERADLAPEIPAPPEIKQDDEENEEEGGLSKSGKELKKLLGKAAGLNESDADEDDEDDDQEDESSPVLAPKQKDQPKDEPVDNSPAKPTPSGHARGTPPASKSKQKRKSGGGDDSKASGGAASKKAKVESDTKTSVAKDETPSSSKPASKATAASKTSANVSPVTEDEIRTVLLAVAPVTTQDLVSRFKSRLRGPEDKNAFAEILKKISKIQKTNGHNYVVLRDDKK

SEQ ID NO: 167999 - protein, 482 aa, Oryza sativa
  Clone ID: PAT_MRT4530_66557C.1.pep
MESSSSVSVSDESSEANGGGCCSSSTTPSMDAVNLSRTFSDVSSFSEEHGGSGSSVDHSGPFEPPSAAAVSRLIGRRSPAAAASALSLSRLSMKPRADVLDRRSTDDELELVKERFSKLLLGEDMSGGGKGVCTAVAISNAITNLYANAATVFGSCHKLEPLPAGKKTMWRREMDCLLSVCDYIVEFYPSSQTLPDGTKVEVMATRPRSDIYINLPALEKLDAMLIEILESFQKAEFWYADAGTRSFGSATSSSTMSSSSFRRSTHRNEDRWWLPVPCVPDGGISGKARKELQQKRDCATQIHKAAVAINTGVLGDMEVPDSFMAILPKSGKASVGDGVYRAMLGAEKFSPEYLLDCLDMSSEHEALAMADRVEAAMYVWRRKAGASHGRSRWGAVKELVADDEEQDKNVMLAGRAESLLLCLKHRFPGLSQTTLDTSKIQFNKDIGQAILESYSRVLESLAFNIVSWIDDVLFADKTVRKQ

SEQ ID NO: 168000 - protein, 114 aa, Oryza sativa
  Clone ID: PAT_MRT4530_66558C.1.pep
MSVDFRRRGVGDNAKGTGRMAAVEVQLPRGNDPRGGSYPWGFYSQVRPMTARAMVLFLHVVWMAVVMIRTHGSEVDAIGRTTTSLLAVLTATREVQSGLILRSNVLLVSKGRSK

SEQ ID NO: 168001 - protein, 587 aa, Oryza sativa
  Clone ID: PAT_MRT4530_66559C.1.pep
MRGGGGGGGGGGEEAGQKLKSMDVDKLENGGDKPALKYHGWRAMPFIIGNETFEKLGTLGTSANLLVYLTQVFHMRSVDAATLLNGLNGTTSLAPIIGAFLSDAYLGRYLALAIASVASLIGMFLLTMTAAADGLHPAECGVGETCSKATSGQFAVLFMSFAFLVLGSAGIRPCSMPFGADQFDPHTESGKRGINSFFNWYYFTFTSAMLVSATVIIYVQSNVSWPIGLGIPTALMLLACVLFFMGTRLYVRVTPEGSPFTSIVQVFAAAARKRSLKQPKDPKQDLFDPPHTSAIVTKLAHTDQFRCLDKAAIVSGPDDVRAGGAAPSNPWRLCSVQQVEEVKCLIRIVPVWSTGIIYYVAVVQQSTYVVLSALQSDRHLGRSFQIPAASFTVFAMLAQTLWIPIYDRLLVPRLRRVTGKDEGLTLLQRQGIGIALSTVAMVMSAVVEDRRRHIALTQPTLGTTITGGAISAMSSLWMVPQLMVLGLSEAFNLISQIEFYYKEIPEHMRSVAGALAFCNLALGNYLSGFLVTIVHRTTGAGSNWLAQDLNKGRLDLFYWMIAGIGIFNIIYFMICAKWYRFKGAAAN

SEQ ID NO: 168002 - protein, 124 aa, Oryza sativa
  Clone ID: PAT_MRT4530_6655C.1.pep
LALAVGIVLAPCSSLSAVAAELRSVAAVLRLAAAAAPLFLPTRRHLPRHRRIAVDPVRASTSPADRRSTVVIVFPNRAAAFFRFGRHSRRRRCPGVSRRPPFAFPLSSSLSGATPPRRWSPAAT

SEQ ID NO: 168003 - protein, 711 aa, Oryza sativa
  unsure (1)..(711): unsure at all Xaa locations
  Clone ID: PAT_MRT4530_66560C.1.pep
MLPLSLLKTAQGHPMLVELKNGETYNGHLVNCDTWMNIHLREVICTSKDGDKFWRMPECYIRGNTIKYLRVPDEVIDKVQEETSKSRXRGIGRGQDDGGSKGGGGRGRGGIGGKGGIKVVTSEEAAVGLSRNNLFDVWTLDYIEYYCGYYFDLFIAESQEKASASASAAVGGGGDRSMAEAEEKRVGVGEARAPLAVEALRGKIVEKVKGNRVTLIVGDTGCGLSAGGFSEFSTLDSVFASLLQGKEFYGSTVPPGRKHGTHSMHAAKEVILATNIAESSVTIPGVAYVIDSCRSLQVYWDPIRKTDSAELVWVSKSQAEQRKGRTGRTCDESRAMNDPHVLLQKVLDPPDSDVVEDALESLVQIRRHEPTFYGCLLNSLPLSFDASVLALKFGDTGSICEGILISIMLDIQPLPIVQPFGHQQLCKMYRNNYFEEEGIDLQTGKKEAALVGNLCAFQFWQRMFKDKYRLDCLINVVNTHEPKASNGFVAKPEDEWCAATPYVSPADFGTTTVVKTLKTLIKEKFFQHIAIKTLSEKMSDLQVIVIMNNAKFVQLQVERLARECFLFLGESFMFDEATLGWFSDTPNYPRGMQVSAPVAYIFSMHPPTGIQFGIKTKLKDSLMILKDGKATNTNSGVRRRVQRVYIVCRGKNGQAMVVAIETVADASMPAPLPPVAILDITGRDGKTGREHSLVSLVENVYNTLEVGGAEN

SEQ ID NO: 168004 - protein, 218 aa, Oryza sativa
  Clone ID: PAT_MRT4530_66561C.1.pep
MLPLSLLKTAQGHPMLVELKNGETYNGHLVNCDTWMNIHLREVICTSKDGDKFWRMPECYIRGNTIKYLRVPDEVIDKVQEETSKSRSDRRPPGVGRGRGRGDIGTKPGGRGIGRGQDDGGSKGGGGRGRGGIGGKGGIKVVTSEEAAVGLSRNNLFDVWTLDYIEYYCGYYFDLFIAESQGGIKSQTVAPFYHKMVTTLATAALINGTASPNAFTYN

SEQ ID NO: 168005 - protein, 121 aa, Oryza sativa
  Clone ID: PAT_MRT4530_66562C.1.pep
PRVRPRVRPTFYGCLLNSLPLSFDASVLALKFGDTGSICEGILISIMLDIQPLPIVQPFGHQQLCKMYRNNYFEEEGIDLQTGKKEAALVGNLCAFQFWQRMFKDKYRLDCLINVVNTHEP

SEQ ID NO: 168006 - protein, 110 aa, Oryza sativa
  Clone ID: PAT_MRT4530_66563C.1.pep
AGRRRPRPTQPSPPASATRHARLSDPNAPSRTQTPPPSSPTLGAGSPRRRRRRPPRHLPQSSPPTPAIPPRAKYLPPPLERERSSVRHLARRATPTMCSMDGPSRLRRRL

SEQ ID NO: 168007 - protein, 147 aa, Oryza sativa
  Clone ID: PAT_MRT4530_66564C.1.pep
MLPLSLLKTAQGHPMLVELKNGETYNGHLVNCDTWMNIHLREVICTSRDGDKFWRMPECYIRGNTIKYLRVPDEVIDKVQEETSKSRSDRRPPGVGRGRGRGDIGTKPGGRGIGRGQDDGGSKGGGGRGRGGIGGKGGIKGGGRGRG

SEQ ID NO: 168008 - protein, 442 aa, Oryza sativa
  Clone ID: PAT_MRT4530_66565C.1.pep
MSQPASAAAAAAAGEEEEEDAAWADALDFDDSGFLRRGPASSPSRLRPPRPDDPAPAASLSQGAARGLRSPPHLASSGPAARGHATDPDFSLAPWLHALGSLGEGGVEAVTGSDIPCLVLRFRLLIVAWVVGVVTSCAPNRLGDLFLSLKDPSGTVGASVHQKVFTKEDNMVVSVGSCIVLKNVAVFRPSHKGCYLNVTKENLEMLVPKDFCFPSKQVFSSSPSESQHPVKCQETRDSSCQGDNRIRKTGVETYGQTTGNAVRDSTLRMDNGSTQGVGNHLDTRMKEKDINPSNKNTPSYSADQQFQKTSSSSASSDEKLSRPLEGERVHPNSKKQRGDAVLPDNVMSSTNIETYGLANNLNIGLDDVAHLVEHASIKKPNEHQQKDFITGTLGIVLPTQENSSVSNSDATTLSASLHSQPNKMASVTEWTDDQLSELFADY

SEQ ID NO: 168009 - protein, 91 aa, Oryza sativa
  Clone ID: PAT_MRT4530_66566C.1.pep
DCLITQHNKALCICKAARITYLQVELPRNCYKTVFQDCMKAKRVCTLTRIWQPAKAKQINDESNILREREQSMLADSELRATNKIFLMSKG

SEQ ID NO: 168010 - protein, 135 aa, Oryza sativa
  unsure (1)..(135): unsure at all Xaa locations
  Clone ID: PAT_MRT4530_66567C.1.pep
MASSFPSAIMIPLLPLLLLLLLVCTRGASLMLTTSRRRARVRTAYCYTRMFSFGDSITDTGNQVXLLPHRTRRQAPYGETFFGHPTGRYSDGRLVVDFLAEALGLPYLTAYLRGKTAEDFRXGANXAVSXXRLKL

SEQ ID NO: 168011 - protein, 90 aa, Oryza sativa
  Clone ID: PAT_MRT4530_66568C.1.pep
PPSRPITKTVTNVGRDERYPVSYRAPYGVPVSGSPAQFFIPTGQRHQVPFFVNAPMNGPPPRFGRVGFYGAKGPRGMIPFSVFSKVGPRS

SEQ ID NO: 168012 - protein, 1076 aa, Oryza sativa
  Clone ID: PAT_MRT4530_66569C.1.pep
MWGHMSSFLFFLLLPLSLPSLSFSPPFLFTFSLVEQSTVSTAAAAQLEILLGPAVLPDNIAFNADLGVVGEVGGDSGDDDKYEEEDDKKEEMEGACGSRMGERGRGGNGGSKGGHFAGVGVLHSSQIDPDAAFIVCVRFGQYTAKLDDGSSVHVPSKYAEWVVDYRQCTLESLEKDFAARVKWGRCQQVVVYGYDKRTGKETKFLDNMDLAHALFDWKRERRLILFVDVEDKSGQLVTSSSISEVNELVMGEVVTAKQGDALDSSNQHLIDWDSFKISPILEEQIGSSVPMMKEDEMSIPQEQVPQHVIDWDGLEIAPIPEEQIGSSLPVMEEDEMYDFLGLRTEDERADQARLEAEKQRDSAPGPAPRLAQRDLNLDEAEIDARFEAEIFYDRDDPPMIVGSSYGSMVEFRSAVRQHAIKGQFELGTEKSDPERFRGYCKAEGCPWAIVARLMPDGKSVKVTLNRFAHACTSIEGVKTKMVSYKWVAEKAIPFLKKDPNMGAKKLKEELETKYNVTVGYSKVWQGRQKAVEQIFGSWEESYLFNFKAEVELKMPGSVVEIDVQEDDDGIYFCRFFCAFKPCIDGFMNGCRPYLSIDSTAFNGKWNGHLPFVTSIDGHNWMFPVAFGFFQSETTDNWTWFMQQLHKAIGKPSHLAISSEACKGLENAVKSVFPWAEHRECFCHLMQNFVEKFPGPMYGNMYPAARSYMQDRFEHYMNIIHETNSDVKPYLETYHKLLWMRSKFSEEIKCDFISNNLADLWNKWIKDMKDLPVAELADAIRSKIMDLLARRKKIGEKLDGEMLPIIVRQLNAMTRSLGHLRVVQGDRDQAEVAEITPEHEIIRHRVNLAKHTCTCREWQVSGKPCPHALALIISTRNPRMADYLDPCYSVQKYKLAYAGVIHPLSDKSQWPKVNLGFNLLPPLTKKDVEKQRKNMIVGCLDKEQGKLRTKGKWQVQCKSCLGMGHRATSPKCPLNSQKIMKNSDKQGRPLGSTSCAAGASTPKRQKVSRNDSSNASPGPVSERVVKEPMGLDPLPPLRGDGEAWGQGCWAYRCGSSGNEAMECVGIERMRRATRDLL

SEQ ID NO: 168013 - protein, 422 aa, Oryza sativa
  Clone ID: PAT_MRT4530_6656C.1.pep
MYIIEDKGGAIALMLASLFFLGTWPAVLTLLERRGRLPQHTYLDYSITNLLAAVLIALTFGQLGDSKPNMPNFFTQLSQDNWPSVLFAMAGGVVLSIGNLSTQYAWAYVGLSVTEVISSSMVVVIGSRSENSHVGSSGTTLNYFLDNRINRAEILFPGVACFLVAVILGSAVHASNAADNEEKLNGSTNIYKLGENGSVEPNKEVIEKDAPKDLENGASATKYVAKAEAGTAEYLIELEERRSIKVFGSSTFIGLGIVFFSGVCFSLFSPAFNLATNDQWHTLKQGVPHLVVYTAFFYFSISCFVIGIGLNILFLYRPMAGVPKSSFKAYLNDWEGRQWALLAGFLCGFGNGFQFMGGQAAGYAAADAVQALPLVSTFWGILLFGEYRKSSRKTYILLGFMLFMFIVAVAVLMASSGHRSTK

SEQ ID NO: 168014 - protein, 101 aa, Oryza sativa
  Clone ID: PAT_MRT4530_66570C.1.pep
LLLFFILVHIFCFGGRKQDPMGTHQKMGGFKKSTKTPPNGNPSLGGPKKMARGKWDHTPFFKNIPPTPGKNLLTTPETGLYGPPDPPKKGDCNAPRKGHGG

SEQ ID NO: 168015 - protein, 53 aa, Oryza sativa
  unsure (1)..(53): unsure at all Xaa locations
  Clone ID: PAT_MRT4530_66571C.1.pep
YFNIIPTHXLLTSNLPSLNKLLIFPSHIIFLLLLYLNPTINTHKLHSLTNLLS

SEQ ID NO: 168016 - protein, 48 aa, Oryza sativa
  Clone ID: PAT_MRT4530_66572C.1.pep
MAMRLRASSAANALKISCSGATRAAPAYSISRYFSTGIASLSSRIHIK

SEQ ID NO: 168017 - protein, 44 aa, Oryza sativa
  Clone ID: PAT_MRT4530_66573C.1.pep
MAGSWPAGRQEAHVIAGAGDYAAAASWVASPVEVALTDLQHERK

SEQ ID NO: 168018 - protein, 170 aa, Oryza sativa
  unsure (1)..(170): unsure at all Xaa locations
  Clone ID: PAT_MRT4530_66574C.1.pep
FGRMGVVDLDKFARALRVXWLWFSWVCPNKPWAVTHPHXCDELNRKLFGSATKVETDXKAIIWESNWIGEQPLKESAPTLYKHAKIKVRSVQERXANDQWVDDIWRNLTNQLVKAYFEVFNQVWSNGITLTEGVDDTITRRWTSNGFGQRIGYRSDNGQIIVFINYVIGT

SEQ ID NO: 168019 - protein, 68 aa, Oryza sativa
  Clone ID: PAT_MRT4530_66575C.1.pep
MEAEFHVKEVDKDQDDVAQNNADKEETLDGHKMAKQDIVQYNADTHNHRHLAVDGYVAYHLKHIAVKS

SEQ ID NO: 168020 - protein, 100 aa, Oryza sativa
  Clone ID: PAT_MRT4530_66576C.1.pep
SYVSYSCWLSSLLSIIKCAISYQISVFSSIKKVSKKREERKVPKKSVNKIVKKSRTISLFICTSAENFIKLFNQFAIVIWCKILVGFECNTCIPIKLLSH

SEQ ID NO: 168021 - protein, 395 aa, Oryza sativa
  Clone ID: PAT_MRT4530_66577C.1.pep
MKPQRLPLPPVPAAALLLLPVALLAALLLVVYPNEFALQASLAGAAACGDHQGGGGGGGVQAAPEFRLLIGVLTLPARYERRHLLRMVYALQQPAVASRARVDVRFVFCRVGSPEDRVLVSLEAMAYGDVVELDCPENMDNGKTHAYFSSVPRLFGGGEAAYDFVMKADDDTFFRLPELAESLSRAPRRDLYYGCMVPCDYVRGSNEYMSGMGYLLSWDLVEWIVAAAAEIEGRTGGPEDRTLYSWLRRGGRGRNRVDVKPAMYNFPGRHPCSHEFIPDTIAVHQLKDNRRWARTLQYFNFTAALKPFYPALGAGTTPRHRLRRRHWGAWATAAALSRLDPPVVALPCSDPLAAALPRLDPQAGALPHPDPSAVALPVPPHRDRRRTTSTVAAKA

SEQ ID NO: 168022 - protein, 134 aa, Oryza sativa
  unsure (1)..(134): unsure at all Xaa locations
  Clone ID: PAT_MRT4530_66578C.1.pep
PPRRPPSPPXPPPPPSAPPPPRAVPPPLAATGGLDGACPVAQPSPSXPPRRSPQPRPSLAAAVAQPPPGPPQPGASARRNRGIRSPWPSPRLRPPRRGLCSPQPPAXRSPSPAPPVAAVVAPPQLAPPLARSCG

SEQ ID NO: 168023 - protein, 166 aa, Oryza sativa
  unsure (1)..(166): unsure at all Xaa locations
  Clone ID: PAT_MRT4530_66579C.1.pep
RQHDVINGRPARVGHLAGARTVGRGFGGQVHVEDDKTNPTVLTTTTNDARRRPATRRRRRWLGLRGDGELRRPATMGKGRPRFPSPRRTXRRRRQAAATAGAAWRRNRXTAGGGGLKGGGAAARXTGDHEREGKRKRATRWSYIXPWIEEIGLQTRGIEAGNKKLG

SEQ ID NO: 168024 - protein, 138 aa, Oryza sativa
  Clone ID: PAT_MRT4530_6657C.1.pep
MEGGIVVAVVNLPPPPTLMLDPRVSTARTRDRLRRSLAAPTCEVVTSVSAVGGGEEMGAAAATPCSTAALRRRNAAQHRRPPPPCRTAIPFRCAAPPSPSAPGHSAERRRPQPPGRSNSFVGLPTVNPSLRRRAQLLL

SEQ ID NO: 168025 - protein, 175 aa, Oryza sativa
  unsure (1)..(175): unsure at all Xaa locations
  Clone ID: PAT_MRT4530_66580C.1.pep
MAQCQFSPAPKPPPPXPPPRRPPSPPXPPPPPSAPPPPRAVPPPLAATGGLDGACPVAQPSPSXPPRRSPQPRPSLAAAVAQPPPGPPQPGASARRNRGIRSPWPSPRLRPPRRGLCSPQPPAXRSPSPAPPVAAVVAPPQLAPPLAEALPVAPPPPVGTQVVVAVAVRRRRTEI

SEQ ID NO: 168026 - protein, 133 aa, Oryza sativa
  Clone ID: PAT_MRT4530_66581C.1.pep
MLLLLLFLAVLAGLTFLLHLSVLVARVTELCLDHVRVNPSPFPAIDLKVTTEEGSSSGDRRGRRSSAVEERREEREMAMCRHHRRPQSQCASRPSTSSPDVLCSMRPAAVATAVLLVVFVTVTDKFSSTRIPL

SEQ ID NO: 168027 - protein, 223 aa, Oryza sativa
  Clone ID: PAT_MRT4530_66582C.1.pep
MAAEAERGQAAGDLRRLERLATGGKGGEGRRPAEDGGGERRGDGAMASLTTCGSHRGRAQPPLPPDDDLDRLVFDSGLTRPNTQRSIRLPVHARAPSLPVHRVTTRRTAPHSRVGPAADRAAGNPRQSRAATGARVNNVTSPIVSEPIAGNPPLTEPPLCRRPCARVIAVASVTPRHARRARDRTPVKTPSSRTFHSKGWGANRVDRRAAVATSAASSTTNDY

SEQ ID NO: 168028 - protein, 84 aa, Oryza sativa
  Clone ID: PAT_MRT4530_66583C.1.pep
INQHNISLQKEFKIAIYMALRTSPKLQQMHKRLSYLIYIYLSNYRVIYHVEVQGPCINIKSKTCVDNISKKTISNQANSEKGKD

SEQ ID NO: 168029 - protein, 928 aa, Oryza sativa
  Clone ID: PAT_MRT4530_66584C.1.pep
MEFAIDNIFRPLRNLFTRTVGYIRALESEARWLKSQRDDVMKEVRLAERQGMEATNQVSHWLEAVASLLVRAIGIVAEFPRGGAAAGGLGLRAAYRLSKRADEARAEAVSLVEQRSTFQKVADAPVFACTEVLPTAAPSIGLDALLARVANAFQEGGTSVIGIYGAPGVGKTTLLHHFNNTFLSASAASMDIHLVIYVEVTERYSAGAVQKAIGGRLGLRWEDGKSTKEKALALCTYLHRWNFVLLLDDVWEPLNLAELGVPVPGRHGKSKVLLTTRLEHVCDQMDVTRKIKVECLSAADSWELFKNKVGNAFVTSREIQPLAQAMASRCGGLPLGLITVARAMACKRVTREWEHSMAVLNLAPWQLDGVEANLLVSLKRSYDSLRDDSLRICLLYCSLFSGETSKELLVESFIGEGFVSDVSADDMDDLYNKGHYMLGILVTSSLLEAAGDYHVTMHPMVRAMALWVVADCGRIDNKWLVRAGLVTSAAPRADKWTGAERVSLMRTGINELNDAPTCSVLKTLLLQSNRLLGRICHDFFSFMPCLRLLDLSDTLITALPSEINLLVTLQYLRLNNTTIRSLPAGIGALVNLRFLLLSNVPVQTIAAGVLNPLTALQVLCMDHCWSSWMDVGSCEPESGDSRKRRRHDLRQRVNLRELESLKSLQMLDISVQTLHSLEKLSQSPHLAEHLRNLHVQDCSDLPSIQFSPSSLWRHMSRLKGIIISGCCNLENVIITGGEYKGEQPWSLDRTVSMMRYRVPDKPLDVDSVYRPQTSQSLDMDCRKLVPLLPSLQSIILRKLPKAKIVWQGGSLEYLSSLSISSCSVLEHLISYDTEGLSHGSPAETVFPSLKELELHDLPNMRSIGPESIAVNFPSLASLKVVRCSRLKKLNLVAGCLKELQCTQTWWNKLVWEDENLKTVFLSSVKPLA

SEQ ID NO: 168030 - protein, 62 aa, Oryza sativa
  Clone ID: PAT_MRT4530_66585C.1.pep
LGLLRTPPPPPLSALLGAPSEHPTPLHLPWCHRRAAAANESRADRPRNTASRSNIGKASGHA

SEQ ID NO: 168031 - protein, 54 aa, Oryza sativa
  unsure (1)..(54): unsure at all Xaa locations
  Clone ID: PAT_MRT4530_66586C.1.pep
LCXKGHSCXKXLALXSAXXELILVRXXAVYVXLXAGXXXDLPWCSDTXWSSXXC

SEQ ID NO: 168032 - protein, 1264 aa, Oryza sativa
  unsure (1)..(1264): unsure at all Xaa locations
  Clone ID: PAT_MRT4530_66587C.1.pep
MARRRFFPAWVVVVMVVVVVLGSCSAAAAAGDGDALMDVKNAFVEDPGGVLAGWGGGGGNSSAFCSWAGVECDAAGARVTGLNLSGAGLAGEVPGAALARLDRLEVVDLSSNRLAGPVPAALGALGRLTALLLYLTEDGAGGEAPGEAGLRPAAPRLARLLSSRRAQALGYEDDFQTLETCPPEHFLFFFLSSDSCFWWLQLDPSLLGXEVTKNCAIFRGGVWLRKSNQAKNPLQLDCFXKLKKKKKTLEGAVPPELGKLGELAYLNLMNNRLSGRVPRELAALSRARTIDLSGNLLTGELPAEVGQLPELSFLALSGNHLTGRIPGDLCGGGGGGAESTSLEHLMLSTNNFSGEIPGGLSRCRALTQLDLANNSLTGVIPAALGELGNLTDLLLNNNTLSGELPPELFNLTELKVLALYHNGLTGRLPDAVGRLVNLEVLFLYENDFSGEIPETIGECSSLQMVDFFGNRFNGSLPASIGKLSELAFLHLRQNELSGRIPPELGDCVNLAVLDLADNALSGEIPATFGRLRSLEQLMLYNNSLAGDVPDGMFECRNITRVNIAHNRLAGGLLPLCGSARLLSFDATNNSFSGGIPAQLGRSRSLQRVRFGSNALSGPIPAALGNAAALTMLDASGNALTGGIPDALARCARLSHIALSGNRLSGPVPAWVGALPELGELALSGNELTGPVPVQLSNCSKLIKLSLDGNQINGTVPSEIGSLVSLNVLNLAGNQLSGEIPATLAKLINLYELNLSRNLLSGPIPPDIGQLQELQSLLDLSSNDLSGSIPASLGSLSKLESLNLSHNALAGAVPPQLAGMSSLVQLDLSSNQLQGRLGSEFSRWPRGAFAGNARLCGHPLVSCGVGGGGRSALRSATIALVSAAVTLSVVLLVIVLVLIAVRRRRSGEVNCTAFSSSLGGGGNNTNGRQLVVKGSARREFRWEAIMEATANLSDQFAIGSGGSGTVYRAELPTGETVAVKRIAHMDSDMLLHDKSFAREVKILGRVRHRHLVKLLGFVASHDVGGGGGGGGSMLVYEYMENGSLYDWLHGIAAGGGGGGDGERKKRVLSWDARLKVAAGLAQGVEYLHHDCVPRVVHRDIKSSNVLLDGDMEAHLGDFGLAKSVADNRKDFTDSASCFAGSYGYMAPECGYSLKTTEKSDVYSMGIVMMELVTGLTPTDKAFGGDVDMVRWVQSRVEAPSPGREQVFDPALKPLAPREESSMTEVLEVALRCTRTAPGERPTARQVSDLLLHVSLDYYRAGEHKR

SEQ ID NO: 168033 - protein, 68 aa, Oryza sativa
  Clone ID: PAT_MRT4530_66588C.1.pep
LYGSRPRIIAGLRVSFLVNRAAHDHATSSGLQARARRAGLTRSWDLADVLSTTDGHTTKKRKSESKRD

SEQ ID NO: 168034 - protein, 405 aa, Oryza sativa
  Clone ID: PAT_MRT4530_66589C.1.pep
MATQTRPLVSVKALEGDMATDNSSSLALAEVFRAPLRPDVVRFVHRLLSCNKRQPYAVSRRAGHQTSAESWGTGRAVSRIPRVPGGGTHRAGQGAFGNMCRGGRMFAPTKTWRKWHRRVNVHLRRVAVASALAATSVPSLVLARGHRIETVPELPLVISDSAESIEKTSQAIKILKQVGAYADAEKAKDSVGIRPGKGKMRNRRYINRKGPLIVYGTEGSKIVKAFRNLPGVDVANVERLNLLDLAPGGHLGRFVIWTESAFKKLEEVYGTFEAPSLKKKGFILPRPKMANADLGRIINSDEVQSVVKPLNKEVKRREKRKNPLKNVAAVLKLNPYFGTARKMATLAEAARIKARKEKLDSKRTKLSPEEAAKVKAAGKAWYKTMISDSDYAEFDNFSKWLGVTQ

SEQ ID NO: 168035 - protein, 314 aa, Oryza sativa
  Clone ID: PAT_MRT4530_6658C.1.pep
SAGRGARGPGPREVGPTRQPLGPRWTGRTRLAAVGAVGPARQPHPRARAADGRAHLAAARARPKAASPARPTGAARPRPDGHRRRPSARRSSARESGEEGETEGTVHGSPRDTRTAETTNGVEKRGGAARDDDDGGAPTVGERNGGADEVDGDAAMPREVAPSREEDRSDDGGEPERRKATARFGMPRATVLRQPADEAERRTGSAATRRSGWRCRRVGRRTGATSAANRRRAGKAGCGGIRGGGGARARAGGGCGARRKTTGGSHPSARVAGGPACQRRARAGEADGPWGKRERGRDWAEPAQEGKGGEKNFF

SEQ ID NO: 168036 - protein, 110 aa, Oryza sativa
  unsure (1)..(110): unsure at all Xaa locations
  Clone ID: PAT_MRT4530_66590C.1.pep
ELLACAVMRPVVNLANPRFINERIELXALSHANKAERGVAESLEHATMVKQREPPMPTVDELAALIDPTSSGGELVRFSQDQSKAAPDTQLSNTRHPSXLKPNSSTSFDQ

SEQ ID NO: 168037 - protein, 115 aa, Oryza sativa
  unsure (1)..(115): unsure at all Xaa locations
  Clone ID: PAT_MRT4530_66591C.1.pep
MASIVASKRIPLFRLVEQLLAASPAQGAASSLRPVAVAGGGGGGDTFSQFXLHXRDXSDDDSGRGYYTRRPSRDATMPAXXSDVFRDPFRAPXXXXRLLRVMDDLXTPVGRAGAT

SEQ ID NO: 168038 - protein, 36 aa, Oryza sativa
  Clone ID: PAT_MRT4530_66592C.1.pep
QAASLWDSLRSPKSSPMAGRRLPGHSSRHSLSAGAD

SEQ ID NO: 168039 - protein, 530 aa, Oryza sativa
  Clone ID: PAT_MRT4530_66593C.1.pep
MLSSMFLFLLPLSLLSFSLLGNLWAGAATSAGEGWSSVGLRLMLLGGATPFFYINIETVIITNMNYYPEGSNPVYFAVLVKYEDLDGDVVQVDLMESKSAYGGAIGVWTPMRESWGSASAVTSARPFVTNNVIPAIWSRIAPSLPPSPLPRRPRSALAHCRASPASVSPSARASPTPPSPRSPPHRPSRSRHLLLSGIPAAALVVACPNLNDLDFSNDHYGSTSGMRRRRRWPSCVGFWGGFGDGDGDRYSITFSAYIVVLRTQEAYVQILQQLHRSTSLEMDPHSHKKAHEGLIGDNPDAYAVTTYQPVLMVEPSAAAAFPPAPQVAPAYPVNPMQLPEHQQHAIQQVQQLQQQQKEQLQAFWADQMAEVEQMTEFKLPNLPLARIKKIMKADEDVKMIAGEAPALFAKACEMFILDMTLRSWQHTEEGRRRTLQRSDVEAVIKKTDIFDFLVDIITDDKMKDDGMGSQAASMVSPYTSGGMGFSFDLYPNQHHLAYMWPPQEQQEQWPPQEQQEQKQKQDSDGGGQDE

SEQ ID NO: 168040 - protein, 73 aa, Oryza sativa
  Clone ID: PAT_MRT4530_66594C.1.pep
SSFPFSKKRFLWFNLTRQNCLGAFSPSQNKMSQTFFFWLALFFFFLAVHHYFNKILLYLSPQWLFFFPLKFFF

SEQ ID NO: 168041 - protein, 201 aa, Oryza sativa
  Clone ID: PAT_MRT4530_66595C.1.pep
MNTTTARLAVAVQRMQADGDAAQGGARRSSARVQERRPARRRSSGHAKTEQRPARWWHGCTARGSVSAYDLQTPCPHARLFSAPLPNPMASRWTRTSNRVGNDHHLRAVLLASFPPSPPGSAAFLADLVNTGFVTDGLSYDRAASRLFPHEPRCLVPLSPLLTSPGMEGLIDSRRHVSCVASLACSDSPPICSPTGRGRVG

SEQ ID NO: 168042 - protein, 84 aa, Oryza sativa
  Clone ID: PAT_MRT4530_66596C.1.pep
FPAAPLVLALVLVAAAAAAFALGVCSCEEKDWKKGSEAEIGKSRFGQEGRTEWEFQEKLRDTRTTLKHQCDQAAAIRFPNSNNP

SEQ ID NO: 168043 - protein, 281 aa, Oryza sativa
  Clone ID: PAT_MRT4530_66597C.1.pep
MSNPAATVESQVALTPSSTPTPTNAPSVEINDSQGTEVEHDNKRLKSAAWQDFVKKKINGAWKAECKWCHNKLGAESRNGTKHLLDHIKTCKSRQARKGLTQSNLKMGIDAEGRVTVGKYVFDQEVARKELALMICLHEYPLSIVDHVGFRRFCGALQPLFKIRTELDLYLEEKPLPRTQDFDIINWWKFGGIRYPTLRQIARDILAIPITTVASESAFSTGWRVITPNRNQLKPNLVEALMCVQAWGRADMLAEIANKTNALNTVLDDESESEASTVTEA

SEQ ID NO: 168044 - protein, 589 aa, Oryza sativa
  Clone ID: PAT_MRT4530_66598C.1.pep
MSNPAATVESQVALTPSSTSTPTPTNAPSVEINDSQGTEVEHDNKRLKSAAWQDFVKKKINGAWKAECKWCHNKLGAKSRNGTKHLLDHIKTCKSRHARKGLTQSNLKMGIDAEGRVTVGKYVFDQEVVRKELALMICLHEYPLSIVDHVGFRRFCGALQPLFKVMTRNTIRKDIIDLFGVNKISISNYFHKLQSRVASTTDLWTTTHQKKGYMAITAHFIDDEWKLKSFLLRFIYVPAPHTADLISEIIYEVLADWNLESRLSTITLDNCSTNDKLMENLLGTMLDKLPADTLMLNGSLLHMRCCAHILNLIVKDGMTILDKIIEKVRESVSFWTATPKRHEKFEKQAQQINVKYEKRLFSGTKYEKYWKDVHGILAIDSVLDPRYKLHMLNAMFIQIYGEEVAIRKVNAVKEDLYKLVLQYQNHVEEGVGTSDGVNASSSVAPPGGFDLVDDIFDQYMSGQTVASSSQIRTELDLYLEEKPLPRTQDFDIINWWKFGGIRYPTLRQIARDILAIPITTVAFESAFSTGGRVITPNRNQLKPDLVEALMCVQAWGRADMLAEIANKTNALNTVLDDESESEASTVTEA

SEQ ID NO: 168045 - protein, 653 aa, Oryza sativa
  Clone ID: PAT_MRT4530_66599C.1.pep
MSNPAATVESQVALTPSSTSTPTPTNAPSVEINDSQGTEVEHDNKRLKSAAWQDFVKKKINGAWKAECKWCHNKLGAESRNGTKHLLDHIKTCKSRHARKGLTQSNLKMGIDAEGRVTVGKYVFDQEVARKELALMICLHEYPLSIVDHVGFRRFCGALQPLFKVMTRNTIRKDIIDLFGVNKISISNYFHKLQSRVAITTDLWTATHQKKGYMAITAHFIDDEWKLKSFLLRFIYVPAPHTADLISEIIYEVLADWNLESRLSTITLDNCSTNDKLMENLLGTMLDKLPADTLMLNGSLLHMRCCAHILNLIVKDGMTILDKIIEKVRESVSFWTATPKRHEKFEKQAQQINVKYEKVIALDCKTRWNSTYLMLSTAVLYQDVFTKLGTREKMYTPYCPSNDDWKFARELCDRLKIFYDATEAFSGTKYEKYWKDVHGILAIASVLDPRYKLHMLNAMFIQIYGEEVALRKVNAVKEDLYKLVLQYQNHVEEGVGTSDGVNASSSVAPPGGFDLVDDIFDQYMSGQTVASSSQIRTELDLYLEEKPLPRTQDFDIINWWKFGGIRYPTLRQIARDILAIPITTVASESAFSTGGRVITPNRNQLKPDLVEALMCVQAWGRADMLAEIANKTNALNTVLDDESESEASTVTEA

SEQ ID NO: 168046 - protein, 194 aa, Oryza sativa
  unsure (1)..(194): unsure at all Xaa locations
  Clone ID: PAT_MRT4530_6659C.1.pep
CFATEARRPVLIWPRWVHGGPGAPGXTPAGAVRPTRQPHPRARAADGRAPRGSRXARPEAATSARPAGGSARAPMVAAGDHRHDGAAAERGEGXGERRRRSAAHPXRATATTETATXAEEGGGAARVDGVDGAPVVGERNGGVDEVGEDAAKPKEAAPRWEVVRGDDGSGPELGGDGGERERRRELDSGEERGR

SEQ ID NO: 168047 - protein, 316 aa, Oryza sativa
  Clone ID: PAT_MRT4530_665C.1.pep
MAKNTTTQQQQTTRSSKEAGGGAAARSRGVSSKKSPWYQRAVEVLLLIWKQPTGAGTGTGTTTKAAAAAGVTGGKAAASGMGARLRKSSSLNVAASFTRVCLCAPISSYNEQALYFQAGDVAPRRSYSYPRASSASASGCSGGGNSNPLVAPPPAAEQRALMRTPGPGGESARRPVFRGKSLTDDILMRRFVVDEEATRRRNEMEVIRSRHAAAAKRRRLGPSPLRRMALAESESEADDDEEETTTTEAAEPTSRNQVIRTIRKSIIASGQKGSSQAGRPSACKQTTMKIAGLLMRSGRPPAKIIFAGGFSQADIG

SEQ ID NO: 168048 - protein, 128 aa, Oryza sativa
  Clone ID: PAT_MRT4530_66600C.1.pep
IASGALVGFFFFFWGFFFFFFFFFFFFFLGRETQILLLVSTGNPTLNKTSGWGPSSPKKLNQDPNLINTLGPWPSMGWSGGKNFYYPLGGKTRTTKLLATKPGLIFPVAPLGSFSAKYTFLGPLNPAR

SEQ ID NO: 168049 - protein, 206 aa, Oryza sativa
  Clone ID: PAT_MRT4530_66601C.1.pep
MASRDAATFQVYRPMAMPTPAALPPSSQQITMPFTAALVDAVLPAPRKAAATQGGKDRHSKVNGRGRRVRMPIVCAARVFQLTRELGLKSDGQTIEWLLRQAEPSILAATGSGTTPAVFSCSSAPSTASSSFLLGKRPRQEDHEAPTFWEALQQQPRPAVSSWGALVSPSQEAQAYASSVAQVHHLNLLSALSGAATRRPAQEESR

SEQ ID NO: 168050 - protein, 47 aa, Oryza sativa
  Clone ID: PAT_MRT4530_66602C.1.pep
GLNQTGLDSGGSGSLSQGHPTGSEGARSYQPTHADQTGLGLAVRQCK

SEQ ID NO: 168051 - protein, 162 aa, Oryza sativa
  unsure (1)..(162): unsure at all Xaa locations
  Clone ID: PAT_MRT4530_66603C.1.pep
RFTDQLLQVELNTISTSSNGLACGVCELHRNLIRQHERELGLDPESVVGNTAIAQHAEALAGAWAEFNNQSSVVLVVVQPEERYMYDQYWITVALREMYGVTTIRQTMACIDXKESFRPDGTLTIDGLPVAVGYFRAGYSPXDYPSEXSKWEARLLYEWFFV

SEQ ID NO: 168052 - protein, 54 aa, Oryza sativa
  unsure (1)..(54): unsure at all Xaa locations
  Clone ID: PAT_MRT4530_66604C.1.pep
IVFFFALLAIAACSASAEFDALTQVYXQYQLQPQLMLQQQMLSPCGEFVRQIDD

SEQ ID NO: 168053 - protein, 73 aa, Oryza sativa
  Clone ID: PAT_MRT4530_66605C.1.pep
TLGRPVFFFFFLPNIYSFLLLDMIFTGMAKVFPRKPRVNVENFKGPHQTIGNGGWSISNQLGGLVEYPRAGNS

SEQ ID NO: 168054 - protein, 74 aa, Oryza sativa
  Clone ID: PAT_MRT4530_66606C.1.pep
KQQHRIWGYHPGSHMGHMKKENRIFNLPKTLLSNQLASQQLRWLWNCKHLFTYSGSYDTMARREAPWRRVGSHF

SEQ ID NO: 168055 - protein, 120 aa, Oryza sativa
  unsure (1)..(120): unsure at all Xaa locations
  Clone ID: PAT_MRT4530_66607C.1.pep
QGSLRGGAQWRPHGGPSSRRAXLSESXEMRFRDRXXCQREGAGPSPLDRVXRQVLSTGSFXXAXXEVPADXXRRPGALRPLRMQCCQQXCRTXPASARCAAIRRMXVRSXXEESMPMPLE

SEQ ID NO: 168056 - protein, 57 aa, Oryza sativa
  Clone ID: PAT_MRT4530_66608C.1.pep
MHLPAVPHTLYAWMVTTNNGGPICHVCSRSETPREFETISNLPRQRNAENAKIRQFP

SEQ ID NO: 168057 - protein, 94 aa, Oryza sativa
  Clone ID: PAT_MRT4530_66609C.1.pep
KTDPLEAAALNTNLGKLGQKALSELNINGQPCNGPAFYQNRLGYHPHHQSIHQVRLHFQQQHPLPHYQTVSIRFHVFSLWSGVLCTMSSMKCPL

SEQ ID NO: 168058 - protein, 90 aa, Oryza sativa
  Clone ID: PAT_MRT4530_6660C.1.pep
MGGSRRRTGGGEGGGEPAATGYSPSRFRFNYHAGPTLVDIKFLWDKDLKKYTVGLAQLLRKNDVGMTSWAVSRNGIARPNGLAKATSDTV

SEQ ID NO: 168059 - protein, 492 aa, Oryza sativa
  Clone ID: PAT_MRT4530_66610C.1.pep
MKLRNTAITRANSACLPMEDCVGIKYSSVNEGEERKGGHGVPKVSIIPLIFLIFYEVSGGPFGIEDSVKAAGPLLAIAGFLLFALIWSVPEALITAEMGTMFPENGGYVVWVSSALGPFWGFQQGWAKWLSGVIDNALYPVLFLDYVKSSIPALGGGLPRTLAVLILTVALTYMNYRGLTIVGWVAVFLGVFSLLPFFVMGLIAIPRIEPSRWLEMDLGNVNWGLYLNTLFWNLNYWDSISTLAGEVENPKRTLPRALSYALVLVVGGYLYPLITCTAAVPVVREFWTDGYFSDVARILGGFWLHSWLQAAAALSNMGNFVTEMSSDSYQLLGMAERGMLPEFFAKRSRYGTPLIGIMFSAFSTLWLPVMRQFQLFGTENYLYCFHMILEFIAFIKLRVVHPNASRPYKIPLGTIGAVLMIIPPTILIVVVMMLASFKVMVVSIMAMLVGFVLQPALVYVEKRRWLKFSISAELPDLPYSNVEEDSTIPLVC

SEQ ID NO: 168060 - protein, 876 aa, Oryza sativa
  unsure (1)..(876): unsure at all Xaa locations
  Clone ID: PAT_MRT4530_66611C.1.pep
MRGSIATYRESLSRLAGEVDDAAADEAEPQASAASSPPARGAADRSHTTPPSSGRRRRYSASASSAAAARPDPAEPDEVPVSKLKEDIQKLQVSEAEIKALSFNYVAMLKEKEGALERSPRGVQRNTVQDNPLNVSKQNGYGGGASQGIQPNGLHSMTGHRKADISEGDRSFFAAKQASLENEIKQLKKQLSDNSEKETETKRRLEDEHKRNELLQQQLNELNVSKERISTNMEELHNELSEKEAKLRRLQEDLSRREKEHVSDASLQSLRSMVMALQKENSDLKIEKSRLEADLVRKKSTSQINEVGTSDVNGISDVEKVKEEMASLKKSLHDASYERDKAVQDLARLKQHLLDKDLEDQEKMDEDSKLIEELRAICDQQRAHIVQLERALKFEMAKQEESKKIISEEHQRSNEQITDLKYKLANCMNALESKNLELLNLQTALGQYYAESEAKERLGGDLAMAREELAKLSESLKVANQAIEISRREKEEVAARLSQVEGMLADGKRSMQKLENDNSRLRRALEQSMTTLNRMSLDSDNSVDRRIVIKLLVTLPAPPPRRGAGAAASASASASGGPPPTRGAPPPPPATPIHHATAASSASSHRIHPEEDHRQNMSLISKLRLITVDVTGTLLAYKGQLGDYYCMAAKAAGKPCPDYQRMHEGFKLAYTEMARQYPCFGFAAKMPNIDWWRMCVKDSFVKAGYEYDEETFEKIFKRIYSSFGSSAPYSVFPDAQPFMRWLRGKGLTVGIVSNAEYRYKDVILPALGLNQGSEWDFGVFSGIVGVEKPDPSIYRIALEMAGKVAPEEALHIGDSMRKXTPARSIGMHALLLDRFKTADAESWRKSGATVLPDLVAAQEWLSKNLKDEPVAAEQNV

SEQ ID NO: 168061 - protein, 39 aa, Oryza sativa
  Clone ID: PAT_MRT4530_66612C.1.pep
AKKKKKKKKKKKKKKKRGGGGKKKKKKKKKKKHKKKIKK

SEQ ID NO: 168062 - protein, 55 aa, Oryza sativa
  Clone ID: PAT_MRT4530_66613C.1.pep
MSSSASPSGAPSAEYAEIPTFPESPILQEKNLKSSKASKASHTDPKQPFEHVDPV

SEQ ID NO: 168063 - protein, 72 aa, Oryza sativa
  Clone ID: PAT_MRT4530_66614C.1.pep
ICCIFGFSTKLLYMGILLICTGHFDENTLWILSLIVLHSHFFGRGWAILGKYYIFLVVECDHVPLFWHIAAI

SEQ ID NO: 168064 - protein, 307 aa, Oryza sativa
  Clone ID: PAT_MRT4530_66615C.1.pep
MILGSNQAAAAAAAAAAAEEEAAELARKHTAAVATSRQWSAQTESRIVRVSRVFGGKDRHSKVKTVKGLRDRRVRLSVPTAIQLYDLQDRLGLNQPSKVVDWLLNAARHEIDKLPPLQFPPQDHLCMGHHHHLPSAMPLMHHHGHHHHADDDKYHVAAAAAALAAEKEAAAAGGGGGGGGDDVDGGGGGGAAHIVGRFPAGGYHRFMGLNNPLGMVNSAAGAAMPFHYAGESWNNGSVQDSGAGSPQVAAAAAHHTSPFPSLLSLAPGPHHQLVFYSSEAEQFTVDNLGSQGLSLSSARAFHDQTGS

SEQ ID NO: 168065 - protein, 72 aa, Oryza sativa
  Clone ID: PAT_MRT4530_66616C.1.pep
FFLFFLNFFCGFLIFFFLFFFIFHYLFKKTPKNCPTYNQTENTRFLSSKNGVPFSLKKKKKQIWGGKKNLFS

SEQ ID NO: 168066 - protein, 61 aa, Oryza sativa
  Clone ID: PAT_MRT4530_66617C.1.pep
MDISRANEGYTGCGSVFKMSWHRAAFPGTGINTLAFWKREFPGGMVFTTACTFGNVGHGSR

SEQ ID NO: 168067 - protein, 84 aa, Oryza sativa
  Clone ID: PAT_MRT4530_66618C.1.pep
METVESQASTTDARKHNDDYAWHIKADDIPSLLGDHCLCMILPVHEFPLPQRCPCTARTDKPAGHMRAGSAGGCSTPQRATATS

SEQ ID NO: 168068 - protein, 98 aa, Oryza sativa
  unsure (1)..(98): unsure at all Xaa locations
  Clone ID: PAT_MRT4530_66619C.1.pep
GRARLHLIAFIGHRLPSQTNTILCCTLXCPHSCAPGKNFPVSHPSQIAPGQARFTLKFFGDRLPKKKLQLVDMSILLILLSPRPECYIDTPCMSTNSA

SEQ ID NO: 168069 - protein, 97 aa, Oryza sativa
  Clone ID: PAT_MRT4530_6661C.1.pep
LLQESMSLLMNLTDFASEDPYVAVHYWQGGLSIRQLQGTAIGNQGLFKEYNIGEHREGASLERLDTDLQKADTPVKESRTGQNTVHGDKGKILCRPP

SEQ ID NO: 168070 - protein, 794 aa, Oryza sativa
  unsure (1)..(794): unsure at all Xaa locations
  Clone ID: PAT_MRT4530_66620C.1.pep
LAAVSPRQISIINKASNATIANVLFPSLFKIKNFHKHHKGLTHKREKTFNCPTHFHSKESKKKAPALDVASGKRGGKKRRSLKPSFEKQAIRRWSARAPSQRASFPWQQQQQQQQPGGGEGEAAGDQESASDGDGDGDGDGVVVGGEAAEAQEDGPRPEPSFLLGSRPVSAPWMHGEEEPMTNQLVSDEEGLDGDGASEDEMGLVDGDGDEDEDLGSEEETLSESSDGEFXRGLCSTGRKFFFWPRKRSNTELAERTIPEHELRRLRDVALRMKERMRVGPGGVTQLIVESIHQKWRVEEVVKLRFEGPPSLNMKRTHDILENSVEPIHVEHKFQKSGADGLNRSAYIVNSSEKPTETFDIDSFLDQLGPRYKDWSGRGPIPVDADLLPGVVPGYKTPFRLLPYMVKSTLRNKEMTALRRLARQTAPHFALGRNREHQGLATAIVKLWEKSSIAKIAIKRGVPNTCNDRMAEEIRKLTGGVLLSRNKEYIVFYRGNDFITPKVRQVLVEKQEQAITWQDEEELARLKASASISVKPKVFKNPPVAGTLAETREAKSRWGDSINAELRKKEKNHMILTKHTSLLRNLKRKLILAKTKVIKAEKALAKVQEFLSPAELPTDLETVTDEERFLLRRIGLKMKAFLMLGRREVFDGTVQNMHLHWKHRELVKVLVKGKSFPQVKHIAISLEAESGGVLISVDKTTKGYAIILYRGKNYKTPQILKPRNLLSRRKALARSIELQRREGLNHHISNLRDKIWKLKSQLDDHQVRMQVAGEKPDAELLQTVEADLSKDDDK

SEQ ID NO: 168071 - protein, 212 aa, Oryza sativa
  unsure (1)..(212): unsure at all Xaa locations
  Clone ID: PAT_MRT4530_66621C.1.pep
AQDAGFLLQKRRLELLHTRDGKGDDWSFLWNSDKYTAKKFYKLTFSNVQAPRPFVWIWKTRCVMKXKVFVXLLFMDRLNTRDMLDRRQCAKENDDLTYELCMNNVRETREHLFFFFPSVXRCWQHLGVMWNSNLNFFQMVVSARIQFNQKGFLEIFFIAAWHIWKQRNGKIFRNELPSFSSWRALFKTDVLLHMCRMKDPLKQIVFDWLQTV

SEQ ID NO: 168072 - protein, 947 aa, Oryza sativa
  Clone ID: PAT_MRT4530_66622C.1.pep
MALLFPPPPHALSPKPPFPSTLRSTRSLRLRRATAAAAAAGAGVSSSSPSTSSPEKAPALDVASGKRGGKKRRSLKPSFEKQAIRRWSARAPSQRASFPWQQQQQQQQPGGGEGEAAGDQESGWSGSSTLQSIVDYFDFDYDSSDGDGDGDGDGVVVGGEAAEAQEDGPRPEPSFLLGSRPVSAPWMHGEEEPMTNQLVSDEEGLDGDGASEDEMGLVDGDGDEDEDLGSEEETLSESSDGEFSEDYAAPAANSSSMMDSVLDHVSSGGGFYRGTRRSSVNSIVNTMRNSMEESSRNAAIECPETEDFVQKLGPVLLPWEREGDVDRPRKRSNTELAERTIPEHELRRLRDVALRMKERMRVGPGGVTQLIVESIHQKWRVEEVVKLRFEGPPSLNMKRTHDILEERTGGIVIWRSGRSVVLYRGMNYNLRCVQSYTQTTEVNFDKRVSSNSVEPIHVEHKFQKSGADGLNRSAYIVNSSEKPTETFDIDSFLDQLGPRYKDWSGRGPIPVDADLLPGVVPGYKTPFRLLPYMVKSTLRNKEMTALRRLARQTAPHFALGRNREHQGLATAIVKLWEKSSIAKIAIKRGVPNTCNDRMAEEIRKLTGGVLLSRNKEYIVFYRGNDFITPKVRQVLVEKQEQAITWQDEEELARLKASASISVKPKVFKNPPVAGTLAETREAKSRWGDSINAELRKKEKNHMILTKHTSLLRNLKRKLILAKTKVIKAEKALAKVQEFLSPAELPTDLETVTDEERFLLRRIGLKMKAFLMLGRREVFDGTVQNMHLHWKHRELVKVLVKGKSFPQVKHIAISLEAESGGVLISVDKTTKGYAIILYRGKNYKTPQILKPRNLLSRRKALARSIELQRREGLNHHISNLRDKIWKLKSQLVRMQVAGEKPDAELLQTVEADLSKDDDKIEDEGEEAYLQTYISEDEEEPEDDQNEYL

SEQ ID NO: 168073 - protein, 94 aa, Oryza sativa
  Clone ID: PAT_MRT4530_66623C.1.pep
FFFFFKYERQLYLLFISPKVSHVTYDDICSFIFQLPATHSSLFKHSITKHHRPRGWVHGHWVATHQVPSGVRYPSSQTLAHGFTHSPHNQTACG

SEQ ID NO: 168074 - protein, 40 aa, Oryza sativa
  Clone ID: PAT_MRT4530_66624C.1.pep
MPCQSTYTEFNAPRPHQLIGSGTGATWASICCSRGAEPLA

SEQ ID NO: 168075 - protein, 41 aa, Oryza sativa
  Clone ID: PAT_MRT4530_66625C.1.pep
KLLNAITYLYHSVYPKHCHILNHVSLKYPRAFGTIALIIWC

SEQ ID NO: 168076 - protein, 52 aa, Oryza sativa
  Clone ID: PAT_MRT4530_66626C.1.pep
NVHIEQFVNLFIDLDLGHVQALLAFNLSCTYGVYLLPYCGSLCITCLGCVLF

SEQ ID NO: 168077 - protein, 131 aa, Oryza sativa
  Clone ID: PAT_MRT4530_66627C.1.pep
VGRYLYADLYASAMWTGTEAPESSGNYSSSLISFSCSKSSPIACDTAAGSPLPSLGYIYSFGEDNNKDTYVLSSKGVYRVVRPSLCGYTCPTEKPATNTGTTTPSSAASVTGKQMMGALLLSVLMFWVLVR

SEQ ID NO: 168078 - protein, 75 aa, Oryza sativa
  Clone ID: PAT_MRT4530_66628C.1.pep
FPLLRRDAHVFLAQFVTPRPSFLASVASFFSGFVGAGFICHPVLRRARLKLAGVHKTSLVHGRPEYDLRDGYPND

SEQ ID NO: 168079 - protein, 656 aa, Oryza sativa
  unsure (1)..(656): unsure at all Xaa locations
  Clone ID: PAT_MRT4530_66629C.1.pep
MALVVVPPGQMLLYLLYGPVVGKVVQEWREQGRLPLGTSWCLHLILLLALRSLTYQLWFSYGNMLFFTRRRRVVDDGVDFRQIDTEWDWDNMVIMQTLIAAVLVTSRVFPATSDLSAWDLRGWAIAVVLHVAVSEPAFYWAHRALHLGPLFSRYHSLHHSFQATQALTAGFVTPLESLILTLVAWAPXCRGLHGGTRLREPGLWTHPPLRLPPVHGVQQRRGHLTQDXFQDFPFLRYLIYTPSYLSLHHREKDSNFCLFMPLFDALGGTLNPKSWQLQKEVDLGKNHRVPDFVFLVHVVDVVSSMHVPFAFRACSSLPFATHLVLLPLWPIAFGFMLLQWFCSKTFTVSFYKLRGFLHQTWSVPRYGFQVTRFIQASRLISIELYFIPSAKKGINEMIELAILRADKMGVKVLSLAALNKMSLNLTAGKFSERSNILTETVNEALNGGGTLFVRKHPDLRVRVVHGNTLTAAVILNEIPGDVAEVFLTGATSKLGRAIALYLCRKKIRVLMLTLSTERFMNIQREAPAEFQQYLVQVTKYQAAQNCKTWIVGKWLSPREQRWAPAGTHFHQFVVPPIIGFRRDCTYGKLAAMRLPEDVEGLGTCEYTMGRGVVHACHAGGVVHFLEGWDHHEVGAIDVDRIDAVWNAALRHGLTPA

SEQ ID NO: 168080 - protein, 867 aa, Oryza sativa
  unsure (1)..(867): unsure at all Xaa locations
  Clone ID: PAT_MRT4530_6662C.1.pep
MTPPPSQTEISQDNLIPATMESLNDEQWAEIGNMVQQLQEACLKTFSIAQQGIVVQKTKFRTSCGEGEGSCTKDIKVEQDEEMQKVLTKFNQLAIQDHVDSAVNHALINQSRVLVNTLANLIKSVVDGSIAEHEERGSVYLPGGEFPNYRELKTSIGGGRFQDNNVMVSRSKQPPTSGVFGSNTMIPEKLAEILKSNPLQPIGNQFEQVQGVIQQQPLAGMIANMVREQFGIKPKDSGQDIVSTYEHISRFLAQCGEASAVEALREASDRSYPHHFVASNLANLPRWLEDGAREAGTVSLDDGANDSGAPKKTISVNLAPNAGLHRLSISGEGDQTDWYVRISPTLGTALELTKTEREILVKDKFAHGPTCQSLFLSLFLCSSSSRVPGVWRCDEAWKLYEAEDENDPFDVIHSESVPCSTAGTSPGPRRRRAHVAGVQPQPGPVGELVLSEVRFFRSYAHHVAISDVAREMLRDMYQIPNRVHVILNSVDEAQFEPDGAGPRVPGGPHAAQGRQPGARALASCALAPPSPPSLQPCAAAVPDVAVAREDRRRGRQVVAVLVRPFAVAVDRRSTVAVVKPKSAAASSSSPSPFVPLPPSLWSPMRRYKPEYLFGVEGFIQELRTMSFVIGFGTAPFYAQIPHDRHEEKCRVKVTLNSNSEDIPSVMFEAGGRNYIHACQEVARIAIRELRDRYSDQLADTEYRYHPRQSQGSDRGSYLETEGIENDATTRHLVEMLWAMDESRAETVLAAQDREDRNRGKICKLEDKVDRLEKELATLKGEAPPQKARIRLTARKRALFVPRYQLAPKVRVVEKEVAPTLADPPVIIISDDEEEESKRNHSKIEWVATQDDEDEPNEPSIXSDARKN

SEQ ID NO: 168081 - protein, 600 aa, Oryza sativa
  unsure (1)..(600): unsure at all Xaa locations
  Clone ID: PAT_MRT4530_66630C.1.pep
MAISMASPLSSWPWAFLGSYKYLLYGPVVGKVVQEWREQGRLPLGTSWCLHLILLLALRSLTYQLWFSYGNMLFFTRRRRVVDDGVDFRQIDTEWDWDNMVIMQTLIAAVLVTSRVFPATSDLSAWDLRGWAIAVVLHVAVSEPAFYWAHRALHLGPLFSRYHSLHHSFQATQALTAGFVTPLESLILTLVAWCPLAGXLHGGTRLREXLVYGHIXSSSTXPVLGVQQRTGKTXGWWGSSFRRGSRGGRRRGHTSHQFVVPPTIAACPGFTYGKLAATLNPKAWQLQKELDLGKNHRVPDFVFLVHVGCTSWKGGVTTRWAPSNVDRIDVVWKAALKHRLTRNVRLRIPLFLGFKLIKNLNQISLXKKKTDKMGVKVLSLAALNKNEALNGGGTLFVRKHPDLRVRVVHGNTLTAAVILNEIPGDVAEVFLTGATSKLGRAIALYFCRKKIRVLMLTLSTERFMNIQREAPAEFQQYLVQVTKYQAAQNCKTWIVGKWLSPREQRWAPAGTHFHQFVVPPIIGFRRDCTYGKLAAMRLPEDVEGLGTCEYTMGRGVVHACHAGGVVHFLEGWDHHEVGAIDVDRIDAVWNAALRHGLTPA

SEQ ID NO: 168082 - protein, 895 aa, Oryza sativa
  Clone ID: PAT_MRT4530_66631C.1.pep
MLRRQRQYFEQKKRQQQSPGVQSQVDVSGTGSQAYHDQAPRSLDVINLNNLATPISHSSGPETVDNVVPPLDCTLLSASPIEGLKKITSACSNLKEPCSQPRLSSSSDHHDGAASANPYKEPLGCKIPPPKSNSVKKQNPNVELNNEISLFDLVSDEGPNNKSTARPAREAHVSFSVKGLGHVKMETPPQSPRSTKRTLPLPPKVMRYTQNKARRYIPFDATKQLDSIINDINVLKERRFSEKRTCPLDESGYERSKQSNCYFPHSFENHNNKFFPEDEDMFCETKAEECWRSKHGRLDDNLTDENSERLWKMEPFNSEDRFPTPIVEQFDTRDYGFKDRYSPEQRTSTRTNTRFETSGITATHDLFSDQSMMDNGNDTVLFDWESIYLVLFCQFKVMKDGSCKKPSLSVECEENKMNEKDDFHISFDNLDIPKMDAHLDGVSLFDNLEEHHKRTDDQNNLEAGYWSDKATEKQRTREPSCRLSLKEKFSNWGSTSPTTHWKGQTGLSNPSSCTVLHEDKPFNSASEMSTYQTAGSSSPERRPASKVSPVFHRPDNAIFDDDIHLQSSVSDIFGDRIEFSKPNCSMGLQSDIDMSTFLAEKVDKRKEDNLDTSKNQNADMFLPNKSVSSVRQNVGGQHSSCAQQPGKDSLLQGFSPGIDFQDSRLNSFWEDGLADNGTFQGDIELTDLLTRKNSDKNEDRIEKLSKPETKMLTETPQAYPDHRNEMRETETCSDGSEVTNPPGVQKQTSLATQVPANLGCLQETSREMLKVHAHTECVKREKIGSFHSIAREYPCVDFSTPLHLRNKIPDVDHSKSNFMFHSPFVGEEVGIEKKIIASVSPNNSDVQYKVMLEHRVLRRLCVQKIVVDTPIKNKLDKDNHFRMMEDGYHVLPKSV

SEQ ID NO: 168083 - protein, 102 aa, Oryza sativa
  Clone ID: PAT_MRT4530_66632C.1.pep
PYIHDQFAGLSKRVTSVHQTRGVAKQVGESATVLGLCRNQAANDGGFRLSQAEPLALEFCQTPILCISSAYYKLYTPYRVLFQDFVAHADVISHHPTFDGMV

SEQ ID NO: 168084 - protein, 147 aa, Oryza sativa
  Clone ID: PAT_MRT4530_66633C.1.pep
MEPHEEDEVEDAEEFEEVFTVEDLIVEDDIFEEIVAEGFKADMDREASKHRLYIADVDRVDQGAAIRMLAYGTSADQLDEVLKIAASTCLEILGKFAEVQVVIHYFDKQSAEFINSAAGAITVSYVMQLLTAGAASTHLTVPVHFGR

SEQ ID NO: 168085 - protein, 85 aa, Oryza sativa
  Clone ID: PAT_MRT4530_66634C.1.pep
MLGSRLELRRRIHALEPPSPPDPPPTSLATARPPPPPPTILATATAHQYRGRLHALAVAAVAGLSPPWPPSPTPSRPLPPWPLPP

SEQ ID NO: 168086 - protein, 112 aa, Oryza sativa
  Clone ID: PAT_MRT4530_66635C.1.pep
MASFGVAPVGNAASGKKIFRTKCAQCHTVERGGAHKQGPNLHGLFGRQSGTTPGYAYSTANKNMAVVWEEGTLYDYLLNPKKYIPGTKMVFPGLKKPQERTDLIAYLKESTA

SEQ ID NO: 168087 - protein, 218 aa, Oryza sativa
  Clone ID: PAT_MRT4530_66636C.1.pep
MASIWSLDSHGLSRSSWPWKGREDVVAVAAPLNAELVAGSGKMGEVERRSEVERRQRGEGRGRRQREFIVEVGEWGDTGGEFVAGELAEVGGTSTTRHGWYDIVCGIVIARCHELVLVGSHVANIIFNQRREACCGWQASAVGGWMRVWRRAGKKWEIGRGGRLSLLVTSRRANAGMATRGEEWGEGERRRARARQWLRERGREAVGTAGAMGGVAAK

SEQ ID NO: 168088 - protein, 92 aa, Oryza sativa
  Clone ID: PAT_MRT4530_66637C.1.pep
PLRYYTVLSVLRHLTALPGDRESERERDPHHSQHQITSHFVPDASRLHHPLALLADPSGRSDALTHSGGGHGQCGVSLCRGITNAFLTKTPT

SEQ ID NO: 168089 - protein, 39 aa, Oryza sativa
  Clone ID: PAT_MRT4530_66638C.1.pep
FGNDCKPRFRNLRNDRRLRELNGSIRSSYDQDMVIRSLM

SEQ ID NO: 168090 - protein, 136 aa, Oryza sativa
  Clone ID: PAT_MRT4530_66639C.1.pep
MSVISSNRHREAIHTVYPKPGSNGASVGSAEPSPNSHDVPMVELETIIKALPGDSPDYYAFQVEIKNEGQTMPKYTVSYINFTLWRSSGLDQVLEMSEMVYFSMLCDVELEAESVFIQVIPLRNATRVHLVIGKGK

SEQ ID NO: 168091 - protein, 71 aa, Oryza sativa
  unsure (1)..(71): unsure at all Xaa locations
  Clone ID: PAT_MRT4530_6663C.1.pep
KSDSTARENDLCSSTIAGYKPAINIFXRDKGRERRTAGYKSVASCSMDSKTXCVYDRWDQRNVYMTGGTMY

SEQ ID NO: 168092 - protein, 76 aa, Oryza sativa
  Clone ID: PAT_MRT4530_66640C.1.pep
TARDPPTIGRCCCNLNAKPLQLFKALTQSLGRGQKGQPCTHAGTTTMPPPGAHSCPIGNWPILFSCLQIYRLVIFF

SEQ ID NO: 168093 - protein, 255 aa, Oryza sativa
  unsure (1)..(255): unsure at all Xaa locations
  Clone ID: PAT_MRT4530_66641C.1.pep
MKELSIRPKVIDFAPLVDRVERRLSTTIALLSYGDRLTIVNAVLSSLPTYYMCFLSLPKSVIESIDRARRHCLXRGSDINSNKKSLVMWDRVCQPKYKGGLGLFWKDLWNNKLRSSVFPRIHSFSRNVKISVHMFSLKDLSELFVLPLSEQASQEYMIMSTSDPIDQLNDEKDSWTYMLGVMEFSLLRSKLQIFRRFRCQLISIESXKSKCVSKVKVFGWLLLIDRLNTHDMLDRRHCSPQNASLMCFVCYRSEK

SEQ ID NO: 168094 - protein, 227 aa, Oryza sativa
  unsure (1)..(227): unsure at all Xaa locations
  Clone ID: PAT_MRT4530_66642C.1.pep
PKVIDFAPLVDRVERRLSTTIALLSYGDRLTIVNAVLSSLPTYYMCFLSLPKSVIESIDRARRHCLXRGSDINSNKKSLVMWDRVCQPKYKGGLGVIDLRLQNNALLLKNLHKFYNRLPIPWVNLIWNTYYISKVHXKVPHVVAPKGSFLWRDVLQFVDIFREIXTVILGNGKSCLFWKDLWNNKLRSSVFPRIHSFSRNVKISVHMFSLKDLSELFVLPLSEQASQ

SEQ ID NO: 168095 - protein, 129 aa, Oryza sativa
  Clone ID: PAT_MRT4530_66643C.1.pep
MAVYDTPTLVVIVVVVVVVDTVTAADPAENGHKGQPEPCRGGAAGVAAIGARLNTEAARRVILYRATLQELRMEAPRRCTLAPGGRLTDLARRRLPLLPLELGRRILLWLGAQAPAGPHRYRNQTLRPG

SEQ ID NO: 168096 - protein, 780 aa, Oryza sativa
  Clone ID: PAT_MRT4530_66644C.1.pep
MAAAPHCLLLLLVLIPTLLRGVVGGSGAGGEARKTYIFRVDHSAKPSVFPSHAHWYSSAAFASGADGAPLEPLHVYDTVFHGFAASVPASRADALRRHPAVLAAFEDQVRTLHTTRSPQFLGLRARLGLWSLADYGSDVVVGVLDTGVWPERRSLSDRNLPPVPSRWRGGCDAGPGFPASSCNRKLVGARFFSQGHAAHYGLAATASNGSVEFMSPRDADGHGTHTATTAAGSVAYDASMEGYAPGVAKGVAPKARVAAYKVCWKGAGCLDSDILAGFDRAVADGVDVISVSIGGGNGVASPFYLDPIAIGAYGAVSRGVFVATSAGNEGPTAMSVTNLAPWLATVGAGTIDRNFPAEIVLGDGRRMSGVSLYSGKPLTNTMLPLFYPGRSGGLSASLCMENSIDPSVVSGKIVICDRGSSPRVAKGMVVKDAGGVAMVLANGAANGEGLVGDAHVLPACSVGENEGDTLKAYAANTTNPTATINFKGTVIGVKPAPVVASFSARGPNGLVPEILKPDFIAPGVNILAAWTGATGPTGLESDPRRTEFNILSGTSMACPHASGAAALLRSAHPGWSPAAIRSALMTTAVATDNRGEAVGDEAEPGRVATPFDYGAGHINLGKALDPGLVYDIGDDDYVAFMCSIGYEANAIEVITHKPVACPATSRNPSGSDLNYPSISVVFYGGNQSKTVIRTATNVGAAASATYKPRVEMASSAVSVTIKPEKLVFSPTAKTQRFAVTVASSSSSPPASAPVYGHLVWSDGGGHDVRSPIVVTWLQSM

SEQ ID NO: 168097 - protein, 138 aa, Oryza sativa
  Clone ID: PAT_MRT4530_66645C.1.pep
MSSAGSLGVVVSVAAAWRLREKEVELDVTRRHAVELDERLRQATAESQAWCGLARRTSMSTARRPDSERGRWPKEEEAEEEVADELGLPPRPAAARRLSSRGYSELPLLARPPPSSPGTVRRLWDGRGERGRRRGGES

SEQ ID NO: 168098 - protein, 73 aa, Oryza sativa
  Clone ID: PAT_MRT4530_66646C.1.pep
SVYHPGDFLRRGKFTEKLPQSQRPPLSIPTYKPKGSYNQKWRRERGLKASCKFQGYIRQGVKDSGFCNSLFPF

SEQ ID NO: 168099 - protein, 211 aa, Oryza sativa
  unsure (1)..(211): unsure at all Xaa locations
  Clone ID: PAT_MRT4530_66647C.1.pep
MTWEKRSRDRRAWPGGLQADALLGAIADISDMMTHEFLAMEEGLRALESLYKNAYESSSTTAAGTSPRKNHHYNDSDDESTQFSMGDVPVTTARLPSHLLLLRGNGIAKSXSFSMADQAAVPARRGSAWPQGRRQRLAEARGATAHGSWQRTGADGDWRHSGGWRRDGAHEQAAGGDTATHGAKGACGSVRWRWWRRCPALIGDWIIYLLL

SEQ ID NO: 168100 - protein, 591 aa, Oryza sativa
  Clone ID: PAT_MRT4530_66648C.1.pep
MEIGAVENGGVVGGEVVAGKRGKTPQATETFEKVATIGVVANLTVYLVKRFNIGQIEAANITNIFFGTLNFAPLLGAFISDVYLGRFKTLAYGCFASLLGMLGMTLYASLPALKPPICHEKTRLGGGCNSPSTLQLSVLYLSLGFLIIGGGAIRPCSLPFGVDQFDKTDEEGRKGLNSYYNWYYGTSTAALVLSMIVIIYIQNNVSWPIGFGIPTLLMFLAIIMLFLGTNLYVHVQPEGSIFAGIAQVLVASFKKRNLKLPCPHDINQQGLMLYNPPSKGNRVFRLPLTSQFRFLNKGAIVMGDDINVDGSARNSWELCNVQQIEEVKCLIRIVPVCISGVLCFVALAQQFTYIILQTFTMDCHFGTHFEIPAGSVVSISLIALTLFIPIYDRILVPIARGFTGVESGITLLQRQGIGLAISPISMVVAGLVERKRRNSALSNGGISPMSVLWLAPQLVLMGIAEAFNAVGQIEFYNKQFPENMQTLAGSLFFCTIAGANYLSTALANIMRKVTTRDGHSSWLTDNINLGKLDYYFYFIALMGVLNLIYFLICSHFYQYKVMSLHSEESIKIPTKEEEATEIDIDTDAPSK

SEQ ID NO: 168101 - protein, 171 aa, Oryza sativa
  unsure (1)..(171): unsure at all Xaa locations
  Clone ID: PAT_MRT4530_66649C.1.pep
APTRLALSKGYGLRHISHEGNEDDANQVDGLRLSKNDQTYHGPSTHSCARKIQQEVNSLFAQLNPNLSEYFILPKCSTFVLLKFTPENIITTPRRMGHVEDNKGXYVEEESTHAQPAAVYTNKKMVYAVTAQLLRLVRPIQSRDELHGIHVEKRDKSSFQRIKPYLNIIFQ

SEQ ID NO: 168102 - protein, 42 aa, Oryza sativa
  unsure (1)..(42): unsure at all Xaa locations
  Clone ID: PAT_MRT4530_6664C.1.pep
MYKADKVLPWQSIFDRLQAFEPLRXVPSECAVTEYFDERYEK

SEQ ID NO: 168103 - protein, 129 aa, Oryza sativa
  Clone ID: PAT_MRT4530_66650C.1.pep
FLLRDLPFDAIQFCIYEQLRIGYKLAAKRDLKDGENALIGAFAGAITGAITTPLDVLKTRLMVQGQANQYRGIISCAQTILREEGAGAFLKGIEPRVLWIGIGGSIFFGVLEKTKSILAERNSRKVRIL

SEQ ID NO: 168104 - protein, 123 aa, Oryza sativa
  Clone ID: PAT_MRT4530_66651C.1.pep
SGFRPHQLYESRLMETFGVMMGPYAFALLSKLLSVEPSARGAATEALASEYFRTDPCAFEPSSLTKYAPCKHMVAKFRDHSRRRVNVVVRNLGVVVVGESTKRLSRGHKSMQDTTAAATGRTL

SEQ ID NO: 168105 - protein, 495 aa, Oryza sativa
  unsure (1)..(495): unsure at all Xaa locations
  Clone ID: PAT_MRT4530_66652C.1.pep
MKEIVVGSVAAAAAVGRWGAAPPQAMLERMKDYGQEGAFALWDELSPEDRELLVRDIESLDLSRIDRIIRRSLGSQGFTLPTVEPVPESSVSKVEGEVAGRDKERWWKKGLKAISEGKLAVVLLAGGQGTRLGSSDPKGCFSIGLPSGKSLFQLQAERILCVQKLAAQSSDSPNNTVPIHWYIMTSPFTDDITRKFFESRKYFGLEADQVTFFQQGTLPCVSADGRFIMETPYKVAKAPDGNGGVYAALKSRRLLEDMSSRGVKYVDCYGVDNALVRVADPTFLGYFIDKAVSSAAKVVRKAYPQENVGVFVRRGRGGPLSVVEYSEMDAAMATEINQSTGRLRYCWSNICLHMFTLDFLNQVANSLEKDSTYHLAEKKIPSIHGYAMGLKLEQYIFDAFSYSPSTALFEVLREEEFAPVKNANGASYDTPDSAKLMLLRLHSRWVVAAGGFFTXHSVPLYMTGVEVSPLSSYAGENLEAICRGRTFHAPSEISF

SEQ ID NO: 168106 - protein, 176 aa, Oryza sativa
  Clone ID: PAT_MRT4530_66653C.1.pep
WGQELKLERRRQIREDDASPAASDGGSSVLLGLPQADQAVSCGFPRADLAATAESTAPRADLAATAASHRWIRWQQWHRWLPVSGFDGDEDQDKISVAELSTNPRSSSPPATSCFLLQIHFPSHWPHHDLDDDDLRHCVSASPADLRQPTLLLKGDAQADAASDQAGFRGAVALSH

SEQ ID NO: 168107 - protein, 201 aa, Oryza sativa
  Clone ID: PAT_MRT4530_66654C.1.pep
MAEISRGHPAVHIRSNRPPRELHDIHEQTRRESGQGWPNKLFPSAVRHSYPFYSEQMRFGGRALLFGAKRGHGAGRSSDNALRWQTTDSTVLNAGDDMIGVEHLEEDSDGMALLKARSSAGSMIRRRAAVATATSSFTPVFSAVATGFGLLCVAAAVLLHLRLRWERGGSEEEGSGRRGGQRWRRRCRNRSIDAGNHLTAD

SEQ ID NO: 168108 - protein, 649 aa, Oryza sativa
  Clone ID: PAT_MRT4530_66655C.1.pep
MPALLPRLLKAGLCVGFLDPVSNIVVNTITYKKRVPVVAGGDPDGKSAAIPTRRRRRKALSRIVADTSNVGGCGPSHRLLRDMGVAARSLQALVAFLTNYFPYLHTCEALEYLRLADADLSVAVRLIEQDRSSDAFSFASLTTETALTCAAIAGWHPNPKSLVERLYSIASQIGEASNLLSMEGCLSCRAVKNISRLVKHQQQEPVDLVGATFLPRSLEIKEKQPPFVRMKSLKSILLDKIYGLYLDVIACLPMDGLRMRYHRGLLKAGHCYGPFENPVHNIVLNTVWYETMFPPQEEVSVQMTCSRSLVRVACRSLNALVAYLRACFCTISEQQAMRYLFLTGANLWGAVEMARQECHAERNMLGLDLACMVAATAAHHPDPDALVKFFMSTFSMKPLPLQTDPFMFQTGGILNVQLLVHNLMRFCPSSCGSVQTVPVLSERASMTLSCIQEEFKAEQSFICGKVNDALKKYNQRTRGLEYELHVICGLNSHIVNYTMFGRHYGPGYSRHRSKSQYSHVNFLASPRDLHSSQTVPILFFAECCNKEGVIDELTCCPVMGHPGRCYHCECEGAKIVHPDLEKYNGRTDFLEMARDKSSGTTTEDVISRCEYLHDAVDICEEDCVCFDASWDVECAEFLNSRAANKIRLE

SEQ ID NO: 168109 - protein, 62 aa, Oryza sativa
  Clone ID: PAT_MRT4530_66656C.1.pep
MGSFLDQLRDSLLARIHRTHRGAGRLRLHRWQCQDGDLVGSKDGGLHGGSSQWRRCGGIRNP

SEQ ID NO: 168110 - protein, 83 aa, Oryza sativa
  Clone ID: PAT_MRT4530_66657C.1.pep
MVGCEHMVLKVVFMAIKDRFASYYCETLTVPTTSQRGQRLYLLYNMIHCGVPDCEAWYTSGQSKTIRIAVPAVMGELSNVFRD

SEQ ID NO: 168111 - protein, 191 aa, Oryza sativa
  Clone ID: PAT_MRT4530_66658C.1.pep
MWAPLLPPLSATYTRTQPCKNPCQFSQPTPAFPSRPLTPPPPPRKMVEHLFEDIFTVTRLDPDGKKFDRVSRIEARSEQFDMYMQLDVATEVYPMRAGDRFTMVLAPTLNLDGTPDTGFYTQAGRKTLADKFDYVMHGKLYKISEDSSSGQATKVEIYASFGGLLMMLKGDPSSAASFELDQRLFLLIRKV

SEQ ID NO: 168112 - protein, 88 aa, Oryza sativa
  Clone ID: PAT_MRT4530_66659C.1.pep
PAGYTTPTPTPERGRERGRAPGNSACEIGQRLTYREPDRCLTKYKHTRVPKTHAGRLGYHDTQENGLPIQTAQIMRRRFSVILHLRPA

SEQ ID NO: 168113 - protein, 65 aa, Oryza sativa
  Clone ID: PAT_MRT4530_6665C.1.pep
CPQILFCKFWLGDLAFHRSPTKKQSVPATFDCLYKCFFNVILSALFSLKKNTEQPEVQNSRPLFI

SEQ ID NO: 168114 - protein, 106 aa, Oryza sativa
  unsure (1)..(106): unsure at all Xaa locations
  Clone ID: PAT_MRT4530_66660C.1.pep
GKPFRRNRLGFFPLPVSPSTSRLIDMLACAAVEADGSVSRARKRPRIGVXXEPXXXTXPXLGSEPPWXLVLPLVGPFLDXEFARGXAXCVSTACPRGVHPPRLLSL

SEQ ID NO: 168115 - protein, 259 aa, Oryza sativa
  unsure (1)..(259): unsure at all Xaa locations
  Clone ID: PAT_MRT4530_66661C.1.pep
DPPPYLRLRLGVDEYNGDVPSSRCPKHPSQPPFTGFCSACLLERLSTAPARCFPSPSPVAXPQRSPPKSLSPGFGLRSSTSSSSTTTRKTKGSKSGWTRKTSKVASCSASAPSVNPASGSSAATPLPTPASHGTAQPMPPRPIPTPSSGPGASSPGLPRCSGDPYPSLGGTPALAPPSQPKPPPSLLPEWTPRYPWGGILLLSMLLLLPHVSPLCSRDSTASAAVAVFTAPRLRLGASIQARSDSISLLSQETAAPAPG

SEQ ID NO: 168116 - protein, 48 aa, Oryza sativa
  Clone ID: PAT_MRT4530_66662C.1.pep
KMEKMRFLGSLRRACGPTFLPRFFSVPHPKIQFNFFELLATPFYISFV

SEQ ID NO: 168117 - protein, 293 aa, Oryza sativa
  Clone ID: PAT_MRT4530_66663C.1.pep
MWEQDEGGGYKSATANGWWGDRPWPTGRRGGVRRWPPEEKEMRLGLRDEQRLVGWTGEWEGRRGGAGSRWGDGAPGQAATGREKGRRDGWRSMGRTTNERQPAGRRGGARDDLGGTLPASVTAITSSIHRDEEMDVVDDAAKAAGREKRGTPMSFSPLIRSVPGKELLQRAKAAASGCGSPTPLHLLPADYFGGHYMVSGGGGCGLVEAMARQATTLDPLVPRSSPADLPFPWPLAVDLALPQWSPADPPLPASAIRGRCCAAVCRSVFTVYGHYAVQPYVAVPPPSAGSAAV

SEQ ID NO: 168118 - protein, 177 aa, Oryza sativa
  unsure (1)..(177): unsure at all Xaa locations
  Clone ID: PAT_MRT4530_66664C.1.pep
CRQXDSHVPTTRLLPAEVEIYQNTGVGYYASQRPEHVYIARVLCVSTLANFPQTKSLEPHPGPPAEPAKGGLHGLPIYKHVRTFSRTPNLNRIQNIDCIYGLFHGKLETIMVEHEANHRRRDPSDHGGGGGGNDLIGYLCDDLPAHHHRITRYIVSRSMTPNGRLRFKSYTFRVIYP

SEQ ID NO: 168119 - protein, 102 aa, Oryza sativa
  unsure (1)..(102): unsure at all Xaa locations
  Clone ID: PAT_MRT4530_66665C.1.pep
TQAEIPSFIPVDCRILCFSFTHHVFSFFLDGLKERRRKVRIKKAVEVTVYKVVIDFGXYDLAVGGEVDVKGEVVGGPGAPAEEAAVLDIRRRHLNPLNRTRG

SEQ ID NO: 168120 - protein, 66 aa, Oryza sativa
  Clone ID: PAT_MRT4530_66666C.1.pep
MMLLVRTKIQQQQQQYKALTLGSHIRQTIRPSVQDSGDEAHPLDGPKDAAHDIAVSQGTGNDGSPA

SEQ ID NO: 168121 - protein, 66 aa, Oryza sativa
  Clone ID: PAT_MRT4530_66667C.1.pep
MGSPIIAWWKAVNEAEHVVQTPTKASTPPDIPHPERYALLVFGWATCHPYFDPQRLYQVCGELPER

SEQ ID NO: 168122 - protein, 60 aa, Oryza sativa
  Clone ID: PAT_MRT4530_66668C.1.pep
VHHLFMIHASKIKGTQIIYFPPHTHDQAITGYIQFASTQNPVASSRHRLRHWGCPRWITS

SEQ ID NO: 168123 - protein, 83 aa, Oryza sativa
  Clone ID: PAT_MRT4530_66669C.1.pep
RAAGIRHEGELRQLQKLDLSSNNLTGGIPVSIANLSSLTFLALSSNGLSGHFPPGLSGLRNLQYLIMDNNPMNVPLPSELGGL

SEQ ID NO: 168124 - protein, 430 aa, Oryza sativa
  unsure (1)..(430): unsure at all Xaa locations
  Clone ID: PAT_MRT4530_6666C.1.pep
EDFSMVPSWMSWNYVRRILWSSGCSLLSAREVWKYLQLFCGKGELLGXSFMQRRRSNMTSYEVCWERKFKXKTYSDSSQNWFELYTLLSMELWQKPTGYKLMQSEATSSATYLISADWTITESCKLSYKITLEDGEVDVYWLNTMGQEFLYEQLIFHKEEFATVWVYQSTSFIKSKGSGRVVTIAASTSFTNSIPLPLQYWNYGSVWKLQFCCMVFLISVKQAXAAPMDILDENLEESDPARXKMWPVHSKYVQRXCVNQMDELCLSAPDLQMPWDPGGLCLLKFLAISSLGQITFQAVKFSLQDSSLFHMRSARICLSCSFEMQVFCWHAENKLDINEAFGTMQEYXRNQSGGLPFLKFTCHQLMDKSXFKERRLSGTHWAAHGLTQLLIHAKGQTNKGEGYKRQQQENFKQRTDQASAASATAAAWFG

SEQ ID NO: 168125 - protein, 106 aa, Oryza sativa
  Clone ID: PAT_MRT4530_66670C.1.pep
MDLSSYMDGGGGSGVKKVKEAATGEGARTVKEAAVGARGFQIRWSRTTWRPDLAPTTSRRPPATTTDPHGRRRSAGDLPHPAGAGGRRGGAGAADDGRGGVGGVGG

SEQ ID NO: 168126 - protein, 178 aa, Oryza sativa
  Clone ID: PAT_MRT4530_66671C.1.pep
MVPPWQPNGSIMRYHGNEEKLWRRVVAVIILREGAVGAVVLRASGHLYHPCMKSRKEEGGHRGESQTVEECRARLQLRCSAAEHSPFFPNHAREVDGVDNWLALDGVRAVRGSSEWWPWPKHVLVYFVDVDTTNMDSFEDERSQRSVREGYSGEPAVLQCTMVVVRGSYTVTNFLSDS

SEQ ID NO: 168127 - protein, 97 aa, Oryza sativa
  Clone ID: PAT_MRT4530_66672C.1.pep
GRVGRWSIEGNITVAELLKWLSDKGLSAYSVSCGTSLLYNTMFPRHKDRVNKKLVDVAKEVAKVDVPAYRRHLDVVVACEDDDGNDVDIPLISIYFR

SEQ ID NO: 168128 - protein, 110 aa, Oryza sativa
  Clone ID: PAT_MRT4530_66673C.1.pep
MESTRHYRHNPVELTLTDDREETALHLKLAHRAEILVGLNLTHFLTGPKMGSLWAFLGPFLYFLLFVHGDLRHPAAATLKPNNTTSHASSSATAAATEPASVKKPWSLNS

SEQ ID NO: 168129 - protein, 361 aa, Oryza sativa
  Clone ID: PAT_MRT4530_66674C.1.pep
MDCSNGEVQHQWMEDVKSGGAVPFLDPDNCPNGWATPPGDTFMVRGPDYLATKVKIPGGEYLLKPLGFDWMKSPAKICEILNNKSHRVRKAIDGEVLRGNQPFVWAFNLQLPSKDNYSAIFYFVSLEPVPEGSLMDQFLKGDEAFRKSRLKLIANIVRGPWIVRTAVGEQAICILGRALTCKYTQGSNFIEIDVDVGSSIVANAIVHLAFGYVQTLTVDLAFLIEGQTESELPERLLGAVRFSELNPGSAGVYEVPSEEQQESAPFLPARLWQGFSNMLHNPGNSREPSSTSQSTNGSLHKEDADENTRESLHKEDVDDNTAGSLLKEDGYESATGSFDKEDTEEDSNGSLHNGDADENTK

SEQ ID NO: 168130 - protein, 76 aa, Oryza sativa
  unsure (1)..(76): unsure at all Xaa locations
  Clone ID: PAT_MRT4530_66675C.1.pep
HVRVLRIPERGLERGDGFYALLCSYLMLVFSSLLPRTIMYLFMCVFLIWKRCAIGKVLICTVVSMVNNXLMXVXXS

SEQ ID NO: 168131 - protein, 136 aa, Oryza sativa
  Clone ID: PAT_MRT4530_66676C.1.pep
MGIVPHTDPGVLTVLAQDGVGGLQVKHTNEDGESYWVDTKPVPGALVINVGDLLQATSMRNKEQLLLELRDSTVCSSGHLPRPLVGISCFGRGRHGMRNFVYQVGTTKTMAPQPLALPLLSADSFALLLTFLALSL

SEQ ID NO: 168132 - protein, 1434 aa, Oryza sativa
  Clone ID: PAT_MRT4530_66677C.1.pep
MGRRKVAAAAAATPPRGSSKAGGGVISEIREKHKLELENLTLTKHPFRTLRFFMLAMLQYLKRLATYILSKGALFVVLIVLVLAPGILLAVTDGLHKKHVQEFLNYARFVLWATAAISLLLSNLEKGSGLHTFVLYLGPHIALFTIKAVQCGRIDLKTAPYDTIQLKQGPSWLDKKCSDFGPPVYQASAHSVRIPVFELLPQVQLEAVLWGIGTALGELPPYFISRAARLSGSEPEAVKELDAAASDEHGPIASTLNRTKRWLLSHSQHLNFITILILASVPNPLFDLAGIMCGQFGIPFWEFFFATLIGKAIIKTHIQTLFIISLCNNQLLYLMEKELIWIFGHIPGFSASLPSVIAKLHSAKDKYLSTPTSATSSSKMEDTQWNFSFTLVWNTVVWLVLVNFFIKIVTSTAQEYLKKQQDIEMELITDSSPQTASCKYSPHEIILLAKALADDIKYRLDEIRGAKDPTCLASNLTPENYWSIARRAEERAEAVEAESGERADMAAAAAPAPAESNVEFIRARSDKREYRRVVLPNALECLLISDSETDKAAACMEVGVGSFSDPEGLEGLAHFLEHMLFYASEKYPGEQDYTKYITEHGGSCNAYTSSETTNFYFDVNVANFEEALDRFAQFFIKPLMSQDAVLREIKAVDSEHKKNLLSDGWRMYQLQKHLASKDHPYHKFSTGSWETLETKPKERGLDIRQELLKFYENYSANLMHLVVYGKESLDCIQSFVERLFSDIKNTDQRSFKCPSQPLSEQHMQLVIKAIPISEGDYLKISWPVTPNIHFYKEEHMEDIIGLVFKYILLLKENGIHEWIFDELVAINETEFHYQDKVHPISYVTDTVSTMRLFPPEEWLVGASLPSKYAPNRINMILDELSAERVRILWESKKFKGSTDSVEPWYSTAYSVENVTPSMIQQWIQKAPTEKLCIPKPNIFIPKDLSLKEAHEKVKYPAILRKTPLSRLWYKPDMLFSTPKVHIIIDFHCPLTSHSPEAVISTSLFVDLLADYLNAYAYDAQIAGLFYSIYRTSAGFQVSVGGYNDKMRILLDAIMKHISNFEVKPNRFCALKETAVKDYQNFKFSQPYSQASYYLSLILEDQKWPLAEKLEALSKLEPDSLAKFMPHLLSKTFLECYIHGNIEPNEATSIVQEIEDTIFNTPNSVFKSMSPSQYLIKRVILLLQNRRENFQNATLPHRLLLPSRAGGSDINTRPLARGTAAPRPPPTASSPPESRYWRLIPVRRAIRQTGRRPRSFDLPRPPPRLESADWAIEIAIQNKVQDDLGLSARIDGCVNMFESKIHELSDKDFKRNVKSLVDSKLEKFKNLWEESHFYWGEIEAGTLKFDRVESEVALLRELKKEEFIEFFDQHIRLGAPQRKTVSVQVFVGEHLAEFKKAIAEADTPKTYRITDIFGFKRSRPLYRSLKGGPGRITMD

SEQ ID NO: 168133 - protein, 81 aa, Oryza sativa
  Clone ID: PAT_MRT4530_66678C.1.pep
SMMFVLVSFSVFSWQYSKSIHWTCHYILSLSGFKIFICSNSRGTFLVGYGIEFLLSVSTAVLKKGLLLIGPYSEISVGPEQ

SEQ ID NO: 168134 - protein, 455 aa, Oryza sativa
  unsure (1)..(455): unsure at all Xaa locations
  Clone ID: PAT_MRT4530_66679C.1.pep
FSTYDSVDSGEVVMVGDRSPIEISRIGYVQIKTNDGIVRTLTNVHHVLRMKRNIIFLGTLESWGYKYVGGNSVLKILKGNLVVLKGHRIDNLYYLQGSTITGVVVVSTIASDPHTTKLWHMPFGHMSEKGMHLICKKGHLDNIGKLDFYEHCVFGKQKRVSFSIATHQTKGILDYIHSDLXDKSKFHSIGGCEYFIAFMDDFSRKKNKLKKLRTDNGLEFCSGEFDXFCANHGSARLLTVPGTPXQNGVAERMNRTLLERARCMLSNASLXGTSMRLWAETISTASYLINRSLNFAINFXIPEEVWSGKLVDYSNLRIFGCPAYTHVNXGNTRKLDPRVRKCVFVGYDSGVKGYRLGCSDAHKLIISRDVTLMKIFFSHQVSIVNPTIQLLIRHFMIIMIIVLLKIEIEETFDCLLDIVTLMIWPVMLFLLHKILMILLNLLILKLSHVKILRNG

SEQ ID NO: 168135 - protein, 272 aa, Oryza sativa
  Clone ID: PAT_MRT4530_6667C.1.pep
MAAAADDLARRLAAFIPLPQPPQKEQLSGVAAAVLDAGGRLGRAVGDVFRRLRIDEGLDVALAQRHRRNGGSRIAAAAAAVDARVSKDSGGGGVAGHDPGSMNLSATYDSRTSDVESSVVARGDLWRAEASHSSAAAAAPPLFMVQLGPVLFVRDTTLLFPVHLSKRHLIWYGFERKNGVHSVCPAYWSAHRRWFFMSMICLNPFTCIGRSKLNGSAAILTGDGFTTRAFLPLYRGIFQAHAKFPGEKKFSYSFKFRPGRGCTLVVQCFSSN

SEQ ID NO: 168136 - protein, 27 aa, Oryza sativa
  Clone ID: PAT_MRT4530_66680C.1.pep
WFYCRARIGTSLRVDSGKPVSLVDKFH

SEQ ID NO: 168137 - protein, 429 aa, Oryza sativa
  Clone ID: PAT_MRT4530_66681C.1.pep
MWRKAGVTIVSDGWSDIRQRSLVNILAVNECGPIFLQAINNEDEVNTKEYIAEKLIAVIEEVGPENVVQVITDNDPVCRAAGLLIEEKYDHIQWMPCIAHTLSLALKDVFSPNNTGDVAFKDSHWISEVVEDAIMIKNFIINHTMISSILSEFNNLRTVKSEYGEFALLGTKHFSLNSRADRDKLDPKMWWATHGTSAQAVQSLAFKLLSQPVSSSCCQRNWRTYDSIRDIVRDKLRPKWADDLVFVHNNLRLLSRRSEEYHTDREARYWDGRVVSDLAGHELEEEDYPDVDYESDLQTAMSITVRYATQILYWISTRWVQKDGFFNNKLLDYFEPGRSNPAKEQLSTRIVCGRVHRIIENNLDKCRVVAPNLPTKTDDLSHSTGHGWTTREKGSSAVSDLAGHELEEEDYPVVDYESDLQTAMSTTIR

SEQ ID NO: 168138 - protein, 665 aa, Oryza sativa
  Clone ID: PAT_MRT4530_66682C.1.pep
MRFLCDYCSCVFRGSYSTVKAHLLKISKQGVPACPGVTFNILMKLSSEVDAAEDSILIQVRKKRNVTESCSSDYSGDEPESCSSDYSGDAPCMGKVIVQAKRKKSRAECRDNFDAQFARMFYSSGLSFNSARDPYFRSSFSFILKNIIPGYVPPDCKRLKTTLLQKERARIEDLLKPIKSMWRKAGVTIVSDGWSDIRQRSLVNILAVNECGPIFLQAINNEDEVNTKEYIAEKLIAVIEEVGPENVVQVITDNDPVCRAAGLLIEEKYDHIQWMPCIAHTLSLALKDVFSPNNTGDVAFKDSHWISEVVEDAIMIKNFIINHTMISSILSEFSKLKILAISNTRFASDLVMLKRFRLIKQSLIMLVISDKWWPVYCNDNMEQAQLVKYKLTDNSWWKQVDYILSFTEPIYSMMRVTDTEEPRLHLINEMWNTMVEKVKAAIYKHESREPEEESAFYSVVHGILEDWWSRSKTPLQCLAHSLNPRYYSDSWINQAANRLPPHRDAEISRVRNNCWRKLFFTTDNLRTVKSEYGEFALLGTKHFSLNSRADRDKLDPKMWWATHGTSAQAVQSLAFKLLSQPVSSSCCQRNWRTYDSIRDIVRDKLRPKWADDLVFVHNNLRLLSRRSEEYHTDREARYWDVGDDNFKSLGGAGILESANLSLDEP

SEQ ID NO: 168139 - protein, 137 aa, Oryza sativa
  unsure (1)..(137): unsure at all Xaa locations
  Clone ID: PAT_MRT4530_66683C.1.pep
MMHPKLTVLTTKFGNPTIGXKEESRRSSRXRLFRKQSEDRLKXNRLRLGSPEFESDRVSRLSRIRQYDMFGQKSAAKTYDILEFVKDKSHVRYGHILIKSTGMLTHLKASFWTCTGVKQISQASCFYINTISMNKER

SEQ ID NO: 168140 - protein, 163 aa, Oryza sativa
  Clone ID: PAT_MRT4530_66684C.1.pep
PAGKSSLDPPPLLLAQPGVDTDGTPPARCATAGTPPPARPHRQDCSGETLPPHQGSRGGFMARKLSARRVRWERSISSSTWVAYRFCFFSRCLGARSIFLHITVYSSKYIWASIESVLDVITWVVMSLSWVVSFWDEVSCCRIEPSAIALSVVDGKKIKRIKI

SEQ ID NO: 168141 - protein, 97 aa, Oryza sativa
  Clone ID: PAT_MRT4530_66685C.1.pep
LVDPRAAPAGPLLAQPGVDTDGTPPARCATAGTPPPARPHRQDCSGETLPPHQERPPSILLPPEATRRALSSASTPSPRSTSTVTSSAIPKHGQHGD

SEQ ID NO: 168142 - protein, 100 aa, Oryza sativa
  Clone ID: PAT_MRT4530_66686C.1.pep
SKVRHLSLNLYCCVISVPKLANRSFRFSNLFDCIISIPKLADYSFRSSNLFSCVTPVPKLEFEYHLGQIGRDRGDTTEQVGGPKRVICKFRDWDDTVKQV

SEQ ID NO: 168143 - protein, 98 aa, Oryza sativa
  Clone ID: PAT_MRT4530_66687C.1.pep
RPGKSSLDPPPLLLAQPGVDTDGTPPARCATAGTPPPARPHRQDCSGETLPPHQERPPSILLPPEATRRALSSASTPSPRSTSTVTSSTIPKHGQHGD

SEQ ID NO: 168144 - protein, 104 aa, Oryza sativa
  unsure (1)..(104): unsure at all Xaa locations
  Clone ID: PAT_MRT4530_66688C.1.pep
LLSFSFSFFFLHWHLQETQAFLRASSSATGGRTRARHHVRRRVAFLLLVAAAAVANAAVTYDHRXLTINGQRRILISGSIHXPRSTPEMWPDLIKKARKGARDQ

SEQ ID NO: 168145 - protein, 65 aa, Oryza sativa
  Clone ID: PAT_MRT4530_66689C.1.pep
FFFFISTLIPGGHSHLTDQTYIPISSYSPSKPLNTINCLCNTLHLQNLYPQLQFSYLKIKTYNKC

SEQ ID NO: 168146 - protein, 140 aa, Oryza sativa
  unsure (1)..(140): unsure at all Xaa locations
  Clone ID: PAT_MRT4530_6668C.1.pep
TAAAGPPPLVLARVARRWRRRRRRRAGWRWRGTTASRRRPSRPPPWAAPPCPAAPARAPTSSPAGRRRRRAPRRRRRAPRPSAACTAARRAPPXERHHHPEPDEQVRRRRRXRTAAAPPPPASPAPTTSTPPRRRSRPSP

SEQ ID NO: 168147 - protein, 81 aa, Oryza sativa
  Clone ID: PAT_MRT4530_66690C.1.pep
MENADGLDIFGPFLTMRALPQYGHVPPHRTTRADTRIIPSLTNDDFLPRSMAQAMLPDSSRRTREALCPRSHQSFRLWAGE

SEQ ID NO: 168148 - protein, 152 aa, Oryza sativa
  Clone ID: PAT_MRT4530_66691C.1.pep
LVCGVAPSPSSRECIISGRWLVDRQCEDKSLVSGSPAVCHSITISINTSVSSNSGNSLRFFSNSGKSPSTLRLVDGDAKGAFSGCSDTNLMTTASSTPGGRSRGLQIRRAQPHAVVDPRNLVFSLAAVADEAMLGAEPTPSALSSTSPRDRH

SEQ ID NO: 168149 - protein, 58 aa, Oryza sativa
  Clone ID: PAT_MRT4530_66692C.1.pep
TKGTRLFCYSEPTTTRAGQDSQTGNFMEFFFLFFTMHTCNHLIWRTYLRCNLLTRELL

SEQ ID NO: 168150 - protein, 178 aa, Oryza sativa
  Clone ID: PAT_MRT4530_66693C.1.pep
MAVAARAAAVACLLVVGLAAVAGVDGATASSPAPAPAVDCTAEALKLADCLDYVTPGKTAPSRPSKLCCGEVKGALKDSAAVGCLCAAFTSKTLPLPINITRALHLPAACGADASAFSKCLAPAPSPSVAPGTSSGSGGAAAAPAKGAAAARSPMASTTAVLVVAAAVAAPLLAFFHF

SEQ ID NO: 168151 - protein, 136 aa, Oryza sativa
  Clone ID: PAT_MRT4530_66694C.1.pep
IPSQQEHRKIPLTRSSLKRPNTTDPPSKRAHGGMRPSRIGRVNGVQIGPPPRRRIRHHRGGGGGGGFLFFILPCRRGSRSATTVYGERTGAPPPSLDTAVDRTRRRRGEDSSRGELRLRRKGRRKEGKGDGRLERE

SEQ ID NO: 168152 - protein, 161 aa, Oryza sativa
  Clone ID: PAT_MRT4530_66695C.1.pep
MERAAAAAPVVVRHGGVVLPPGFRFHPTDEELVVQYLRRKAFGLPLPAAVIPDLHNLFKLDPWDIPGASSDGDKYFFAVRPPAARGRRQHVTASGGCWKPAGGRDKPVVVARLSGSSLVALANGRDERSKQMHGSCKVKKRRRSSSCSFSSVSIFNCIELA

SEQ ID NO: 168153 - protein, 122 aa, Oryza sativa
  unsure (1)..(122): unsure at all Xaa locations
  Clone ID: PAT_MRT4530_66696C.1.pep
VSLNVIDRGWHPMPAFTYMDVDVSHFTTVDRLPKAGTWRILSDTFCVXEVSRGCYGQLWSDRLVSISHNNAYELGWPWVANGVNQPVSRPQQVSSSPVAWRRLAPTMIPLALLSLSSAHRCA

SEQ ID NO: 168154 - protein, 77 aa, Oryza sativa
  Clone ID: PAT_MRT4530_66697C.1.pep
YPGGPFDPVGFADDPEGFGELKVKEIKNGPLPMFSMLGFLVQAIVTGKGPLKNLADPLADPVNKKGWGYAPNFVPGK

SEQ ID NO: 168155 - protein, 226 aa, Oryza sativa
  Clone ID: PAT_MRT4530_66698C.1.pep
MSPTQVELELELDWRQKLELEKEQLRGKIEVMKMMGSEEDGTLKELDELRTKLEEKDDDMESMDSLNQALIIKNQRTIDELKEAKKGQERTDKCVKRMGELDQKAFYNACKNKMPNNKMKLALVCSKWEDEITKPEWHPFKVIETAGQTKEIIKEDDGKLQALRAQYGDEACNVVVKALVEMNEYNPSGMYPVPELWNFKQNRSAPMPEAASYLLKQWKTHKKRNT

SEQ ID NO: 168156 - protein, 117 aa, Oryza sativa
  Clone ID: PAT_MRT4530_66699C.1.pep
KRPRKAKKELINGLEKMAGVRSIIGVKRMGELDQKAFYNACKNKMPNNKMKLALVCSKWEDEITKPEWHPFKKVKIPEIIKEDDGKLQALRAQYGDEACNVVVKALGEMNEYNPSGM

SEQ ID NO: 168157 - protein, 140 aa, Oryza sativa
  unsure (1)..(140): unsure at all Xaa locations
  Clone ID: PAT_MRT4530_6669C.1.pep
PRAPPRRVHTAPAAAAEGAALRRGRGGARRRRPPRTRCGRRVPTPAHRRRPRRRLGAAAPQERGFQDRRRRRXPXMRGSARPRRRRRRRHDPVGVSGRFARSQGSMNLSATYDSRTSDVESSVVARGDLWRAEASHSSAA

SEQ ID NO: 168158 - protein, 63 aa, Oryza sativa
  unsure (1)..(63): unsure at all Xaa locations
  Clone ID: PAT_MRT4530_666C.1.pep
MSSRRPCTRRSGGGYDPSHPSVTRGRAIASGGRRRVPLENRLLLSFREKARFEAQXWSGIPLR

SEQ ID NO: 168159 - protein, 93 aa, Oryza sativa
  Clone ID: PAT_MRT4530_66700C.1.pep
PFALPLWSCHRHPSPLACADLVDRGDFNGARRDGTPCSLPPTSSSGVTSTGTREAMATPDRGVLLCTGDRARARARRTVLPRRPGCSSPATPW

SEQ ID NO: 168160 - protein, 187 aa, Oryza sativa
  Clone ID: PAT_MRT4530_66701C.1.pep
NTYATTDGDGRWPATRSGQRRGTVHGGDDFPAMCGDNGGVAGFHFAAANPMEAAATEGDDHSDGAGLLETRRRRRRSGSRRRATSGGIWHKITSGRGRGRPCEADGGGGAGRRQMRRRLGAAVVAPALGERRRARGERFRRRRKMELEGIGRGRLGGPLYRHGSSGPGPNRREKNRESLGFSPEKGR

SEQ ID NO: 168161 - protein, 114 aa, Oryza sativa
  Clone ID: PAT_MRT4530_66702C.1.pep
MARGGGYGWALAAGLNAALAAISAKFFAPPLLKYSMVILFNVTMWGCYVNSLKALSSLQATVTNFAANFISSGLAGYFLFEEPLPSKWFVGASLIIVGVFILSKSSIEKKLNSD

SEQ ID NO: 168162 - protein, 244 aa, Oryza sativa
  unsure (1)..(244): unsure at all Xaa locations
  Clone ID: PAT_MRT4530_66703C.1.pep
NPGAGDELLDELLDSALDDFTSLDLSXPPKGSPPPPPPRSEPTAGIPIESLGLGLGLPDPRAPRRRAAKQPTAAHASEALEKLTRETREAVRGLETATGAIAGLDDDAMMEEFVKQFEEFAGAQDMDSIVETMMQQLLSKEILHEPMKDIVEKYPKWLEENKSKISKEEYERYNNQLELMMKLNEVYEKEPENMAKIFEIMQNMQECGQPPSDLVQDIAPDLDLSKLGQLSPEMLESAPNCCVM

SEQ ID NO: 168163 - protein, 41 aa, Oryza sativa
  Clone ID: PAT_MRT4530_66704C.1.pep
TQKQWGAVFTKILTHTAFTTNNHAGCYWITYITYMIPKIHN

SEQ ID NO: 168164 - protein, 84 aa, Oryza sativa
  Clone ID: PAT_MRT4530_66705C.1.pep
GWQWRWQWHVRGNKEGGVQVSAKDDDGGGAAPAAFDGGVGKAGAAPWRSGAEGRRRRRGGAARRGGAEGRWGGAGGRAVARSSE

SEQ ID NO: 168165 - protein, 146 aa, Oryza sativa
  unsure (1)..(146): unsure at all Xaa locations
  Clone ID: PAT_MRT4530_66706C.1.pep
QQQPGHRPGVYMYITSHMQTNTHFFTVCKHIISHALSKSCALTPHTIVTFHHIHCVSAWGVAISHHLHLRISAIVSAFHSLHVTLSHHTITFAPNIFIRSSRVXRYSFSXTHFWSSYPILWQSGPCATRLHLDPPXLFSTRAGQIL

SEQ ID NO: 168166 - protein, 110 aa, Oryza sativa
  Clone ID: PAT_MRT4530_66707C.1.pep
ARGAGGVPARAAPARAGLRRNSADYCSVETASFLRSCGLCRRRRGPGGGRFMYKGEAAFCSLECRQQHMTQEEWQDKCGVTSMKKEAPAPPNGRRRSSKTTTSGGTVAAA

SEQ ID NO: 168167 - protein, 250 aa, Oryza sativa
  unsure (1)..(250): unsure at all Xaa locations
  Clone ID: PAT_MRT4530_66708C.1.pep
RPGVIAAPDPPPPPPFIIASAGSAAPPPXSSPAPNPRRDGPPDQGGVVAPTPAPPAPPSSWTSPRTCPATPPASCAAACTPGCRTPPLPCEAHSACVSRAPSASAPPSPARRARGTPPASPAPXAPPPPPPPPPSRPNDASQSCAPSPPPPXAGPPSSWPRDPHPPPPPPPPARPAARTPSCSSSASSGYSCSLPSPSCPPSSPPRRRAARTQRDGLLLLLLRRRRRGGGRRRRACGRAASQAQPNALAG

SEQ ID NO: 168168 - protein, 110 aa, Oryza sativa
  unsure (1)..(110): unsure at all Xaa locations
  Clone ID: PAT_MRT4530_66709C.1.pep
RCRGRGRGGGGRGRRSGGTRRSRRSSSRRSSASAPPSPARRARGTPPASPAPARXPPPPPPPPSRPNDASQSCAPSPPPPPGWPTIIMASRSSPSSSTTAASTSGGENSV

SEQ ID NO: 168169 - protein, 597 aa, Oryza sativa
  Clone ID: PAT_MRT4530_6670C.1.pep
MFLSKLPNPPRPWRPSLLEAPPLRTLPRLLPAAAPSPTRRRRLLAPLAAASNSGSPSKDSNRSPPPPSKKKKKKKKAADESGRWKSVPPGMRESAAPVPDEPPASPCTTARRRARAAWRKVASLVPRKARSVVLLNLVTIVFASNISVVKEAETMLDPDLFNVLRFTISAIPFVPLLLKALNDVQVFIRGVELGIWVAIGYLAQAIGLVTADAGRTAFISSLTVIIVPFLDGILGAEIPAYTWIGALLSLIGVGILELSGSPPCVGDLLNLLSAFGFAIHMLRTEHISRNMKKENFPALVGCQVAAMRDVSATETAIIYGLEPVWGAAFAWAMLGERWGMTGFVGAIFIIAGSFMVQILGSFPDALSSFIVIELVSQQRIRKHVTVHRQACLAAICQKHVYLSWTSETPPEPAQVYDSVLQQWCPLPSKASQQRIPANIIHCYNDSIYHHLYGQSDLFSSPHCFVLTLEFHFTMIRHVRSTYMSADCVPWLSSSTGETVISVSAFTGVTRQATKLPFSFVSLRIGMCKDRLKKGRCFSQVSCVEVERYMMQPLNSQSFLDSGGGLGSCLPACSTDAAELLIRWWVRQHNIQPYRIQQ

SEQ ID NO: 168170 - protein, 119 aa, Oryza sativa
  Clone ID: PAT_MRT4530_66710C.1.pep
MELKEAALLPTPTFFLADPEPVGKLDVKDPGSPDLLSLVAAVTTATSQTRHPSRACTGDVQETEVKADLPRLHLTLLIKTVMVWMCKLMNMWDGGVATGNSSATRRGSKSLSTLSSKVA

SEQ ID NO: 168171 - protein, 275 aa, Oryza sativa
  Clone ID: PAT_MRT4530_66711C.1.pep
MTHPLHGAFSSSHLSSVGPALDFLSEDEVTLHVDEGTPTVKGLSNTRILIFSSHRLLFLSPYTLCAEPGLPGQPSVSVGRPRHGPAVGPGQHRTDPSRAVPCLGRAKSRAVGRAFGPSALWPSIALTIRCRSPHKKSIAFHANHNPGTGKSSQIPRLLHVAGHGRVVGYSVPLDDRSLDADTVVKYTSHGALLRELAADPILTRYGAVVVDDAHDGMALTGVVLSCVKAAAARRLDLRVVVCLNHYSTLCKGVVHGFFSGSGMDVKELWLRTTPV

SEQ ID NO: 168172 - protein, 175 aa, Oryza sativa
  unsure (1)..(175): unsure at all Xaa locations
  Clone ID: PAT_MRT4530_66712C.1.pep
MMASCRRGGGGDVDRIKGPWSPEEDEALQRLVGRHGARNWSLISKSIPGRSGKSCRLRWCNQLSPQVEHRPFTPEEDDTILRAHARFGNKWATIARLLAGRTDNAIKNHWNSTLKRKHHSSLLADDLRPLKRTTSDXHPTLSSAAAPGSPSGSDLSDSXHHSLPLPDGPLTPTPP

SEQ ID NO: 168173 - protein, 127 aa, Oryza sativa
  Clone ID: PAT_MRT4530_66713C.1.pep
MAVASFVDDDLAPPPSLMTTAGATTRRPGGAQWCRGLDGGGGERGRRREQVVVKVEEVPAVSRWAVVVAAASKAWLPVSARGLRRSERKTVTPAGKWRERVADDVQMQTPIYAQLILVKVYIRTLSL

SEQ ID NO: 168174 - protein, 68 aa, Oryza sativa
  Clone ID: PAT_MRT4530_66714C.1.pep
QVGPDTTCQLSFLHMMLNFNSFISTMVFFQILLLKRTQSAILHPVLFSTKLVWKLDEKKQYLPLFPSI

SEQ ID NO: 168175 - protein, 692 aa, Oryza sativa
  Clone ID: PAT_MRT4530_66715C.1.pep
MDAEGLLASAAINLGLALVALSLFSLLKKQPGNAPVYLARRMAAGGGGGGLPLGHGRLTPSFRWIRAALRLSEDDVLRRHGLDALVVVRLFKFGIKCFAVCSIVGLFILAPTNYSCEGLQDTKRSNSMELFTVSNVARGSNRLAILQLPFTLLSRLWVHFACLCFISFYVVYLLHKEHKEMSSRRIAHLKYHRKRPDQYTILVRGIPLCPDHGTYGCYADHFFSKHYRTYQSYHIVHDIGNIKALQKLASSLEDKIKRKRETRRCNFWKWIWFKLTLEAIDTRKLEEKLKNVHHSIRLLQCENMLKRKELPVAFVSFKSQLDAAQAAEMQQHVNPLSLVTTYAPEPPDALWTNLAIPFCRIAIYKLGVFIAAFLLIVFFTIPVTAVQGIVQFEKIKIWFPPARAVELIPGLNSVVTGYLPSMILNGFIYLIPFAMLGMASFEGCIAKSQKEIKACNMIGESFTHPKDIPSRLARAVSAQSDFFITYILTDGMSGFSLEVLQFGLLTWHFFKAHSIGHSEQPYLYGFPYYRVVPIVSLAVLIGLVYAVVAPLLLPILVIYFLLGYAVYINQMEDVYEITYDTCGQYWPNIHRYIFLSVTLMQITMLKSKPGASFATVPLLVSTILFNEYCKVRFLPTFLHRPVQVAKENDDLNEAEGMRGDLDHAISAYKPPWMRPTNFSPDCSSVQPLIRSV

SEQ ID NO: 168176 - protein, 147 aa, Oryza sativa
  Clone ID: PAT_MRT4530_66716C.1.pep
YKCDSTQRRRHAWFALPGGVGGELAPSAARYTKSAHPRENPVSASKPNGPPSSSPNPAKKARSRSALAPGATLVTYTRLPAAAAAPEDGSAPAVRGELDGDGAAGDDDAAAAATHLAERTVGAPHRPPPLPSASMWGPHGSHADSAA

SEQ ID NO: 168177 - protein, 50 aa, Oryza sativa
  Clone ID: PAT_MRT4530_66717C.1.pep
MAADGNNREAMACEGGKFGAKAQPVRADSTNDVFGRRNLPRALLWLPFPH

SEQ ID NO: 168178 - protein, 528 aa, Oryza sativa
  Clone ID: PAT_MRT4530_66718C.1.pep
MADRAPPPPPPPAGIDSRSGFCAATRIFHSTRAPGDLPPESLPMTAAAYAFSLLSSSTLPGRPALVDAATGIAISYPSFLAAVRSLAGGLWCSLGLRPGDVALVVAPSRLEVPVLDFALMSIGAVVSPANPVSTPEEYAHQVALSRPVVAFAAPEVAAKLPEHVRCVVIGSDEYGRLAASDGRRAAAPAAVAVKQSDTAAVLYSSGTTGRVKAVAITHRNLIALMSLHADNREKVAREAAEAGEEPPPPAVTLLPIPLFHVFGFMMVLRSVSMGETSVLMERFDFIAALRAIERYRVTLLPAAPPVLVAMVKYEEARRRDLSSLLVIGIGGAPLGREVAEQFASVFPNVELVQGYGLTESSGAVAATVGPEESKAYGSVGKLGSHLQAKIVDPSTGYVGDDEATAATVDSEGWLKTGDLCYFNEDGFLYIVDRLKELIKYKGYQVPPAELEHILQSHPGIADAAVIPYPDEEAGELPMAFIVRQPGSNITKEQVMDYVAKQVAPYKKVRRVAFVTAIPKSPAGKILWC

SEQ ID NO: 168179 - protein, 69 aa, Oryza sativa
  Clone ID: PAT_MRT4530_66719C.1.pep
LITIKKKKKKKKKKKKKKKKKKKKVKKKKKKKGRMVKRYQDSMPMHARAKHLRRSNQNTIEGRGIKNER

SEQ ID NO: 168180 - protein, 108 aa, Oryza sativa
  unsure (1)..(108): unsure at all Xaa locations
  Clone ID: PAT_MRT4530_6671C.1.pep
ASANNPHPSTLPPPSRPPSPLPPTPASASXKPLRRPHPPMLPPLPLLVVDASHCHRTPPPPPTQPLPATAPTQPPCPPSPSPANAATATASSPSPAAVTASSHRTPST

SEQ ID NO: 168181 - protein, 147 aa, Oryza sativa
  unsure (1)..(147): unsure at all Xaa locations
  Clone ID: PAT_MRT4530_66720C.1.pep
LFLDDGELRPALAFRDRHQHRPPAPPXSRLRSPPEPNLLPPPPPPPPPPXPDLKPPMPPPSSSSPPRXAPPPATRRTDPAACGRRGPRAASCTPPAPARRPPXFPPPPPPPGLAPAYDGAGLRDGLGAAAPAAHRVASSLNRCGSVA

SEQ ID NO: 168182 - protein, 58 aa, Oryza sativa
  Clone ID: PAT_MRT4530_66721C.1.pep
NEMKWGLNYFSFLFPHFVHSFSSAADVMDLHHFFLRLFQRPTCEISLQYSTSVATTEV

SEQ ID NO: 168183 - protein, 73 aa, Oryza sativa
  Clone ID: PAT_MRT4530_66722C.1.pep
IIGLGGGGASGNNSYKYSINHTLLLSLLRFSYKQTTTKKNIHSLYAGIVLWASRGAQSFRGNSHLQHTHQIIM

SEQ ID NO: 168184 - protein, 222 aa, Oryza sativa
  unsure (1)..(222): unsure at all Xaa locations
  Clone ID: PAT_MRT4530_66723C.1.pep
MKRRNQREEEEDARNRARRGTRWGRAEESMSSSGFLDLFSSVVAAPAVRYLFLDDGELRPALAFRDRHQHRPPAPPHQQAPXPPEPNLLPPPPPPPPPPXPDLKPPMPPPSSSSPPRXAPPPATRRTDPAACGRRGPRAASCTPPAPARRPPSXPPPPPPLPQPPTPTRRDRKRRSRPSTPPRRLAAAAEAVPGAGPGVRRRGAARRARRRRPRRAPRRQQL

SEQ ID NO: 168185 - protein, 121 aa, Oryza sativa
  unsure (1)..(121): unsure at all Xaa locations
  Clone ID: PAT_MRT4530_66724C.1.pep
MASKKFACVVVVMCIXWCWVHSCQRXAISCGEISTRLAPCLPFLLGGVGPSGLCCDGVKTVNDTGQQPPLNLQATCNCLKDLAAGVSXLXTXGNXEALPSKCXVXVXYXKIXXSXDCSXIR

SEQ ID NO: 168186 - protein, 92 aa, Oryza sativa
  unsure (1)..(92): unsure at all Xaa locations
  Clone ID: PAT_MRT4530_66725C.1.pep
AGQEKTRLLLEETGLPSGLLPLRDIIECCYXRRPVSRCLKQQRKVDHFFYKAGRHVSYSDEVSSIAXKGRLRKISGVNAKELLIWVTLHEIA

SEQ ID NO: 168187 - protein, 48 aa, Oryza sativa
  Clone ID: PAT_MRT4530_66726C.1.pep
LQACYRVCKTSTDGLLKSTNNVAGVSSSTRHLYNTGAPGTSLPLMFND

SEQ ID NO: 168188 - protein, 106 aa, Oryza sativa
  Clone ID: PAT_MRT4530_66727C.1.pep
KIFHFILFFGGFFCCIQNFAKTFIFIEIQGGRLLNTPPSVLKQLILPQPGNPWVPAKKNFIAPNREPTTRFSPPGELTEEVTGILGGTPGPAPRGPLPREKRGDPP

SEQ ID NO: 168189 - protein, 95 aa, Oryza sativa
  Clone ID: PAT_MRT4530_66728C.1.pep
TRVHVNQAPKQKHPKTQITHRLFCCDDNYSPKFIQSNYKAIIQAPLAAINLRLTQGVEFYTSKFDFPQFQIFNSLFQEQLASYLLYSEKITRKIE

SEQ ID NO: 168190 - protein, 333 aa, Oryza sativa
  unsure (1)..(333): unsure at all Xaa locations
  Clone ID: PAT_MRT4530_66729C.1.pep
VEEPLLTEFSGGGHGASVSGAVFNVWTSIIGAGIMSIPAAMRVLGVLPRVRGRVGXSPRLSDASVEFMLRYTGWDSGPPSYAGIMGDAFGRAGAKALNVCIAFTTTGTLVVYLIIIGDVLSGSAGAGDEHAGVLQELFGAQWWTARELVILVTAIVVLLPLVLRRRVDSLKFTSAVSILLAVVFMFISLGIAVYALFTGTAKMPRMLPDFSRLSSPFELFTAVPIVVVAFTFHFNVHPIRTELSKTSDMKAAVRISLVLCAAIYAAVGFFGFLLFGDATMADVLANFDRSSGAGVPQALNDAARLSYALHLVLVFPLLHFSLRVNVDELLFPG

SEQ ID NO: 168191 - protein, 86 aa, Oryza sativa
  Clone ID: PAT_MRT4530_6672C.1.pep
MDPATAAILAWIRRPVALPLSGIRRVATSLPTTGGNDDGDGGGSLPTTVALDPPPLGLGRLNPSPATAGMTTAGLGQDGGGDGGGG

SEQ ID NO: 168192 - protein, 74 aa, Oryza sativa
  Clone ID: PAT_MRT4530_66730C.1.pep
MAAKFPILLGVILATLLLVSHDVAHAAEQAGPSEPQLPEGYGSGYMQPGYRGAYTGGGGNGQNGGGGSGYYHNP

SEQ ID NO: 168193 - protein, 100 aa, Oryza sativa
  Clone ID: PAT_MRT4530_66731C.1.pep
SLFKSLSALHTYMMGKWESGVTNRFQPIPAAYPNYKFIREKKKDSRACLAHNFHHRSNFFWPQHTSYPLHSMFAILTGLSVHPPWQNIPPIFHFSNKYCS

SEQ ID NO: 168194 - protein, 125 aa, Oryza sativa
  unsure (1)..(125): unsure at all Xaa locations
  Clone ID: PAT_MRT4530_66732C.1.pep
MLDRVGNAWSPLRRRSESGTAHTRYMACRAVGSVDPHRYLAQEERWLDHTLDHLNPSGHRQFIQGHYEFLDYYRAAKGPVLLYICGECWCNXIPNSYLSVMAKKFGARMVPHEHRYYRKSFRFES

SEQ ID NO: 168195 - protein, 63 aa, Oryza sativa
  unsure (1)..(63): unsure at all Xaa locations
  Clone ID: PAT_MRT4530_66733C.1.pep
AXNTIIRLQYHFPTTNIFFLLVVTPYEFITLILRWFISSHSRDKDHPSQNTKENKRFENHLVV

SEQ ID NO: 168196 - protein, 92 aa, Oryza sativa
  unsure (1)..(92): unsure at all Xaa locations
  Clone ID: PAT_MRT4530_66734C.1.pep
MHWQGQLLVTAMASTNSWTHEIESPVAAPSLFRAARMDWHTLAPKIASYISVSAHPLDSDRSVXSVRQFNFTLAMPFSHMKERLEFLDVDKC

SEQ ID NO: 168197 - protein, 687 aa, Oryza sativa
  unsure (1)..(687): unsure at all Xaa locations
  Clone ID: PAT_MRT4530_66735C.1.pep
MAPRKPNPASATGPDPGRIDDDTTAFLGASLVDDDELAKLVSSGVVVEEQAFTPGKAMVPKPGDNRTVVFAIFFEAGLRFPCNVWLPEILRLFQACWTARFEPSAELFGAVFFATMNSKTVVTLARTKKTAFGSVNFNVRLERSDLWLVNAAMSKWDRHWMAKWYYYSITFEAGSEAAKALRCRRRAIAPNRKPKVAVDGAMEARFALLRKICSRLSCRDLVEEFCMLHIFPLSQSWQVVVDQDEEVDGLPKLVPPAGVNVLTLDQADAEARKMIGDVSVTEFSQLLKRQAAGRANRVYDGELPSRMNPLRVDDAAGPSRKRMRGEVKSAPRKRRALASTDSDADDKDIVEDNDDGVEGEDVGETEVAAEKAAEEAADNRAGMPGYTPTPSPEHVETGVESNCSPLRRKDMERAKALVAIASAKVAKRGPVKKTSKRIGLVEGVSALVSPAGSSSLFTELNEFDEGCSAIKSLVVRILAAHCLTERTMRARLDGLKNRLRAKDDELGYKSLEMEGLAHALKETKAENKRLQAELEKGSEAKAEIERLKAELKKEQTHSAALTDYYNLTEPKMEALRQEVSQAEAKTKREAQRFAREMVKATEFVKTACQTLRLXLSDMGARVRGVPSEDASAFDFSEWTQQARGAVSDCATAYGDCCARMSAAFTMGLLQQFGCEHVAEFPNFANGD

SEQ ID NO: 168198 - protein, 430 aa, Oryza sativa
  Clone ID: PAT_MRT4530_66736C.1.pep
MAAVFLRAAARATRSSALVRAILASRSPLSSSSCAASPTTAAPVPGTAPRAAAAGDGDEGCAAAAATPADVGGDEDDLRSRVFRLRLAKRSATAALERWAGEGRAASAAELRGIARDLSRAGRYKHALEVAEWMKTHHESDLSENDYGMRIDLITRVFGANAAEDFFEKLPACVQSLEAYTALLHSYARSKMTDKAERLFKRMKDANLSMNILVYNEMMTLYISVGELDKVPVIAEELKRQKFSPDLFTYNLRISASAASMDLEGFKGILDEMSKDPNSNEGWKLYQNLAVIYVDAGQLVGSGNSLVEAEAKISRREWITYDFLVILHTGLGNRDRIKDIWKSMLMTSQRMTSRNYICVLSSYLMCGQLKDAGEVIDQWQRSKAPEFDISACNRLFDAFLNAGFTDTANSFRELMLQKSCILTSRQERSS

SEQ ID NO: 168199 - protein, 57 aa, Oryza sativa
  Clone ID: PAT_MRT4530_66737C.1.pep
LTSSKRRVNTVEGQSRKGLSFFGNLAILWQQSYCNREIEGNRLNLQRKSVRKECRKR

SEQ ID NO: 168200 - protein, 971 aa, Oryza sativa
  unsure (1)..(971): unsure at all Xaa locations
  Clone ID: PAT_MRT4530_66738C.1.pep
MAPRKPNPASATGPDPGRINDDTTTFLGASLVDDNELAKLVSSGVVVEGQAFTPGKAVVPKPSDNWTVVFAVFFEAGLRFPCNVLLPEILRLFQVELPQLSPSALVRIAIFDWACWTAGFEPSAELFGAVFFATMNSKTAGSEVAKALRCRCRVIAPNRKPKFAVDGAMEAQFALLRKICSRLSCRDLVEEFCMLRIXPLSQSWQVAVDQDEEVDGLPKLVLPAGANSESMLFLCASVLRPLGDVSVTEFSQLLTRQAAGRVNRVYDGELPPRTNPLKADDAAGPSRKRMRGQVKSAPRKRRAPASTDSDADDEDTVEDNDDGEEGEDVGETEVAAEKAAEEAVDNRAGTPGYTPTSSPEHVKTGVESNCSPLRRKDVEGAKALVAIASAKVAKGGPVKKTSKKIGLVKVGRAFSDDXSSDETPTSPTSRSLGLSTVPSATIDAGGAGGSVAGTSASSDQVVKTATRVFXSPVRQPVVSPLGLGKGRKTAVETSVSDYSLAAPHFAPANFETRAELIPFVEGVSNLVFPAGSSSLFMELNEFDEGCSAIKSLAVRILAAHCSTEXTMRARLDSLKNRLRAKDDELGYKSLEMEGLAHTLKETKAENKRLQAELEKGSEAKAEIERLKAELKKEQTHSAALTDYYNLTEPKMEALRQEVSQAEANAEKEAERFAREMAKATESAKTACQTLCLALSDMGARVRGVPGEYASAFDFSEWTQQAGGAVSDCASAYGDCCARVSAAFTMGLLQQFGCENVAEFPNFAKGDWEVSAQDXRAWRKQFWQRDGRSTAKARLLEQLAKVEAADQGEGEDATAGEGRGDAEDHPEDIRRKLCVRPPFGNRRSKNEKFVAVKGLPKVRCPFRPVYREMIINGKSYKVLKVVGWMRAHPGRTLEDYDRVHIERREDMARFWRNHQRTDRQEAIAQRRYSLVCVPPPSLLRIVYDISSDDEPCSSNRSLGSGDCFGGGDVIYL

SEQ ID NO: 168201 - protein, 182 aa, Oryza sativa
  Clone ID: PAT_MRT4530_66739C.1.pep
MNSKTVVTLARTKKTAFGSVNFNVRLERSDLWLVNAAMSKWDRHWMAKWYYYSITFEAGSEAAKALRCRRRAIAPNRKPKVAVDGAMEARFALLRKICSRLSCRDLVEEFCMLHIFPLSQSWQVVVDQDEEVDGLPKLVPPAGVNVLTLDQADAEARKMIGDVSVTEFSQLLKRQAAGRANR

SEQ ID NO: 168202 - protein, 160 aa, Oryza sativa
  unsure (1)..(160): unsure at all Xaa locations
  Clone ID: PAT_MRT4530_6673C.1.pep
YDFAAGLPPQPPTGVFACTAGLLCRRSWAFTSSPXPACLRRRRLVSPRTWLAYYAAVGGHLRLHRRPAXFAAADWCLRVHGWPIMPLLVGVYDFTAGLPPQPPTVVFAGRLVRRRLVFPPARLAYYAAVVGRHRPPSSLPTGVFIVIDGXLCSHIGHLCH

SEQ ID NO: 168203 - protein, 697 aa, Oryza sativa
  unsure (1)..(697): unsure at all Xaa locations
  Clone ID: PAT_MRT4530_66740C.1.pep
DDAAGPSRKRMRGEVKSAPRKRRALASTDSDADDKDIVEDNDDGVEGEDVGETEVAAEKAAEEAADNRAGMPGYTPTPSPEHVETGVESNCSPLRRKDMERAKALVAIASAKVAKRGPVKKTSKRIGLVEVGRAFSDDESSDETPTSPTGRSLGLSTAPGTAIDAGGAGGSVAGTSASADXVVKTAARVLSIPVRXPVILPLGLGKGRKTAIETSVSDYSLAAPHFAPAYFETRAELIPFVEGVSALVSPAGSSSLFTELNEFDEGCSAIKSLVVRILAAHCLTERTMRARLDGLKNRLRAKDDELGYKSLEMEGLAHALKETKAENKRLQAELEKGSEAKAEIERLKAELKKEQTHSAALTDYYNLTEPKMEALRQEVSQAEAKTKREAQRFAREMVKATEFVKTACQTLRLXLSDMGARVRGVPSEDASAFDFSEWTQQARGAVSDCATAYGDCCARMSAAFTMGLLQQFGCEHVAEFPNFANGDXEVSAQDVSPALRAXRKQFWQRDGRSTAKVHLLEQLAEAEAADXGEGEDAAAREGGGDAEDHPEGVYSFRPFVRPPFGNWXNKNEKFVAVKGLLKVRCPFWPVYCEMIINGNSYKVLKVAGWIRAHPRRSLEDYDCVHIERREDMVCFWRNHQRTDRQEAIAXRHYSLVCVSPPXPLRIVYDISSDDEPCSSNRSLGSGDCFGGGDVIYL

SEQ ID NO: 168204 - protein, 114 aa, Oryza sativa
  Clone ID: PAT_MRT4530_66741C.1.pep
MAAEAALEPNQEFLEACMPSADDDIGWLHCERSATSRGCSTSRARPRVAAEEERCPCAALPFPGLPLRLRRRRAPRRTLRINLLYLYIGGFDVRVVASRSASSPSVSGSGAFAR

SEQ ID NO: 168205 - protein, 153 aa, Oryza sativa
  Clone ID: PAT_MRT4530_66742C.1.pep
MADAAAAAAAAAGVRPRKHPVVGTWRAASLKIPSLRSVHHAAVEARNGRNQAQGKSSLTRGRPGEDEEGDPCDGRRRPSPPPPIASTVGSVAAGVSRRSAGAEGEGRRRRKPRARSVESRKRNARPSGPRTFRLLPLVGRKKKARAARTRAAG

SEQ ID NO: 168206 - protein, 586 aa, Oryza sativa
  unsure (1)..(586): unsure at all Xaa locations
  Clone ID: PAT_MRT4530_66743C.1.pep
IKRRCNGWSWLLEMLNTAVITLIPKKDSPTLLKDYRPISLIHSFAKLAAKVMAQRLAPRMNELVPYTQNAFIRGRSIHENFIFVKGLVQQYHRQHKEMILLKLDISKAFDTVSWCFLLDMLKWRGFGAKWRLWLVSLFLTAETSILINGNESNPFKPARGLRQGDPLSPLFFKPSQQEAKVVKAILQIFGAASGLMTNYNKSAITPIQCSQEQLQVVANELQCNIQLFPIIYLGLPLSTRKPTKAEVQPILDKLANKVAGWKPKLLSPDGRLCLIKSVLMALPVHFMSGQQEVSGGHCLVAWKDVCTPVENGGLGIRNLELFGKALRLKWPANRLHQKDRPWTLVDFRLSADDEKIFQSASEFCVGNGRDTKFWSDNWLGGGSIAWRWPTLATFIGRTKLTVEQGLLGHRWVRDLQGSLSDIAMMQYFQLWDEIQQINLSQEEDTIRWKLTPDGSFSVSSAYDLFFMAREISPCGQLIWQTKAPSKVRFFLWLATKGKCLXRRTTWRREDGPMKITVYSANANRRIAYTCSSPVISPGEYGSCCEHGSMWIXSARTSGRGADXAGGWWHDAIFEAATGATLTAFSP

SEQ ID NO: 168207 - protein, 100 aa, Oryza sativa
  Clone ID: PAT_MRT4530_66744C.1.pep
ELNPWVQNSGNLNFSPAPPFLDRFYAEKKFSGFLYTGLLILPLTHRVEISPAREKKTPRLLEPKKTPGASNFSIGERPAMAFIPSIPRGRLTLSTGFPSC

SEQ ID NO: 168208 - protein, 227 aa, Oryza sativa
  Clone ID: PAT_MRT4530_66745C.1.pep
MEPAAEKREAEQEELQQQHDEPAVPSADDDEAEAEENERRNRELKAGFHPLRRRFVLWYTRRTPGARSQSYEDNIKKIVDFSTVESFWVCYCHLTRPVSLPSPTDLHLFKEGIRPLWEDPANRSGGKWIIRFKKTVSGRFWEDLVLVLVGDQLDYSDDVCGVVLSVRFNEDILSVWNRNASDHQAVMTLRDSIKRHLKLPHSYLMEYKPHDASLRDNSSYRNTWLRG

SEQ ID NO: 168209 - protein, 935 aa, Oryza sativa
  Clone ID: PAT_MRT4530_66746C.1.pep
MKGTLQLKSLQRQYAVENRLGQKPTPEVGSKKNRKGSELERKQQKQFTDQHDNNITRTPRCEASTSHPDRSAESSSYLGNQAGKKAKYRLDVAQEHRELTQAEYRLRMGLKRRLLGFAVIERARKKQAARITNIKEGDANTKFFHRKINARKRKNHIHRLKKQNGWAVTHAEKELVIAEHFQHVMGQPEPRSCDLNWPELGYTPLDLSGLDDPFTEAEIHKAIKEMPADKAPGPDGFTGKFFKSCWGIIKNDVVAAFNALHDARNKHFSLLNSANVVLIPKKEGVEGIEDYRPISLVHGFGKLFYKVLAIRLRPLMHSLISMNQSAFIRGRSIHDNFMYVRNMVRKHHRTKRPILLFKLDISKAFDSVRWDYLLALLQNIGFPPKWREWITGLLSASASKIVLNGTPGEAISMAKDYGVISKLRGRAVRFRTSMYADDAAVFINPNKENVQAFTDLLGRFGQATGLCTNLQKSHVAPIRCENLDLDDILHDTPTTRANLPLKYLGLPLTTGRLRKVDLQPLYDKLMSRIAGWRGKHVGLTGRSTLVKVVLTSQPVFLLTGLKASKESLEVLDKQRRKFLWAGEEALTGGKCKVNWTRTCLPTASGGLGILNLEKFARALRLHWLWHEWKSSEKAWVGTGTPCDDTDKLRFAAATFITIGNGEKTSFWDSAWWEGRRMKDVAPLVYAASKKKNKTIQHASQANQWLLDLDLPGTAGWTTDLIDQLVGVWSAIQALHLVEHEEDNITWKLTNHGEYTAASAYNAQLLGTTATNFNRLIWKAWAPRKCKTFAWLIIQNRVWTSDRLATRGWPNGSICPLCRRTQETALHLLAACRYTRRVWAALAEWATCEQLNPSQWRQTSTVLDWWEATANIQETPKKALRTLMLLVAWEIWNERNRRTFQQKELSATSLLAKIKEEAKTWVLAGAISLNSWLSFS

SEQ ID NO: 168210 - protein, 137 aa, Oryza sativa
  Clone ID: PAT_MRT4530_66747C.1.pep
MGGSASSGGAAWAVGTRGQRWAAACHQAWPRGRSARTAVRKGWRWAEKIDPDPLRRPRLFCSWSSGLQERSISLVLSSSSSNNGTSLARSSSTESAPVFAATAVDLGASSPDLLLLRSSPSPGSCRGNSADHDSSGG

SEQ ID NO: 168211 - protein, 121 aa, Oryza sativa
  Clone ID: PAT_MRT4530_66748C.1.pep
KKKKKKKKKKKKKKKKKKKKKKKKKKKKKKKKKKKKKKKKKKKKRGGHLHNKNTPAWGKPAASFLDRATKKKSSSKALNVLALLNAWAVQKTAAAEKTRLRARTCKKNFLHLRSLKKLLNL

SEQ ID NO: 168212 - protein, 72 aa, Oryza sativa
  Clone ID: PAT_MRT4530_66749C.1.pep
VRKATKYGIAGKHPFGTVSVPFPLSEHNPVVANSSRWWHANHLQLSRTINHCSGPSASQLTNSHASLVIFYI

SEQ ID NO: 168213 - protein, 107 aa, Oryza sativa
  Clone ID: PAT_MRT4530_6674C.1.pep
PERAPKNVSRYTFTFLTKRVNAVLSFRTTRVRVPLARNPSPLQHPTLYVHEYSVRSLLRQPRSALEAGPSEAHAISFVHTSRPRLHRKGYTFSSFSALTKGIMGNQA

SEQ ID NO: 168214 - protein, 105 aa, Oryza sativa
  Clone ID: PAT_MRT4530_66750C.1.pep
VTTGDQAAAVSPLAIRVAVSPAIRAAVAIRRRRPDAPTSIPVISPRHSRRRLSPSFAPSFPLTIRHRRSDAPSAFPVIRAVDFSRVFRRFSRLARIRRSRRLHSL

SEQ ID NO: 168215 - protein, 135 aa, Oryza sativa
  Clone ID: PAT_MRT4530_66751C.1.pep
MDEHKAQVGVREVQGVYAIELGAKRVPLPLVGEYLYSHPPKLAVGGEICQSLCSAGLTGGMRPVRPCYSATARKLAVVVLSEGPIGLAGQTGVEWAVRPASARSDRHRLGLTEYGSVGSVSATPSSTIPASRGPV

SEQ ID NO: 168216 - protein, 105 aa, Oryza sativa
  Clone ID: PAT_MRT4530_66752C.1.pep
MWPDLTEAATSGGIGKMRNPGRSSLTRGKEKEQIGPLVHPSNRQFIGLTAGAIIYLLHVRQNRTSCERLQFGGPNCERDTGSHLVVDVASSGQMTNHRTVKALRA

SEQ ID NO: 168217 - protein, 118 aa, Oryza sativa
  unsure (1)..(118): unsure at all Xaa locations
  Clone ID: PAT_MRT4530_66753C.1.pep
EGEKHFIRGGIAQDLRTDGRRRVEIQAISAETGAIPQAYGSAXRVRLGATEVIATVKAELRKPSILHPDQGKDSIFDECSPTAAPMFEGRGSEESSAELCVALQRCLLRGKSGAGAAI

SEQ ID NO: 168218 - protein, 551 aa, Oryza sativa
  Clone ID: PAT_MRT4530_66754C.1.pep
MKYVSGPYFEPDFDPLLYRFGTPGVVVDNETREDCTLVKVDSVNRDGVLLEMVQLLTDLDLVISKSYISSDGGWLMDGKNTTSFGSLFHVTDQMGRKLTDPSLPEFIQRALVPCQRPGGNGPSPRFTTCLGNVVGPGGPDVSDCAALEFTVHDRPGLLSSITQVLADNGCHVASGQAWTHSGRAAGVLYVTTAGGGAAAEAAAPAPSRWEHIEGLVDAVMGAREKLTGERHWVSMSAPVEGRVHTERRLHQLMHDDRDYESGPAATPVDEEHFSMGDKAATTARLARRVETRVSIESWEERGYAVVKMTSRDRPKLLFDTVCALTDMHYVVFHATVGSQGPLAIQEYYIRHKDGRTVDSNAERQKVSRCLVAAVERRASHVRLIIAILHFSPVGYSYARRHGRSLTMFPQGAKVEVRAADRSGLLSDFTRMLREHGLSLLRVELKRRKDEAIGTFYLVTDAGGEVRAEALHAVRARVGKVGISFEVAKDAPGWPPVRKTSVPAPPAEAAPAVATPAAPPAAEGQERPRSSLGSLLWSHLGKLSNNFGYIKS

SEQ ID NO: 168219 - protein, 111 aa, Oryza sativa
  Clone ID: PAT_MRT4530_66755C.1.pep
MTVVTVGMVGNTLQPSLGANPHCPEETLHPAAKRGVRPNHQVRPNHQCAQLEGIGQWIDISLKEECRRASRYAGGHVLACIQDRRSQMYLRFLRGGFRRSRLSADEIDQLA

SEQ ID NO: 168220 - protein, 53 aa, Oryza sativa
  Clone ID: PAT_MRT4530_66756C.1.pep
MASTYCFLHQFTVRVDVSVDSTYLGKRTHLLVCRAQKHDDADVSRRAELALVD

SEQ ID NO: 168221 - protein, 129 aa, Oryza sativa
  unsure (1)..(129): unsure at all Xaa locations
  Clone ID: PAT_MRT4530_66757C.1.pep
MGRLGWLRLASRSLALRSGEVAAQGSKWIRHSTPCSSSGIYIGDKCYGRFMLTSFTLSRSFHATGQHSSPEKDYYKILGVPKDASQEEIKRAFHSLAKRYHLDTNRGNTAXKRTFQEIRDAYETLRDLS

SEQ ID NO: 168222 - protein, 228 aa, Oryza sativa
  Clone ID: PAT_MRT4530_66758C.1.pep
MSGRSSRRGSFSLRQPPVVDIGCNCRRPKLFSIFSSSSSSSFRRGGSKPKSPNASSTSTTTAFTATTGGAGTATSTDSSWGPASFTTNSLFEEPAAAQQEQEQLETRRRRRQQRRRRRRAGATSFARGGDVGGHDDEQQQLQEQAPYRRVAKESVAVAVESAEPYEDFRESMVQMVVEKEIYAWDDLNDLLHQFLSLNSPRHHPLILHAFADLWTRNGLFSPPSPCQF

SEQ ID NO: 168223 - protein, 34 aa, Oryza sativa
  Clone ID: PAT_MRT4530_66759C.1.pep
PCVLISYGICRALALVMSLMWLSLNGLIRSTTRL

SEQ ID NO: 168224 - protein, 126 aa, Oryza sativa
  unsure (1)..(126): unsure at all Xaa locations
  Clone ID: PAT_MRT4530_6675C.1.pep
DIATPHFKEKATKETIQPTTTWWANFGDSNLNRLVEEWRRTSASKPRANACGRRRLPPGSTLAAICRSVVCKXIKKKKKIKKKKKEKKQRNRGXKKKMEKKAGGRKNKKKGKKKEKKRNKKKKKKK

SEQ ID NO: 168225 - protein, 62 aa, Oryza sativa
  Clone ID: PAT_MRT4530_66760C.1.pep
RDFEDRVHRCYYASSTSVHGLILFGIYSSVIATKDQHVSNCAVNPPSHLKSPQLGRGSIGRI

SEQ ID NO: 168226 - protein, 346 aa, Oryza sativa
  unsure (1)..(346): unsure at all Xaa locations
  Clone ID: PAT_MRT4530_66761C.1.pep
MSSNVLSGVVPLGSTKLAETLQWLDLSVNQLTGGIPAEMALFMNLRYLNLYRNDLRTQLPPELGLLHNLTVLDLHSSGLYGTMPSDLSLGHNSLTGPILVGISELNKLEILRLEYNNLSGIESLLAVNVSHNRLVGRLPASGVFQSLDASALEGNLGIXTLLNISARRRASDGGTTPEKELESIVSSSTKSSKLATGNMVTFGPGNSLLRSEDFVGGXDALLSKATEIGRGVFGTVYHASVGEGRVHYNVKPSNILLDEQCNPMIGDFWLARLLPKLDKHVMSSRFQDGMGNVAAELACQSLRINEKCDIYGVFGVLILELVTGRKAGGERDKGERQREEGGRREG

SEQ ID NO: 168227 - protein, 83 aa, Oryza sativa
  Clone ID: PAT_MRT4530_66762C.1.pep
PFFQQKNRYCPWGFLKNLLPPSKRAPPLLNPPQGRLNNPPRGGPKKVGNPEIPTSGPAIPHGGFPPLVFLKTPPQKSPFPIFF

SEQ ID NO: 168228 - protein, 1013 aa, Oryza sativa
  Clone ID: PAT_MRT4530_66763C.1.pep
MATPIALLLFVLVVAAAADSTMPMPVNEEVLGLVVFKSALSDPSGALATWTESDATPCGWAHVECDPATSRVLRLALDGLGLSGRMPRGLDRLAALQSLSVARNNLSGELPPGLSLLASLRSIDLSYNAFSGPLPGDVPLLASLRYLDLTGNAFSGPLPATFPATVRFLMLSGNQFSGPLPQGLSKSSFLLHLNLSGNQLSGSPDFAGALWPLSRLRALDLSRNQFSGTVTTGIANLHNLKTIDLSGNRFFGAVPSDIGLCPHLSTVDISSNAFDGQLPDSIAHLGSLVYFAASGNRFSGDVPAWLGDLAALQHLDFSDNALTGRLPDSLGKLKDLRYLSMSENQLSGAIPDAMSGCTKLAELHLRANNLSGSIPDALFDVGLETLDMSSNALSGVLPSGSTKLAETLQWLDLSVNQITGGIPAEMALFMNLRYLNLSRNDLRTQLPPELGLLRNLTVLDLRSSGLYGTMPSDLCEAGSLAVLQLDGNSLAGPIPDNIGNCSSLYLLSLGHNSLTGPIPVGMSELKKLEILRLEYNNLSGEIPQQLGGIESLLAVNVSHNRLVGRLPASGVFQSLDASALEGNLGICSPLVTQPCRMNVAKPLVLDPNEYPHGGDGDNNLETSGRGPASPRKRRFLSVSAMVAICAAVFIILGVIVITLLNMSARRRAGDGGTTTPEKELESIVSSSTKSSKLATGKMVTFGPGNSLRSEDFVGGADALLSKATEIGRGVFGTVYRASVGEGRVVAIKKLATASIVESRDDFDREVRILGKARHPNLLPLKGYYWTPQLQLLITDYAPHGSLEARLHGNGDGAFPPLTWAERFRIVAGTARGLAHLHQSFRPPMIHYNVKPSNILLDEQCNPMVGDFGLARLLPKLDKHVMSSRFQGGMGYVAPELACQSLRINEKCDIYGFGVLILELVTGRRAVEYGDDDVVILIDQVRVLLDHGGGSNVLECVDPSIGEFPEEEVLPVLKLGMVCTSQIPSNRPSMAEVVQILQVIKAPVAASSARIEAF

SEQ ID NO: 168229 - protein, 329 aa, Oryza sativa
  Clone ID: PAT_MRT4530_66764C.1.pep
MSGGGEVSGRAPRLPRWTRQEILVLIEGKRVVEGRGRGRGRGGGGGAAAEPTKWAAVAEYCRRHGLERGPVQCRKRWSNLAGDYKKIREWERSLSSPSSSSAAAGMGKEVSFWAMRNDARRERRLPGFFDREVYDILEGRGGGNAAAAAAAGKEGEEEKAAVFDSGRAAAGGGGGGGDDGLFSSSEEEEDDDEATPPATTPAAAPAPPPAPAPAVPVLTSEKKSDPPRQDASEQAGTSRAKQPEQIVEDSPAQGAHKRQRSDDASGEAPDLQGQLIEILDRSSRMVAAQLEAQNINCQLDREQRKDQVSSLLGVLGKVADALYRIADKM

SEQ ID NO: 168230 - protein, 68 aa, Oryza sativa
  Clone ID: PAT_MRT4530_66765C.1.pep
CPTGYCVIILTYHTDLAVTLNQTQGDIITTNTYFYRGWGRPGSSAAAPNWLITDHHGGRAPRGGWTPS

SEQ ID NO: 168231 - protein, 122 aa, Oryza sativa
  unsure (1)..(122): unsure at all Xaa locations
  Clone ID: PAT_MRT4530_66766C.1.pep
FFQVSGVCPLQNTILFTIIHQSQVKQSLLSSVLQLYTYTIRTELIWIPHTTNQLLQTTDTGNTRDNKEEQKIKRRNGNVKSTSQGHRPKNISDLKSQPKHQISNKPALKIPESXTITAYMXX

SEQ ID NO: 168232 - protein, 35 aa, Oryza sativa
  Clone ID: PAT_MRT4530_66767C.1.pep
LDGSPTWQNLLGFQSCSTGHCHPGLQRASPPNPIT

SEQ ID NO: 168233 - protein, 63 aa, Oryza sativa
  unsure (1)..(63): unsure at all Xaa locations
  Clone ID: PAT_MRT4530_66768C.1.pep
EVRLRFXGLXXXXPNVKSRCFXXGFAWAXKNRFFKGAFLPXGXIFXXKFLTXGEPXGXPXFXF

SEQ ID NO: 168234 - protein, 61 aa, Oryza sativa
  Clone ID: PAT_MRT4530_66769C.1.pep
WCWDCGHASKIDGRWAMQRWHITCGIHGPCANCAKLLLALWLVVDQTLVTCTLVIRCCILS

SEQ ID NO: 168235 - protein, 71 aa, Oryza sativa
  unsure (1)..(71): unsure at all Xaa locations
  Clone ID: PAT_MRT4530_6676C.1.pep
SIPLTGVHRRSGXQVSGTSAFDVQHRERAVIRFLGSALHDCSLFVHNGSTSSSLACCASSSTAATASSSGT

SEQ ID NO: 168236 - protein, 76 aa, Oryza sativa
  Clone ID: PAT_MRT4530_66770C.1.pep
EDWTRMWNRLKEVERHFEYQYPSQNDDAVQMIWKAIARKAPSIRLKVNRLRRFSRFETNRTDETPTRSSWLENQPS

SEQ ID NO: 168237 - protein, 59 aa, Oryza sativa
  Clone ID: PAT_MRT4530_66771C.1.pep
MAKFAAQLKDRFLGLVERVAGCGRGAGDKGVKEPTKLSTVQIYLEMGFHNLMKLSDFYP

SEQ ID NO: 168238 - protein, 609 aa, Oryza sativa
  Clone ID: PAT_MRT4530_66772C.1.pep
MEMSLGGDALAVYALATLFNRKKKLQHDNNGSHDLEVVWAPILLMHLGGQMFITAYNIEDNELWRRHILTALSQVTVAIYVFCQSWSSSADRRLLAAAILLFIVGIVKCFEKPMSLKAASFNELVSSNYDAELDIVVNREEMLESFVNEAKALLQRSDHSPPASQQGTREEISSPEFDVPTMLFVDFAYPYSDRLDNLKYFFTLDLTQVCKTINSGLSSIFDILYTRNKIDSEQPDANRYCWLSTWMLAILLVIPAVGLLHSSHKQAYSHNDVIVTFLMAYGTLLLEIISMAVVWKYLDVLPNTMAQQSLVGFFTRNKRHAWLISIAGCLQCKGLLDQYWCMNLCDMSTDITNLVHNYVKDGWTKYIETPRATGVSMTTWDSGHLMMSRAISNYIMHLLFANPEMLMAGSRSNLFTTAYRELDSILHKEKNLPVDDEEKLTLKVIEKVEHKRNCFIHDAFRLARDLLLARGYKKMWDVIIDVWVEMLCFSAGRCRGYLHAKSLGSGVEYLSHVWLLLAHAGMETFPEMLQRRQLFHLPTEEPEDEREDGVIGPSDSQGSKNPHNLKEEGGHGVAPTDTSQGAESRKEKQDQHVAPSAPQGDIVVPPATE

SEQ ID NO: 168239 - protein, 59 aa, Oryza sativa
  Clone ID: PAT_MRT4530_66773C.1.pep
YLTKRRSVFKATYRASWRIPGSQIEMNDHEFGHYRASKRLPHMTSGTRTANSRDNSDFY

SEQ ID NO: 168240 - protein, 72 aa, Oryza sativa
  Clone ID: PAT_MRT4530_66774C.1.pep
EKGIPKLFKIGKNKGALKVAKKKFGPPKRAKKKKKKMGGVPKKKRFGGGPAPPKKKKKRISKFIKSTAKMFC

SEQ ID NO: 168241 - protein, 50 aa, Oryza sativa
  Clone ID: PAT_MRT4530_66775C.1.pep
YCISFSLGPLVPFSLIVYWMPGIAVFTSVARVKNLSIWYQSKLHKYLCND

SEQ ID NO: 168242 - protein, 208 aa, Oryza sativa
  unsure (1)..(208): unsure at all Xaa locations
  Clone ID: PAT_MRT4530_66776C.1.pep
MATSPAAAPPRRVVICGGGVVGACTAYFLSTHAASPTVPTLVEKSSPACAASGKAGGFLALDWCDKTPALSALARASFALHRRLAATLDGGSAYGFRPVHTLSICLPTDPDPAAAAAAAASPLLPAWVDPAASAAPPRELGTTDTTAQVHPGFFTKAVLAASGAEVVIGEAERVVVRDGRVAGVCGQGPRXVDADAVVLALVPWSEVR

SEQ ID NO: 168243 - protein, 179 aa, Oryza sativa
  unsure (1)..(179): unsure at all Xaa locations
  Clone ID: PAT_MRT4530_66777C.1.pep
RFALAAARHLPXPHTTPXHQIHHHHHHHPSSPSSXSLPSPQPPPPPPRRRAPRGRRGGKTSQSSRPPSSTAAAPTATTVAVGVTSSQASVTAGPGGEEDGIEPRDDEESERVSVLGLRRRCGLGEGRSSGWSAEYGDAGAENGGDCVRRRRRRQRWPLVHGCGCRGSPADSASICRWFV

SEQ ID NO: 168244 - protein, 61 aa, Oryza sativa
  unsure (1)..(61): unsure at all Xaa locations
  Clone ID: PAT_MRT4530_66778C.1.pep
IIFPRDXINTIPLEYSRVKCYNGISVRLRINSVTIIYXEYFCAIAGNYTFSNVIKKYQYRP

SEQ ID NO: 168245 - protein, 88 aa, Oryza sativa
  Clone ID: PAT_MRT4530_66779C.1.pep
DNKGEYITYSQVYGNMQYMIHGFKGRLGFICIKAFANLNTINGYKFNLNNICNHGIFNQPTNPKRILRPHRTTQLYSLIYPDTALSQK

SEQ ID NO: 168246 - protein, 227 aa, Oryza sativa
  unsure (1)..(227): unsure at all Xaa locations
  Clone ID: PAT_MRT4530_6677C.1.pep
MAFLLGAFLGLVLGVAVVMAFARLENTRAEQRRELAATVSSFSKLTVEDLRKLIPLELYPSWVSFTQKQKLKWLNQELVKIWPFVNEAASELIKTSVEPIFEQYKSFILSSLHFSKLTLGTVAPQFTGVSILDSDSSGITMELELQWDGNPNIVLDIQTTLGISLPVQVKNIGFTGVLRLVXKPLVAELPCFGAVCCSLRERXKVDXTLXVIGGEMTXIPGISDAIE

SEQ ID NO: 168247 - protein, 117 aa, Oryza sativa
  Clone ID: PAT_MRT4530_66780C.1.pep
MTSKFPDAVILIESVSKSPNFQMQTSSRVGDARSCAPAHGGPAGLAANMAVWWAGVRRLRRGKRRRRAAGDGEGLASGRPGEIVGCYGRMQRAAHIVWPIKGILCGISSLWFPLFVA

SEQ ID NO: 168248 - protein, 41 aa, Oryza sativa
  Clone ID: PAT_MRT4530_66781C.1.pep
LFERHTNPITMTHSKQRPNARQHLEYRGLQRPPLPLPIFKG

SEQ ID NO: 168249 - protein, 100 aa, Oryza sativa
  Clone ID: PAT_MRT4530_66782C.1.pep
VRMKAICVLEAIVRKQDTDPYSIITSYFCENSASVVRCCELPHVSLREKASKVLNLLVGEQPTGSNNFSETKTTVPAAQMPDLIDTGDQDDPGAQNSAQE

SEQ ID NO: 168250 - protein, 503 aa, Oryza sativa
  Clone ID: PAT_MRT4530_66783C.1.pep
MQPLAAGGGVSWPLYAATVAAALLVTAIVLRLAARSTAAACKARPPAGSLGWPLVGETLQFISAAYSSRPESFVEKRCRRYGKVFRSHLWGSPAVVSADAEASRAVLQSDASAFVPWYPRSLMELMGESSILVLGGALQRRVHGLAGAFFKSPELKARVTADMRSRLAAAMDAWRATAATGAGAAVRVQDEAKLIVFEILVRALIGLEQGQEMNYLRQQFHIFIAGLISLPIKLPGTQLYRSLKAKKRMTSLIQNIIQEKRRRIFEGKDLCAVSRDLIDVLMSNGSDELSLTDELISDNMIDFMIPAEDSVPVLITLAIKYLSECPLALQQLEEENMELKRQKSDVGETLEWTDYMSLTFTQHVITETLRIGNIISGIMRKAVRDVEVKGQGDVVIPKGWCVLVYFRSVHLDANIYDDPYAFNPWRWKERDMAAATANSGSGFTPFGGGQRLCPGLDLARLQTSIFLHHLVTNFTWVAQADLVVNFPTVRLKRGMPIKVTPKT

SEQ ID NO: 168251 - protein, 102 aa, Oryza sativa
  unsure (1)..(102): unsure at all Xaa locations
  Clone ID: PAT_MRT4530_66784C.1.pep
LLTRCSFGMTPLSEVXRRSTSTVIHGNRNRTAHVIDLRASSEVDSIALFDRXFDASPTWRANCRNMNSAIIKRGSARDLKVDGCRDKGFRQVQALSMRGNTL

SEQ ID NO: 168252 - protein, 105 aa, Oryza sativa
  Clone ID: PAT_MRT4530_66785C.1.pep
MAFGVGRLPHPNQMEKKRKLYQIDEACALIKRIQTVRDCSSKYPTAQEPTALCRLMVSTCAAAMCLEQRRRKGGTSAAAAAAAAVVGGARCRPSVRERSGGRRPA

SEQ ID NO: 168253 - protein, 849 aa, Oryza sativa
  Clone ID: PAT_MRT4530_66786C.1.pep
MAARDKRINGGLQGFAVSSSSKKEKGIRILDAPAPPEIPTRRAGFSFGVGDGEEAEEEVVLAPSSALARARGCDVYVGYGGGGGGGAAAEVERFVAWLCAEMEALGVRCVAADRRRCRDAPSHAAARAAMDAVVAGVVVVTPASLGNPYCVDEIRAFVEKGRLVPVFVGLGKGDCRAEDVVEKRGDLWGRFGGHLWKVYDGGERDWREAVGALSRADPAVEVDAASQRHRLIDLLEIVGSRLGRRAVTDAVRSWRAAAAVHPELPFARNERFVGRESELLDLEAVLFGKRPMHLVEVEVFCGEPAFMDGVVCISGASGAGKTELVLEYAHRHAMEYKKVLWVRGEARYLRMGYLKLADQLGLAVGDDLSLIAAGDRRSSGSKKAEKEWIFRGLESDAIAKIRKELTREIPYLLVIDNLESETDWWDSRDVQDLLPGAVAGAAVRSHVIITTTRLRRLQRVRTFSLAPSMESPEAMLLMTRNGALAFHGEEDTIALRAIQQKVGSIPLALALVGAVLSELAVSPAELRQAMNDAPYRAPTWEENDAPALRDNPGMVQLLDVCFALLDEEKDGLGEAAVRMVETSSFFAPSPIPVALLAAAMGGEPKRPLWKQMKLALRLSCSSSRRALDKDSSSRRRAAAAAAEPEALVALLRLGIARRCTTQPAPCVSVHRVFRLFGRKAVGSGEAAARSTVRAITAAEVHDEHAWAACMSVFKIAPAIAANLPTKELPQFVTHVAVPLAARGVVAHSAYAAVTDLLVESSNVVRGEESRYVASGGLDENPALYHELAHSRAQLLKLRAKLMLRGGEFTLAEDHSLAVIHILEVVAGDDDPETEEARAALDRVLQVQPE

SEQ ID NO: 168254 - protein, 142 aa, Oryza sativa
  Clone ID: PAT_MRT4530_66787C.1.pep
MEDQAACDGLRRFGGHLWKVYDGGKWDWREAVGALSRAESAVEVDAASQRHRLIDLLKIVESRLGRHAVADAVRSWHAAVAVRPELPFTRNEGFVGRESELLDLEADLFGKRPMHLVEVEVFGGEPAFMDGKECHGSTKIML

SEQ ID NO: 168255 - protein, 84 aa, Oryza sativa
  Clone ID: PAT_MRT4530_66788C.1.pep
MAGAGECSSVRTFFLSRLSREAKILQSPGLIILMRSVQFVASQTVEFVQDLAQQYSAELSPVLFGDGDCFLVYVQRYFINSCAE

SEQ ID NO: 168256 - protein, 596 aa, Oryza sativa
  Clone ID: PAT_MRT4530_66789C.1.pep
MAGGEGGGAAAVPEEGRSLALTPTWSVAIVLTLLVAGSLLIERSIHRLSYWLKKTHRNPLHKAMEKMKEEMMLLGFISLLLAATSRIISGICIDSKYYNSNFSPCTREEVEESIKIKHAVSSARKHLIEVILHHAARRNLKARYHHNQSCAEGYESFVSHEGLEQLHRFIFVMAVTHVTYSCLTMLLAILKIHSWRKWEDEAFRDNHESFSQIAYISATRRQPALGRSYSFRSWSENNAIKCVFCFLAQFGQSVVRADYLILRKGFIMTHNLAPTYDFHDYMVRSMEEEFEKIVGVSGLLWGFVVAFMLFNINGSNLYFWIAILPVTLVLLVGAKLQYVIATLTAEGAKMNAYGPRIKPRDDLFWFKKPEFLLWLIHFILFQWQFGYDSCFIKNHLIVYCRLILGFAGQFLCSYSTLPVYALVTQMGSKYKAALIPRRIRETMHGWGKDARRRRKKHRGGDDSTIRTETSTVCSLDDDDGDDEHGQFVETTPSRPYLKIQLQPLRSGGGSARPGTPCHPGVVGLPPLHSVSTQGSSHPMLQRQASSLSAPSSPSPRGGGMTRSMSMPGFASLTRTPGGSCPGTGAGTPTRLSDARN

SEQ ID NO: 168257 - protein, 565 aa, Oryza sativa
  Clone ID: PAT_MRT4530_6678C.1.pep
MAFLLGAFLGLVLGVAVVMAFARLENTRAEQRRELAATVSSFSKLTVEDLRKLIPLELYPSWVSFTQKQKLIQLKWLNQELVKIWPFVNEAASELIKTSVEPIFEQYKSFILSSLHFSKLTLGTVAPQFTGVSILDSDSSGITMELELQWDGNPNIVLDIQTTLGISLPVQVKNIGFTGVLRLVFKPLVAELPCFGAVCCSLREKSKVDFTLKVIGGEMTAIPGISDAIEGTIRDTIEDQLTWPNRIVVPIVPGDYSDLELKPVGLLEVKLVEARDLTNKDLVGKSDPFAVLYIRPLQDKMKKSKTINNDLNPIWNEHYEFVVEDTSTQRLTVKIYDDEGLQASELIGCARVDLSDLQPGKVKEVWLDLVKDLEIQRDKKRRGQVHLELLYYPFGKQEGVSNPFADQIQLTSLEKVLKTESNGFDVNQRKNVIMRGVLSVTVISAEDLPPMDVMGKADPFVVLYLKKGETKKKTRVVTETLNPIWNQTFDFVVEDALHDLLMVEVWDHDTFGKDYIGRCILTLTRVILEGEFQDEFVLQGAKSGKLNLHFKWTPQPIYRDRDRDQ

SEQ ID NO: 168258 - protein, 114 aa, Oryza sativa
  unsure (1)..(114): unsure at all Xaa locations
  Clone ID: PAT_MRT4530_66790C.1.pep
AAWRRRQQPRPPLRRIQLEGRRRATGGRRRRKGSAAAGAPSPPLDLAGGEAGGGGXRVAAAPSPPLDLAGGEVGGDRRWAAAAAHGDDVFCEFVDEFVVEYVHYVMSIYFGGDL

SEQ ID NO: 168259 - protein, 76 aa, Oryza sativa
  Clone ID: PAT_MRT4530_66791C.1.pep
NKNSCWNSCIQYFIKPKRGAKINRVNISVFIQSRAPLGGHTIASWCDEPILFAQQLKYVLKNPSPFCNPKFKQTKG

SEQ ID NO: 168260 - protein, 451 aa, Oryza sativa
  unsure (1)..(451): unsure at all Xaa locations
  Clone ID: PAT_MRT4530_66792C.1.pep
MEDEAALERATVCCGLCHGSGTHRHTCSASPFRRTGNSWWMERYMRGSKKMYVTRPLSRYLDNPEAAAEPLPEGPGSGFLIVEDEAAVERATVCCGLCRDPKVHTLPFPQSRRLDVGEDDIVLFVPVVGEPLSAGRYYVVKAIGHHAGKVLACSREEDKTRILFFSFVDDAPPRPFHHGDIYQQVEVVAVAQASHWLRGFKAVAVAPDGIPPSLLRRKGWEVSKAMRTSYDGLNDDAHGIDWPLRRQMPDLDGFGIGAGGSPATVVGKWYCPFMFIRDGEQRLKDQVKRCRFYEMTLEQSWEEIYRCDNTHRGSISGKPPDEIKVNVTVRRSTALLGGTGAVVQEGGPQVVDGVMWFRPAAPPTNSGVAGGVGLDMVVWEKMKWELERGGWVAGNGDVESSRGVERGEXAGHWDKFGCYLLLESFVLRRMDGSVALTCGFRHTSKITTKWV

SEQ ID NO: 168261 - protein, 115 aa, Oryza sativa
  Clone ID: PAT_MRT4530_66793C.1.pep
MDQAALWSNKDTSQFTVRCGGEGAQRPAGRRPPLRLYPWPPSASGQDRQEVTLLRLLPPCLVAVGSRSAAVPPSSKVVAVESRSAASPLDHLLGIKNRCEKALSLPLPRGMRMEN

SEQ ID NO: 168262 - protein, 66 aa, Oryza sativa
  Clone ID: PAT_MRT4530_66794C.1.pep
MVTRWSEKGPGLKILWIWTLGTAGIMITNVVRTRVNDMQKILQEEDEAAAAAAPMASGERVLKDDE

SEQ ID NO: 168263 - protein, 101 aa, Oryza sativa
  Clone ID: PAT_MRT4530_66795C.1.pep
MYGKTMRRHTKVYRNGILNFINAAEEDRKRRNNDCMCCPCADCKNENMFYSRVDVHANLIQRDFMKGYTCWVKHGDQGSRSGAQNLEHEDHEHESGSGAQN

SEQ ID NO: 168264 - protein, 75 aa, Oryza sativa
  Clone ID: PAT_MRT4530_66796C.1.pep
TWIIIRERSGTATTREQTHTHLISCHFYLINLVIDRSIDKTLVRIFLFCGQIFLIPPKKQSESSLPAPGPASNRS

SEQ ID NO: 168265 - protein, 91 aa, Oryza sativa
  unsure (1)..(91): unsure at all Xaa locations
  Clone ID: PAT_MRT4530_66797C.1.pep
AVASAYIDEASAAGRALAHGARFMSKHGRVTYETLTEPEPKPTPAPHPXPTPNPEPTPEPXPNPAPEPASKPXPKPEPRPEPKAEPKPYPE

SEQ ID NO: 168266 - protein, 168 aa, Oryza sativa
  unsure (1)..(168): unsure at all Xaa locations
  Clone ID: PAT_MRT4530_66798C.1.pep
IDVILYAFRNGRWTSFFPLRFCMTSLNPRNXDKLVGHVGIYAEDYNVGDLLXLLGQLKDFISHVRRSSEFLGCTDFPKVVEIMVKSGMHRSXRLVYRLTELTSILPVXITASVERVFSATSLIKMDLHIKLGDEWLNDLMICDIEKEIFMSIDNEKTIIKQFEEIKKT

SEQ ID NO: 168267 - protein, 144 aa, Oryza sativa
  unsure (1)..(144): unsure at all Xaa locations
  Clone ID: PAT_MRT4530_66799C.1.pep
MLLWLLFSDRLNTRDMLDRRHCAKEDDDLTCVVCNGECRETRLHLFSAYPSIRCRQHLGIEWKHNLEFFPTVVLVRLRFGRRGFLEIFFIASXYIWKQRKRLIFQNILPMFQSWRLLFVNEVLLHMCRMKDPLKQSVFDWLQTL

SEQ ID NO: 168268 - protein, 917 aa, Oryza sativa
  Clone ID: PAT_MRT4530_6679C.1.pep
MLRQPASTSGDVDRIANRKHRHIVPRRSTEKKNPHNIQFERQVAALEYRQEEQRKRANGGRLFFTLSLSSHLVENGDELETSASPSLLLFHFNDPEDLARCLTSSRALLEDSQQSDKAPDNDFSVNTFSNASVDVKQTSRKKSKKKNKRHKRVHGKKVSEASDTQSMQSKGASHCIDVAGGESLTLSSNHVAHAGSEMRCRKETFPSMADGGETLTLPPNHVADKLFGDLSSDSSVREVSAERPDSETGNDGSFITLISSTSCSDEIELSRHASYFECCEQSNSNNSRCLDSASTSTLTDSSLDGHYTDSSWNFSDDTENLLIDKNECPPCVQSKVTDIRGSKCGGSEGWLNKANHDKFSCFRNSADACSGTQEMQSCSNASSDGDFLPVISRKRARKNRKVQPLGGCNVEHICGVEHGQSGKQSKISSRPSNSCTQVASKDSTKDFIHPIKVRTWTPHEVTLNDYMIGANMNHLQDPKQNRRGKPHKYSRLSEAANGGFIEEKSACTAKMLPGITHSTETGVGQIASSSASDVTVREISEEICTPIGPVQKGGLQILFREENVVGTGSLDVLNHVSSVDSEEQKKVDNAVMSRSHCMEGHHLQSQDSGSQFPGCTTDYWKTSRPTESGLEVGYHGVSAFEGRCNTNQQRSVSSKLQLGEMIKAANDACKVQGPASWQLTISISDIGCLLEKCVGMCKNNLDHKFDSDDDFLLSQPNGVYLPKPSLSVQGHGEPLFEYFESEHPSSRPPLFEKIKQLTSGENLSTCQIFGDPKMLENLKLHDLHPASWFCVAWYPICRIPQGNCRAAFLTYHSLGKVVPQIHSPDKADEPTHLVCPVVGFWSYNDKGEQWFQLRNPEIKPMSLDVGPKTDRAEVLKQRLKTLRHGASVMSSMVIPKANGEKSINRHPDYEFFLSRSN

SEQ ID NO: 168269 - protein, 232 aa, Oryza sativa
  Clone ID: PAT_MRT4530_667C.1.pep
MSSAAAAQEVADQKRALRSEVRRALRALTPEQRASEDQAIQNAILNSSWFKESKRLCAYISCAQLREVDTSKVLSEVLSPNSEHGHAKDLYVPRVEDKNRNMRMLKITTMDDLVKNSMNILEPSPLDASGNAREEVLSTSSPVDLFLLPGQAFDRTGRRLGRGGGYYDTFLMRYQELAKEKGWDQPLLVALSYSVQILEEGIIPVNSTDVPIDALVSSSGIIPISPAALARI

SEQ ID NO: 168270 - protein, 53 aa, Oryza sativa
  Clone ID: PAT_MRT4530_66800C.1.pep
PLSIDRAYLMGKSAPAWPVKYLAQYVKSRDKLFSDEIVILYACINYSCSYIDI

SEQ ID NO: 168271 - protein, 94 aa, Oryza sativa
  Clone ID: PAT_MRT4530_66801C.1.pep
FFFFFFFWAAKFCFFFGQKKKVYIQQNLQGSILFQCTEIHTHTRTHAEELCICSFCREYLQTAMPGTSRSRGPIIQKQVGQINNGIAIHLYMLS

SEQ ID NO: 168272 - protein, 218 aa, Oryza sativa
  Clone ID: PAT_MRT4530_66802C.1.pep
MLAKRLKRCSILLFAFLLADASGSLLESSGGQAEAIGPQISPATEGEGKRRSLATGMFCVALPNADPTALQEGLNWACGQGHANCAAIQPGGPCYKANNLPALASYAYNDYYQRNSGAGATCSFNGTATTTATDPSSGQCVFSGSSMAGGTTPAANAPSAVGPFTPGFGNGSSPTFPGTGSPGGALTPFDAADSVMSGARRALCALLLASPIFLSLVL

SEQ ID NO: 168273 - protein, 109 aa, Oryza sativa
  unsure (1)..(109): unsure at all Xaa locations
  Clone ID: PAT_MRT4530_66803C.1.pep
MSNKLVHDMHALINDTSWCEQQGHESGSAMLATMEATVGALGSSCGDHSTELVSDDWVRTAAVVQCRIEAYAEAFTSSSSICQHKKHTETSRWESHIKWXFLGCFVCPS

SEQ ID NO: 168274 - protein, 51 aa, Oryza sativa
  Clone ID: PAT_MRT4530_66804C.1.pep
SPDGRHLAMMPHPERCFMMWQYPWYPREWQLEKCGPSPWLRMFQNAREWCL

SEQ ID NO: 168275 - protein, 226 aa, Oryza sativa
  unsure (1)..(226): unsure at all Xaa locations
  Clone ID: PAT_MRT4530_66805C.1.pep
MAASALHQTTSFLGTAPRRDELVRRVGDSGGRITMRRTVKSAPQSIWYGPDRPKYLGPFSEQTPSYLXPEILSKNGVKFGEAVWFKAGAQIFSEGGLDYLGNPNLVHAQSILAIWAVQVVLMGFVEGYRVGGGPXLGEGLDKVYPGGAFDPLXLADDPDTFAELKVKELKNGRLAMFSMFGFFVQXIVTGKGPIEKLFDHVADPVANNAWGYATNSSPGSEHTTRS

SEQ ID NO: 168276 - protein, 263 aa, Oryza sativa
  Clone ID: PAT_MRT4530_66806C.1.pep
MAASALHQTTSFLGTAPRRDELVRRVGNSGGRITMRRTVKSAPQNIWYGPDRPKYLGPFSEQTPSYLTGKFPGDYGWDTAGLSADPETFARNRELEVIHSRWAMLGALGCFFPEILSKNGVNFGEAVWFKAGAQIFSEGGLDYLGNPALVRPQSILAIWAVQVVLMGFVEGYRVGGGPLGEGLDKVYPGGAFDHLGLAEDPDTFAEFKVKEFNNGRLAMFSMLGFFVQAIVTGKGPIENFFDHVADPVANNAWAYATNFVPGK

SEQ ID NO: 168277 - protein, 63 aa, Oryza sativa
  Clone ID: PAT_MRT4530_66807C.1.pep
FNIKCFITFALFSTLSTRTRMRRLYQARNNFKLAVAGYGSKSRIFIFKMLIWKFPPQRIFILE

SEQ ID NO: 168278 - protein, 128 aa, Oryza sativa
  Clone ID: PAT_MRT4530_66808C.1.pep
PTSPNRLQLSIAHSFLSSSALQAAASSLVPAASRCPARLSAFVCLMASPASPREFTQEAARQSLIAISRSVPAAGEAVNIKSPSGAMVNGHHHDDDGAEKYRSKLISISNLSPDAQPTPCSPKDTAAA

SEQ ID NO: 168279 - protein, 263 aa, Oryza sativa
  Clone ID: PAT_MRT4530_66809C.1.pep
MAASALHQTTSFLGTAPRRDELVRRVGDSGGRITMRRTVKSAPQSIWYGPDRPKYLGPFSEQTPSYLTGEFPGDYGWDTAGLSADPETFARNRELEVIHSRWAMLGALGCVFPEILSKNGVKFGEAVWFKAGAQIFSEGGLDYLGNPNLVHAQSILAIWAVQVVLMGFVEGYRVGGGPLGEGLDKVYPGGAFDPLGLADDPDTFAELKVKELKNGRLAMFSMFGFFVQAIVTGKGPIENLFDHVADPVANNAWAYATNFVPGK

SEQ ID NO: 168280 - protein, 102 aa, Oryza sativa
  Clone ID: PAT_MRT4530_6680C.1.pep
PVFQQSKKKPGAGPLKRLTWFFRVPSAQAGTKALLELHGRSTGLSPLFPVGPSVFQKGGDCLPVGLFLQSLLGYGREGFFCKKTLAPDVGVPPVIFLVGVLP

SEQ ID NO: 168281 - protein, 314 aa, Oryza sativa
  Clone ID: PAT_MRT4530_66810C.1.pep
MWSHMSASIFSLSPLSLPPTLPGEKGERQRRGGDGRSGVAAGGGRSDGGRLAAGGSGAERQRAVGGATRAERPVSRRSSSTLPSAALSTAGRRPKRTAIPLPPSRRPAHAAAPLALEVHAASLVRSPPLRPPLRSARGMSLPPRGRGRAERKKRKSQEWRGRGEGSRGAQLRGAAGAASSASLRPPPAAAAPLSLRPPPAAAPFRLASSRRWQVQKNIQMAIPWSLVFLFKHANSREFQLSPGGNKDKGAIAEQRVSLLRSWLPLLCRGSNGTNAPVLSSMERTLLHPPPAAALLCSVAALPVTPSTPPLAVLS

SEQ ID NO: 168282 - protein, 118 aa, Oryza sativa
  Clone ID: PAT_MRT4530_66811C.1.pep
MASDEIRSGDGVLINDGNGFLAIFGEEEVVDDVLLTAANPMKATATEGDDGRRRTARLDIEPRQQPTVSKEEAGFGGENGAGSGRTGALDGWLEVEDATVATGRRNRLSARLLLPRPD

SEQ ID NO: 168283 - protein, 56 aa, Oryza sativa
  Clone ID: PAT_MRT4530_66812C.1.pep
LAELIRPRLFLMPQGRTAHIRWNNVCTLSQEIDNWLCVCVDVHLFSMLDLYCGEVP

SEQ ID NO: 168284 - protein, 72 aa, Oryza sativa
  Clone ID: PAT_MRT4530_66813C.1.pep
ACQRGRSPPLRSPFDQQVLNSTPIFRKDPFSASAIVYTIKYCSHCPPHCSYLISGGSSILLWIVNSLFDLSR

SEQ ID NO: 168285 - protein, 55 aa, Oryza sativa
  Clone ID: PAT_MRT4530_66814C.1.pep
RIAPLLPNYVRIMRMKSSKVVDIITCETQPHSENNKEIKRYIMTAHTWSFFIPYY

SEQ ID NO: 168286 - protein, 194 aa, Oryza sativa
  unsure (1)..(194): unsure at all Xaa locations
  Clone ID: PAT_MRT4530_66815C.1.pep
NSHSRFNFGLDVAEALEYLHHHIMLSIVHCDIKPSNILLDDDMVTQATDFGLAKIMNIAEPCKESSSFVTKGTIRYVATEYGSGSPVSMDGDIYSYRVLLLEMFTRRRLTNIFINGMTSLVDIVKTAYPNNLLEILDWMLMQSXNGNTQDMTQLVIYPVXRLGLTCCKESPRERMKMNNVVKELIDTKKAFSAH

SEQ ID NO: 168287 - protein, 506 aa, Oryza sativa
  Clone ID: PAT_MRT4530_66816C.1.pep
MARRVAARARARAGGVPRSEGTIQDRARVGSGGAEDALDVFDELLRRGIGAPIRSLNGALADVARDNPAAAVSRFNRMARAGASMVTPTVHTYGILIGCCCSAGRLDLGFAALGHVVKKGFRVEPIIFNPLLKGLCADKRTDDAMDIVLRGMTELSCVPNVFSHTIILKGLCHENRSQEALELLHMMADDGGGCLPNVVSYSTVIDGLLKGGDPDKAYATYREMLDRRILPNVVIYSSIIAALCKGQAMDKAMEVHDRMVKNGVTPNCFTYTSLVHGFCSSGQLTEAIKFLEKMCSNGVEPNVVTYSSFMDYLCKNGRCTEARKIFDSMVKRGLKPDITTYSSLLHGYAIEGALVEMHGLFDLMVQSDMQPDHYVFNTLIYASAKQGKVDEAMLVFSKMRQQGLKPNCVTYSTLINGYCKITRMENALALFQEMVSNGVSPNFITYNIMLQGLFRTGRTATAKEFYVQIIKSGKKDLIEQGLLEELDDLFLSMEDNDCSTVSTPAC

SEQ ID NO: 168288 - protein, 1696 aa, Oryza sativa
  unsure (1)..(1696): unsure at all Xaa locations
  Clone ID: PAT_MRT4530_66817C.1.pep
MAERAVAHNLSPSASGDDGEQNPRRRARTPPPPSRRSLRREEVLEGVERSATSPPTSDGEGRRDGERRLLVYGDGSTPQGALQAAGALLRHPPVVPDPETPARRWLDDVADLVMTAQQRLGAGGRSSATKASGAATAGSVSSRRRARRAAAVTRRSSAISSSTPPTQEDVRRGPDARLSIERRRNGRRAAHATEGASSSGAPLRFGRGGQPPVPPVGGVGCRAFVASLRNVRWPPRFRPTITEKYDGSVNPAEFLQVYTTGIEAAGGDDRVMANFFPMDLKGQARGWLMNLPPATVHSWEDLCQQFTMNFQGTYPRPGEEADLHAVQRRDDESLRSYIQRFCQVRNTIPCIPAHAVIYAFRRGVRHNRMLEKIASKEPQTTAELFQLADRVARKEEAWTWNSTGSGVAASAAPGSAARSERRDRRRKKRSAHSDDEGHVLAVEGASRATRKGRPASNKKKEAGAPSXSARPASGAPCTTPPSTTSRTAXAVKSLAERTRKWEEERRQERREGKAPAAPSGNRRSEAKQKAPAEDIDDGDDDLGFQEPGATIATVDGGACAHASRRSLKAMKRELLAAAPTHEATRWSEVALTFDQTDHPPCVARGGQIAMVVSPTVCNVKLGRVLIDGGAALNILSPAAFDTIKAPGMVLRPSQPIIGVTPGHTWPLGHIDLPVTFGGSANFRTERVNFDVADLSLPYNAVLGRPALVKFMAAVHYAYLQMKMPGPGGPISVHGDLKVALACMEQRADHLAAASKPEGGNERLSTSIPAAPRQRMITCDEVPVKKEDALVSFLRANADVFAWRPADMPGVPREVIEHRLAVRPGARPVRQKVRRQAPERQAFIREEVARLLEAGFIREVIHPEWLVNPVVVPKANGKLRMCIDYTDLNKACPKDPYPLPRIDQIVDSXRGIEANPEKIRAIERMRPPXKLRDVQCVTGCMAALSRFISRLGEKALPLFKLLKRSGPFIWTEEAERAFTQLKAYLSSPPVLVAPEPDEPLLLYLAATPQVVSAALVLERDEDNPHSAHPHPVSTRPGREQGGEAPESNGGPRPPTAGVGPPPACPTVPGTPDPQDGPGATAGRPRLSPSDPEVVGTEAECAPRGLSDEERPGDVAPSEEDRPRRKVQRPVCFVSEALRDAKTRYPQAQKMLYAILMASRKLRHYFQAHRVTVVTSYPFGQILHNREGTGWVMDAYVRQVRRMERHFDGIELRHVPRRDNAVADELSRLASSQAQTPPGAFEERLAQPSARPDPLGETDAPERPLRPVGVQASGPEGSAPSSLRLVAWIAEIQAYLTDKTLPEDREGSERVQRISKRYVLVEGTLYRCTANRVLLKCIPRKQGVELLADIHEGECGAHSASRTLVGKAFRQGFYWPTALNDAVDLVRRCRACQFHAKQTHQPAQALQTIPLSWPFAVWGLDILGPFRRAPGGFEYLYVAVDKFIKWPEAYPVIKIDKHSALKFIRGITARFGVPNRIITDNGTQFTSELFGDYCEDMGIKLCFASPAHPRSNGQVERANAEILKGLKTKTFNILKKHGDSWIEELPAVLWANRTTPSRATGETPFFLVYGAEAVLPSELTLRSPRATMYCEADQDQLRRDDLDYLEERRRRAALRAARYQQSLRRYHQRHVRARSLCVDDLVLRRVQTRAGLSKLSPIWEGPYRVIGVPRPGSVRLATGDGTELPNPWNIEHLRRFYP

SEQ ID NO: 168289 - protein, 42 aa, Oryza sativa
  Clone ID: PAT_MRT4530_66818C.1.pep
TSLTTSLYIAIAENCKTNAFSSCSLAPCLYTSFVSQSERNTL

SEQ ID NO: 168290 - protein, 81 aa, Oryza sativa
  Clone ID: PAT_MRT4530_66819C.1.pep
IVGIIRCFFKIFLHSNLFKKQKLRPNYLFKIYVGTKLKLIKRVGRKSSIFGLVAGCDFERTHLRSCKLGVDLRTVLWAASR

SEQ ID NO: 168291 - protein, 256 aa, Oryza sativa
  Clone ID: PAT_MRT4530_6681C.1.pep
ERRAADFASRENVVGTGSLDVLNHVSSVDSEEQKKVDNAVMSRSHGMEGHHLQSQDSGSQFPGCTTDYWKTSRPTESGLEVGYHGVSAFEGRCNTNQQRSVSSKLQLGEMIKAANDACKVQGASDVHLISGHPLADFETFIYSASPVIAKTSCMRNGNCLQDPQAGSSPYQYQISDVSLRNVWEWYEEPGSYGLEVEIHRSLNSTRSACGVSEFCAYFLPSLSAIQLFEQCKNNLDHKFDSDDDFLLSQPNGCVFT

SEQ ID NO: 168292 - protein, 1734 aa, Oryza sativa
  unsure (1)..(1734): unsure at all Xaa locations
  Clone ID: PAT_MRT4530_66820C.1.pep
MAERAVAHNLSPSASGDDGEQNPCRRARTPPPPSRRSLRREEALEGVERSATSPPTSDGERRRDGERCLLVYGDGSTPQGVLQAAGALLRHPPVVPDPETPARRWLDDVADLVMTAQQRLGAGGRSSATKASGAATAGSVSSRRRARRAAAVTRRSSAIPSSTPPTQEDVRRGPDARLSVKRRRNGRRAAHATEGASSSGAPLRFGRGGQPPVPPVGGVGCRAFVASLRNVRWPPRFRPTITEKYDGSVNPAEFLQVYTTGIEAAGGDDRVMVNFFPMALKGQARAVLSSPQHHTMHPCTRGNLRVQGGXVRHNRMLEKIASKEPQTTAELFQLADRVARKEEAWTWNSTGSGRFAGHPKGEACERAGAPSRERPTGKWCTVHNTSLHDLADCRAVKSLAERTRKWEEERRQERREGKAPAAPSGNRRSEAKQKAPAEDIDDGDDDLGFQEPGATIATVDGGACAHASRRSLKAMKRELLAAGPTHEATRRARWSEVALTFDQTDHPPCVARGGQIAMVVSPTVCNVKLGRVLIDGGAALNILSPAAFDAIKAPGMVLRPSQPIIGVTPGHTWPLGHIDLPVTFGGSANFRTERVNFDVADLSLPYNAVLGRPALVKFMAAVHYAYLQMKMPGPGGPISVHGDLKVALACMEQRADHLAAASKPEGGNERLSTSVPAAPRQWMITCDEVPEDALVSFLRANADVFAWRPADMPGVPREVIEHRLAVRPGARPVQQKVRRQAPERQAFIREEVAQLLEAGFIREVIHPEWLANPVVVPKVNGKLRMCIDYTDLNKACPKDPYPLPRIDQIVDSTAGCDLLCFLDAYSGYHQIRMAREDEEKTTFITPIGTYCYTTMPFGLKNAGPTFQRTTRISLGSQIGRNVEAYVDDLVVKTRNQETLLSDLAETFESLRSARIKLNPDKCVFGVPAGKLLGFLVSARGIEANPEKIRAIERMRPPSKLRDVQCVTGCMAALSRFISRLGEKALPLFKLLKRSGPFIWTEEAERAFTQLKAYLSSPPVLVAPEPDEPLLLYLAATPQVVSAALVLERDEDNPHSAHPHPVSTRPGREQGGEAPESNGGPRHPTAGVGPPPACPTVPGTPDPQDGPGATAGRPRLSPSDPEVVGTEAECAPRGLSDEERPGDAAPSEEDRPRRKGAGAGVTLTSPNGDVLRYLVRLDFRATNNMAEYEGLLAGLRVAAGLGIRRLLVLGDSQLVVNQVCKEYRCSDPQMDAYVRQVRRMERHFDGIELRHVPRRDNAVADELSRLASSRAQTPPGAFEERLAQPSARPDPLGETDAPERPPRPVGVQASGPEGSAPSSLRLVAWIAEIQAYLTDKTLPEDREGSEHVQRISKRYVLVEGTLYRRAANGVLLKCIPREQGVELLADIHEGECGAHSASRTLVGKAFRQGFYWPTALNDAVDLVRRCRVCQFHAKQTYQPAQALQTIPLSWPFAVWGLDILGPFRRALGGFEYLYVAVDKFTKWPEAYPVINIDKHSALKFIRGITARFGVPNRIITDNGTQFTSELFGDYCEDMGIKLCFASPAHPGSNGQVERANAEILKGLKTKTFNILKKHGDSWIEELPAVLWANRTTPSRATGETPFFLVYGAEAVLPSELTLRSPRATMYCEADQDQHRRDDLDYLEERRRRAALRVARYQQSLRRYHQRHVRARSLCVDDLVLRRVQTRAGLSKLSPMWEGPYRVIGVPRPGSVRLATGDGTELPNSWNIEHLRRFYP

SEQ ID NO: 168293 - protein, 1843 aa, Oryza sativa
  unsure (1)..(1843): unsure at all Xaa locations
  Clone ID: PAT_MRT4530_66821C.1.pep
MAERAVAHNLSPSASGDDGEQNPRRRARTPPPPSRRSLRREEVLEGVERSATSPPTSDGEGRRDGERRLLVYGDGSTPQGALQAAGALLRHPPVVPDPETPARRWLDDVADLVMTAQQRLGAGGRSSATKASGAATAGSVSSRRRARRAAAVTRRSSAISSSTPPTQEDVRRGPDARLSIERRRNGRRAAHATEGASSSGAPLRFGRGGQPPVPPVGGVGCRAFVASLRNVRWPPRFRPTITEKYDGSVNPAEFLQVYTTGIEAAGGDDRVMANFFPMDLKGQARGWLMNLPPATVHSWEDLCQQFTMNFQGTYPRPGEEADLHAVQRRDDESLRSYIQRFCQVRNTIPCIPAHAVIYAFRRGVRHNRMLEKIASKEPQTTAELFQLADRVARKEEAWTWNSTGSGVAASAAPGSAARSERRDRRRKKRSAHSDDEGHVLAVEGASRATRKGRPASNKKKEAGAPSRERPTGKWCTVHNTSLHDLADCRAVKSLAERTRKWEEERRQERREGKAPAAPSGNRRSEAKQKAPAEDIDDGDDDLGFQEPGATIATVDGGACAHASRRSLKAMKRELLAAAPTHEATRWSEVALTFDQTDHPPCVARGGQIAMVVSPTVCNVKLGRVLIDGGAALNILSPAAFDTIKAPGMVLRPSQPIIGVTPGHTWPLGHIDLPVTFGGSANFRTERVNFDVADLSLPYNAVLGRPALVKFMAAVHYAYLQMKMPGPGGPISVHGDLKVALACMEQRADHLAAASKPEGGNERLSTSIPAAPRQRMITCDEVPVKKEDALVSFLRANADVFAWRPADMPGVPREVIEHRLAVRPGARPVRQKVRRQAPERQAFIREEVARLLEAGFIREVIHPEWLVNPVVVPKANGKLRMCIDYTDLNKACPKDPYPLPRIDQIVDSTAGCDLLCFLDAYSGYHQIRIAREDEEKTAFITPIGTYCYTTMPFGLKNXTRNQETLLSDLAETFESLRSARIKLNPDKCVFGVPAGKLLGFLVSARGIEANPEKIRAIERMRPPASLGMCNASPAAWPPXSRFISRLGEKALPLFKLLKRSGPFIWTEEAERAFTQLKAYLSSPPVLVAPEPDEPLLLYLAATPQVVSAALVLERDEDNPHSAHPHPVSTRPGREQGGEAPESNGGPRPPTAGVGPPPACPTVPGTPDPQDGPGATAGRPRLSPSDPEVVGTEAECAPRGLSDEERPGDVAPSEEDRPRRKVQRPVCFVSEALRDAKTRYPQAQKMLYAILMASRKLRHYFQAHRVTVVTSYPFGQILHNREGTGWVGAGAGVTLTSPNGDVLRYLVRLDFRAINNMAEYEGLLAGLRVAAGLGIRRLLMDAYVRQVRRMERHFDGIELRHVPRRDNAVADELSRLASSQAQTPPGAFEERLAQPSARPDPLGETDAPERPLRPVGVQASGPEGSAPSSLRLVAWIAEIQAYLTDKTLPEDREGSERVQRISKRYVLVEGTLYRCTANRVLLKCIPRKQGVELLADIHEGECGAHSASRTLVGKAFRQGFYWPTALNDAVDLVRRCRACQFHAKQTHQPAQALQTIPLSWPFAVWGLDILGPFRRAPGGFEYLYVAVDKFIKWPEAYPVIKIDKHSALKFIRGITARFGVPNRIITDNGTQFTSELFGDYCEDMGIKLCFASPAHPRSNGQVERANAEILKGLKTKTFNILKKHGDSWIEELPAVLWANRTTPSRATGETPFFLVYGAEAVLPSELTLRSPRATMYCEADQDQLRRDDLDYLEERRRRAALRAARYQQSLRRYHQRHVRARSLCVDDLVLRRVQTRAGLSKLSPIWEGPYRVIGVPRPGSVRLATGDGTELPNPWNIEHLRRFYP

SEQ ID NO: 168294 - protein, 251 aa, Oryza sativa
  Clone ID: PAT_MRT4530_66822C.1.pep
MTFLVSLTRRAHPAAGEDGHGQRTNHAAVSAGCAGYSAHSRMQARRGICMRTGGRQAKAASRIRHGEIMAHGRPLPAGRVRGGRGAWQCTARAAASGQGYWYYWREIATAARGAANLLRTRSNLERDKRLATHPPNGVRADNAVPDRPPTHRGAPRRLLLLSGAAPHASANRGAACLPAPRATTRLLDLLAHVNPTPGAESCHGTSPPLRRNANPTRYLRRGCFPSSLPSIRLLPLARRDGRGMEEVEGPC

SEQ ID NO: 168295 - protein, 1752 aa, Oryza sativa
  unsure (1)..(1752): unsure at all Xaa locations
  Clone ID: PAT_MRT4530_66823C.1.pep
MAERAVAHNLSPSASGDDGEQNPCRRARTPPPPSRRSLRREEALEGVERSATSPPTSDGERRRDGERCLLVYGDGSTPQGVLQAAGALLRHPPVVPDPETPARRWLDDVADLVMTAQQRLGAGGRSSATKASGAATAGSVSSRRRARRAAAVTRRSSAIPSSTPPTQEDVRRGPDARLSVKRRRNGRRAAHATEGASSSGAPLRFGRGGQPPVPPVGGVGCRAFVASLRNVRWPPRFRPTITEKYDGSVNPAEFLQVYTTGIEAAGGDDRVMVNFFPMALKGQARAVLSSPQHHTMHPCTRGNLRVQGGXVRHNRMLEKIASKEPQTTAELFQLADRVARKEEAWTWNSTGSGRFAGHPKGEACERAGAPSRERPTGKWCTVHNTSLHDLADCRAVKSLAERTRKWEEERRQERREGKAPAAPSGNRRSEAKQKAPAEDIDDGDDDLGFQEPGATIATVDGGACAHASRRSLKAMKRELLAAGPTHEATRRARWSEVALTFDQTDHPPCVARGGQIAMVVSPTVCNVKLGRVLIDGGAALNILSPAAFDAIKAPGMVLRPSQPIIGVTPGHTWPLGHIDLPVTFGGSANFRTERVNFDVADLSLPYNAVLGRPALVKFMAAVHYAYLQMKMPGPGGPISVHGDLKVALACMEQRADHLAAASKPEGGNERLSTSVPAAPRQWMITCDEVPEDALVSFLRANADVFAWRPADMPGVPREVIEHRLAVRPGARPVQQKVRRQAPERQAFIREEVAQLLEAGFIREVIHPEWLANPVVVPKVNGKLRMCIDYTDLNKACPKDPYPLPRIDQIVDSTAGCDLLCFLDAYSGYHQIRMAREDEEKTTFITPIGTYCYTTMPFGLKNAGPTFQRTTRISLGSQIGRNVEAYVDDLVVKTRNQETLLSDLAETFESLRSARIKLNPDKCVFGVPAGKLLGFLVSARGIEANPEKIRAIERMRPPSKLRDVQCVTGCMAALSRFISRLGEKALPLFKLLKRSGPFIWTEEAERAFTQLKAYLSSPPVLVAPEPDEPLLLYLAATPQVVSAALVLERDEDNPHSAHPHPVSTRPGREQGGEAPESNGGPRHPTAGVGPPPACPTVPGTPDPQDGPGATAGRPRLSPSDPEVVGTEAECAPRGLSDEERPGDAAPSEEDRPRRKLPHTAYWVMQFDGSLSLQGAGAGVTLTSPNGDVLRYLVRLDFRATNNMAEYEGLLAGLRVAAGLGIRRLLVLGDSQLVVNQVCKEYRCSDPQMDAYVRQVRRMERHFDGIELRHVPRRDNAVADELSRLASSRAQTPPGAFEERLAQPSARPDPLGETDAPERPPRPVGVQASGPEGSAPSSLRLVAWIAEIQAYLTDKTLPEDREGSEHVQRISKRYVLVEGTLYRRAANGVLLKCIPREQGVELLADIHEGECGAHSASRTLVGKAFRQGFYWPTALNDAVDLVRRCRVCQFHAKQTYQPAQALQTIPLSWPFAVWGLDILGPFRRALGGFEYLYVAVDKFTKWPEAYPVINIDKHSALKFIRGITARFGVPNRIITDNGTQFTSELFGDYCEDMGIKLCFASPAHPGSNGQVERANAEILKGLKTKTFNILKKHGDSWIEELPAVLWANRTTPSRATGETPFFLVYGAEAVLPSELTLRSPRATMYCEADQDQHRRDDLDYLEERRRRAALRVARYQQSLRRYHQRHVRARSLCVDDLVLRRVQTRAGLSKLSPMWEGPYRVIGVPRPGSVRLATGDGTELPNSWNIEHLRRFYP

SEQ ID NO: 168296 - protein, 547 aa, Oryza sativa
  unsure (1)..(547): unsure at all Xaa locations
  Clone ID: PAT_MRT4530_66824C.1.pep
AHRVTVVTSYPLGQILHNREGTGRVVKWAIELSEFDLHFEPRHAIKSQALADFVAEWTPAPEPVSVPEASSGPSQLPHTAYWAYIADKTLPEDREGSERVQRISKRYVLVEGTLYRRAANGVLLKCIPREQGVELLADIHEGECGAHSASRTLVGKAFRQGFYWPTALNDAVDLVRRCRACQFHAKQTHQPAQALQTIPLSWPFAVWGLDILGPFRRAPGGFEYLYVAVDKFTKWPEAYPVIKIDKHSALKFIRGITAQFGVPNRIITDNGTQFTSELFGDYCEDMGIKLCFASPAHPRSNGQVERANAEILKGLKTKTFNILNKHGDSWIEELPAVLWANXTTPSRATGETPFFLVCGAEAVLPSELTLRSPRAAMYCEADQDQLRRDDLDYLEERRRRAALRAARYQQSLRRYHQRHVRARSLCVDDLVLRCVQTRAGLSKLSPMWEGPYRVIGVPRPGSVRLAMGDGTELPNPWNIEHLRRFYPXPLGGLGRLKSPKGAQNRAVPRGVVNSGGXSAKAHNRVIHNPRSPRSRPGQSRHVDLPRH

SEQ ID NO: 168297 - protein, 71 aa, Oryza sativa
  Clone ID: PAT_MRT4530_66825C.1.pep
MLAESAEGQEGKAPASHPRSPTWSPGKLVHIFMSKRVLDHAAACCIACCPCPCAVTRSAACPSPCSRWLAS

SEQ ID NO: 168298 - protein, 68 aa, Oryza sativa
  Clone ID: PAT_MRT4530_66826C.1.pep
MARGGRRGAETRSSMLFSSLGISFDSTSDFYNSTGGSGGDAKVAPKPHEDNKGGAKNADNKHSGCDGG

SEQ ID NO: 168299 - protein, 141 aa, Oryza sativa
  Clone ID: PAT_MRT4530_66827C.1.pep
MGGGREWRRSSCSSSSPPAASSCCSTSSTSAVARSSSGQTAASECGGARGLVGEGRVSSNGLASRLPLPPKPLRPAPADRCRSRMPPSLRSRRLSPGLPTVAPLATRHLLPAAGLPSPKKIREKRLKRREAEEKSRGRLTF

SEQ ID NO: 168300 - protein, 117 aa, Oryza sativa
  Clone ID: PAT_MRT4530_66828C.1.pep
PLGDSGQGTTFSGISGSREGMTFGGISGGYKRGSGCNSDIDGDDGDPTIDDDYVRARGRRIHSVASLGEGCMTIARLEEADPSPTALDPPLPSYVVSDPPLPSSGGGGSTTSSSGVG

SEQ ID NO: 168301 - protein, 311 aa, Oryza sativa
  unsure (1)..(311): unsure at all Xaa locations
  Clone ID: PAT_MRT4530_66829C.1.pep
MQWDAHSLSTAMLPSPYLFFLDKWTYSCIILHYLSNDVVMLSLFVFMHINRLEITPDKRFLAAAGNPHIRLFDINSNSNHPVISYDSHTSNVMAVGFHCDGNWMYSGSEDGTVRIWDLRTATCQREYESRAAVNTVVLHPNQKELISGDQNGNIRVWDLAANSCSCELVPEVDTAVRSLTVMWDGSMVVAANNRGTCYVWRLLKGTQTITCFEPLHKLQAHDGYILKCLLSPEFCDPNRYLATASSDHTVKIWNVDGFKLEKTLVRQLXASSDTTARLWTMSTGEAIRVYTSHHKPVVCCALHDGAESAPS

SEQ ID NO: 168302 - protein, 138 aa, Oryza sativa
  Clone ID: PAT_MRT4530_6682C.1.pep
FDDKLSNMRIGRRPGRPQGVRVGRFINAAGTTGFPTGKRALDAFMEKRRRKNASKDHRYMPYRRNGDELKKHVALRMNLNSYRLMNCSNISDNCLLIHYQKNNIGAQGVKDHEPQKLSFIRALHDEIADVVIDPDPRI

SEQ ID NO: 168303 - protein, 138 aa, Oryza sativa
  Clone ID: PAT_MRT4530_66830C.1.pep
ELFEECQQQYIEKQARAKDMEEQRLSAWRQLEAAAAKASGDDMMIGAHFISQALARTSRLGIDVACGVLISIFDGMGIARSVLLGSTDVLSLEVDVPVGAHMCYSNMKPAALASSSVMKSTADNWFVMRRVNPDCLSG

SEQ ID NO: 168304 - protein, 535 aa, Oryza sativa
  Clone ID: PAT_MRT4530_66831C.1.pep
MFNKIIKRGGRKGQRAADGGDAAHGRPAAAAPSSSSGGAQPPVTVNHASRAAAPSSPPSPHAAAAASAPSAGAAASNQASSHHHQQQQPAAAPQPPLLEPLPLLRDVAAADRPGLLVRKLRLVAALFDFTDSLKHPREKEAKRQALLELVDYVQAPSPAANANAPARLPENVQEALVAAISVNVFRPLPPALHESAAAIDPGAAPDDEEEPYLDPAWPHLQLVYELLLRYVVSPDTDTKVAKRYVDHAFVLRLLDLFDSEDPREREYLKTVLHRIYGKFMVHRPFIRKAINNVFYRFIFETERHNGIGELLEILGSIINGFALPMKEEHKLFLSRALIPLHKPKSVAIYHQQLSYCIVQFVEKDYKLADTVIRGLLKYWPVINCQKEVLFLGELEEVLEATQPAEFQRCMVPLFKQIGRCLNSSHFQVAERALFLWNNDHIVSLIAQNRSVIFPIIFEALERNITSHWNQAVHGLTANVRKMFLDMDSELFEECQQQYIEKQARAKDMEEQRLSAWRQLEAAAAKASGDDMVLVN

SEQ ID NO: 168305 - protein, 316 aa, Oryza sativa
  Clone ID: PAT_MRT4530_66832C.1.pep
MAQPSVILATASYDHSIKFWEAKSGRCYRTLQHTESHINRLEITPDKRFLAAAGNPHIRLFDINSNSNHPVISYDSHTSNVMAVGFHCDGNWMYSGSEDGTVRIWDLRTATCQREYESRAAVNTVVLHPNQKELISGDQNGNIRVWDLAANSCSCELVPEVDTAVRSLTVMWDGSMVVAANNRGTCYVWRLLKGTQTITCFEPLHKLQAHDGYILKCLLSPEFCDPNRYLATASSDHTVKIWNVDGFKLEKTLVGHQRWVWDCVFSVDGAYLITASSDTTARLWTMSTGEAIRVYTSHHKPVVCCALHDGAESAPS

SEQ ID NO: 168306 - protein, 105 aa, Oryza sativa
  Clone ID: PAT_MRT4530_66833C.1.pep
MWLNHWRKTVYMHHPRFLRLNHPYRQNTSDFDGMVEEGARPKFIIGSDIWDETKDSLQARRDLEDMNIRKELHPQDKGNDRYYLPPACYTLSAAEKMRKAIKAGI

SEQ ID NO: 168307 - protein, 124 aa, Oryza sativa
  Clone ID: PAT_MRT4530_66834C.1.pep
MRHHSLAKMSMKASAGVGGAVVADANLVEDEREATPSVELLWASGTCGLVKNDAHISATTVYWHRWWWGVGTRKAVAVTPYLSLSFLLQVVRRRGAVAEHDFGGRDGDGAVEIRSTALQHASWR

SEQ ID NO: 168308 - protein, 421 aa, Oryza sativa
  Clone ID: PAT_MRT4530_66835C.1.pep
MKATAGLVEAQRRPARSKAVRRRQGSCGGLDVYGQASVEVEASAPTSPSDVGLDAGMTTTTTAAATALTSSVGAGPPPSRSTTTITAGRTYHILKIEGYSSTLKAGRGQALRTSPFSAGGRTWYISYYPNGGRETNKHCISFFIHLDDDTVNDDVMAQVTFSLLDRHRNPVRSHTVTTTLYNFSVANSSALGFENFIRRDELQRSEYLNDDCFAIAVRLVITEEPPSFTVPPSNMHLDYGDLLSSKEGTDVEFVVGGETFAAHRLVLAARSPVFKAELFRPMEGGTTDVIKIDNMDAQVFKALLVFIYTDTWPEIGQDETTMVQLLVAANKYSLSRLKIMCEDRLCSYIDTSSVVTMLMLADKYQCHGLKKVCFNFLASSRALSLAMKADNFRCLIQGRPTMLKDLIYNIVTHQLEIKLSV

SEQ ID NO: 168309 - protein, 86 aa, Oryza sativa
  Clone ID: PAT_MRT4530_66836C.1.pep
MGELCFLLEHLDQCRGFVNMLITLGGSLPSQIGIVRRIQICVDCPGKFVRFASPPPGKSLERQGIESDLALRSFSTESRVEKSELR

SEQ ID NO: 168310 - protein, 54 aa, Oryza sativa
  Clone ID: PAT_MRT4530_66837C.1.pep
CFKKPDKKEFMVRLKAVRMICFNFPLYPNFPAKVMFLLPPCYWAPPFMIPCCSK

SEQ ID NO: 168311 - protein, 51 aa, Oryza sativa
  Clone ID: PAT_MRT4530_66838C.1.pep
KTHFFIYTVFISNVDYPLLTNYSFTIFFKTLLIKQYFISYKINISMFSHIF

SEQ ID NO: 168312 - protein, 75 aa, Oryza sativa
  Clone ID: PAT_MRT4530_66839C.1.pep
YIIYYHISVFFTQKINLILFRMIFLIFYFLVYRLIMVCVVKYVHDVIPDASCVITKYFIKNYYFFNVFKCFDFFL

SEQ ID NO: 168313 - protein, 105 aa, Oryza sativa
  Clone ID: PAT_MRT4530_6683C.1.pep
PPPLPPRASPLPPPARSGREGEGEPPPPPRAVLVAAVHAGLPLPPPARSRREGGGEPPPPPPAFPLPPPARSGRGGREGSHAAPPPSTPPRAVAAVGEAGLGEVR

SEQ ID NO: 168314 - protein, 53 aa, Oryza sativa
  Clone ID: PAT_MRT4530_66840C.1.pep
MEALVAASRFDLVMALDVWEVVFGMMPRLAATEVAGERRLGHSRSTSATSSHR

SEQ ID NO: 168315 - protein, 160 aa, Oryza sativa
  Clone ID: PAT_MRT4530_66841C.1.pep
MASTNSWTHEIESPVAAPRLFRAAVMDWHTLAPKIASHIVASAHPVDGDGSVGSVRQFNFTSAMPFSHMKERLEFLDVDKCECKSTLVEGGGIGKAIETATSHIKVEPAANGGSVVKVESTYKLLPGVEVKDEITKAKESLTGIFKTAEAYLIANPDAYN

SEQ ID NO: 168316 - protein, 60 aa, Oryza sativa
  Clone ID: PAT_MRT4530_66842C.1.pep
FVIIVIQCLSSLLYVMTSCPVSTCCSLCMHSLWLHWPGWLTNMTLQVIYNVTNCAERVGR

SEQ ID NO: 168317 - protein, 66 aa, Oryza sativa
  Clone ID: PAT_MRT4530_66843C.1.pep
MDSEMSSDSEWVQTAKKEEEQTKKKKKVEKSGKKEQIHTGIAGRRPPDVGAGGRGCARTPLMACAA

SEQ ID NO: 168318 - protein, 500 aa, Oryza sativa
  Clone ID: PAT_MRT4530_66844C.1.pep
MAMMAMGAASWAPIPAPARAAAAFYPGRDLAAARRRRGAAARRPFVFTPRAVSDSRSSQTCLDPDASTSVLGIILGGGAGTRLYPLTKKRAKPAVPLGANYRLIDIPVSNCLNSNVSKIYVLTQFNSASLNRHLSRAYGNNIGGYKNEGFVEVLAAQQSPENPNWFQGTADAVRQYLWLFEEHNVMEFLILAGDHLYRMDYQKFIQAHRETNADITVAALPMDEERATAFGLMKIDEEGRIIEFAEKPKGEQLKSMMVDTTILGLDNVRAKELPYIASMGIYVFSKDVMLKLLRQNFPAANDFGSEVIPGATEIGMRVQAYLYDGYWEDIGTIEAFYNANLGITKKPVPDFSFYDRSAAIYTQPRYLPPSKVLDADVTDSVIGEGCVIRHCTINHSVVGLRSCISEGAVIEDSLLMGADYYETETDKKALSETGGIPIGIGKNAHIRKAIIDKNARIGENVKIINVDNIQEASRETDGYFIKSGIVTVIKDALIPSGTVI

SEQ ID NO: 168319 - protein, 58 aa, Oryza sativa
  unsure (1)..(58): unsure at all Xaa locations
  Clone ID: PAT_MRT4530_66845C.1.pep
SSAIWXSPDNEVAGESSDIFSSLDLATSADYLAAVDDDIPEVASPWSTMAARVSRWPH

SEQ ID NO: 168320 - protein, 689 aa, Oryza sativa
  Clone ID: PAT_MRT4530_66846C.1.pep
MSAAPPPPPPESPVAAAAGGGDKVLAAAQHIVKSLATSKNAADDMIRILSGFDNRLSQITSDLFPSPDLAADSDERGNPLWGQISAAAFDAAEQLIQVWDGTPEALVFEATEDEVAEYLSAVDVAIEHLARGSGGGAGGAGSSSSSTAGRAGVAVQLAMARLEEELRHLMVRHAVPLDPTGLFFSLRRLSLGSMDDLDTSSEFDAATPHSIDVAPETARGGPLVNPFEDQVFDPVRPEAVDDLRAIADRMARAGYSRELADAYCGIRRDLLDEYLSALGVERLSIDEVQRIEWKHLNDKMKKWVQAVKTVVRVLLAGERRLCDQVLSVSDELREECFIESTKGCIMQILSFGDAVAVCPRSPEKLSRILDMYEALAEVIPEMKDLCLGSSGDGVISDVQANLDRLGDAIRGTLFEFGKVLQLESSRRAMTAGEIHPMTRYVMNYLRLLVVYSDTLDALLDDNADDQIDLARAEDQDQEHLESMTPLGKRLLKLISYLEANLEEKSKLYEDSALECIFSMNNLLYIVQKVRDSELGKILGDHWVKRRNGKIRQYSKSYLRISWMKVLSFLKDDGHGSGSGSSSGSGSGHSSSRMSIKEKFKNFNLAFEEIYRNQTTWKVPDPQLREELKISISENVIPAYRAFLGRYGSQVDGGRNSGKYIKYTPEDLESQLSDLFEGAPGPANHSRRRT

SEQ ID NO: 168321 - protein, 112 aa, Oryza sativa
  unsure (1)..(112): unsure at all Xaa locations
  Clone ID: PAT_MRT4530_66847C.1.pep
MGSPDNEVAGESSDIFSSLDLATSADYLAAVDDDIPEVASPWQGQLPVVLSLHAPRYPRWQRAWTHPTALLAIPPSSAAVVGSSDGAAKAATMEGEGWXGNFVSLSTEEAKM

SEQ ID NO: 168322 - protein, 200 aa, Oryza sativa
  unsure (1)..(200): unsure at all Xaa locations
  Clone ID: PAT_MRT4530_66848C.1.pep
MHRPLRAAAPPLCKILALLYIFEINFAPPPDDEIKLPFMSFAAIIEGEELVLVGHLHVHHEQLTVFLLLLHGWHLKQCYMGSPDNEVAGESSDIFSSLDLATSADYLAAVDDDIPEVASPWSTMAARVSRRGQLPVVLSLHAPRYPRWQRAWTHPTALLAIPPSSAAVVGSSDGAAKAATMEGEGWXGNFVSLSTEEAKM

SEQ ID NO: 168323 - protein, 3993 aa, Oryza sativa
  Clone ID: PAT_MRT4530_66849C.1.pep
MSCASFWQHYVHTYILLLSLLGYPSGEVIKRNCSRVQSTRKVRETIRNHLKTVSELEEKIPVEAIARGRSAARSKLTVSQQQSEQELSKALLVSNTLKFLSPLLYVWKFLVFICWSLWRFMSSRSRGCKSSVQNFPCASDDSEIKVQFSICLGELSVTFLPLSDHHFTGTPKLNNGNKAYHIDTPSVHLVIKSSSILYTDGFTTQSFFFVIGELKADVSGIPKLLQAANGSITRRNSSFGTEEFSEDINSKTILWSDSASMHPFSGKQPDESFSYNGDSSIALLQSDMEELWSFWTVVSTFYNDSGVMHHEKPSVIFEFKSFLIDPYKSTSGFQQCRFTVGRVNLDVDYLCASSTYLLYRQFVHYKELKELTEKSAEFSNRSDSCATRTSGIADKLRSFNQRLKFLIADAIPINTLQISALIAGPSIRLIFDKNSLLQNSKNKQVPLFSQMNNTSCITLSLAYVECVIWPASLSSLTQKADLHAKESHDTFDGVEEQLESHRLALDSAGHVYSGTVVLDSCFKFADLTLLVDHIEANQQFHIFGPMSANFQLSTSRKYASSFFVTRNILSINLGGRIVGCMAFLFMDDLFPIFQVIKGMQMLALNSELGDIKYSQCFIGRLASFCNRHMDGSTMGTAVEYIIHEETVDCYTELVAEMKLDLEPTHIIVSASRDGLIFNPAMFSNSDINYISSSTVFEGVAALESLDILALGIWFSSRSSSLKLLLDGECTDLLVNLSGIQSVVFENQPQMSICDDILQYSTVLSSSPYDKSQFILSDCVFHLCAGPNKDSLMNDKMQVESISGCSTDSSGIYYFIELEFTEVYIGDYNMHNFLIEVNKPSKQKIALLIHDDLQIVKCKIKGGLIFLETLSLAKFVVCCKIYFRLLMDLSSWAASNSVKDSVTSVSAGSETTVTNRPHVSSGVHSQSEESQLGSVKCLDVDLSQFSLTLAIADESGRYQGLTLEVDAILQQLNLGMKILFEVKRISISSISIMPNTGHVKLRDVPAPRFRSSKSLALPSQSEIQEYLPFLEADNVLTYDHDAPSSSNSTVESSTGNPPLELSSHKSYILRHFATYLKLEKKELNGDSNLMRSSGDWFGNGSVSGLEMILSLFAPFHEILRSGSTQKEIQTGDTPHQELLDNRDYTIPDGAIVAIRDLDQQMYVSIKNTGKKYQVVGTYHYSLSSECALFKVKHHKGWRSDTPCISLLSLYAKTDEGKELALSFSHGSDLVEVSSSVDKPSSLWTTSPLRFDGFEDDGDDGKYCKIISRSSNHLVNKKSNYGIAFNDGLLEFVRKPGNPFKVKVLDESLFSDVARPFVPNVNLDNNTYLDVENELPFGMGDSLETGVSSQHVIISIDKIVFTITHEVLDTGNVFPLVQNCINDTRIITQIFPSKIRILSSFKVIIHYFNARKYLWEELVSPITAYMFFRYRFFNLVPVTRCRRMPLRFFVHLKQVDIFVNELSIDILLYVAGKLNVMGPYAVKSSAVFPNCCKIENNSRLTLVCHFQNNEDAIVSGQQSASVFLRHLTFEDNHPPDQSIVSISLFKEGLFSTAPINVSLQDSGVFASRTRVLSLKDSRSFSGPFVVVKVSQNSEEGLSLSVQPLLRIYNKSDFPLELRFQRPQKSSEEAAFVTVRSGDMVDESTGVFDSMDLSGGSKRALMSLALGKPEISEHSGNFGPTTLVKWSEDITGEKAVRISGVMEKLNYNIRRAFSIDSMKSSFSSLSCDVSIDGQHVTALHFLVHTLSREVPLHPTNGSPVFDRNATVAFQLQREIFIYPTVQVYNFLQTDIHVILTDCEPENTRDDNFDIIGKQATITSGSSAYLYVNPAMFTFSVKLISYGSKSKAVNTSDWVKRMQKQISRAQFLDMELEFVIGTGRFHSSLRLLRQEKGFLEVAVFTRYTLHNTSDYPLLCTAPHKKSLPMYVNLNNWSGTVKETINLPPQDGCILASMSMSSWFTRSSKLRIGLQHEKGSEAFIDLEALSGFTEFSLEIHDNILPRRMATFGMYLQPVLYDLPVPSQVVLIVPRYVFSNESATAVAVRQCFVEFCPKETGYCWSGPICVSSIGRFFVKFRRSQGTVTDDMKRGTLQDGKWKQFASVDVIQETASFVLHFSKPPKAALPYRIENCLNEASIMYFQKTFLSAWPSSQDLAHATHCIHTPALREIKIDKISPWKPFLKMSQNSRLNIDSSFNNGLSSGKQRFDESFGLRVFKIGYEVYADGLTRVLRICEHKDNPKADNIEHPIANVQFRMTYMCIHLLEKGQQGEEKGQSPSAILAARFQHISADSVITDRYRHISLAIHSVNLDEKWEGASFGSILRRNKLQDATLSENILRIIIKLNSTNSSVKQVQYCSIILQPIDLKVDEETLMKIVPFWRTSLAPPGTPSTQFYFRHFEVHPIKIIASFRPGSPYTTYSSAQEALRALLHSVIKVPEISSSAVELNGVLLNHALVTFRELFLKCAQHYSWYVLRAIYVTKGSSLLPPSFASIFDDSASSVIDVFFDPSDGSLNLPGLTIGMFKFISKNMKSGGFSGTKRYLGDLGKTVKTASSNALFAAVTEISDSIVRGAEANGFNGMVTGFHQGILRLAMEPSVLGQAILEGGPDRKIKLDHSPGLDELYIEGYLQAMLDVMYKQEYLRIRVIDDQVILKNLPPNSALINEIVDNVKSFLVSKGLLKGDSSTIRPLRHLRNEPEWRIAPTVLTLAEHLFVSFAVRVLHREATKAIAGVVSKAKRPAGGGEDDGKGESPSSSSVGVLARRSRVWSVGRFAVSGMVAYVDGRLCRHIPNPIARRILENQIMKHNDERPNYEICESSVRWHNKKQTGQRLHMAATPLSTLATLVALIESLHRRLTASLGYTKSKRGKIQIRRASILVWSKEMNGSIFEGNHASEICVSKLSGRTSFAVGSSNQKNLNVACYEDLTKILGLSRFDSENLSDVSNTGLPMRCALDPTNPARMRCIPPENGLKSADVSSDNLQDMSSCCDSPHSQSGKAKFMCSFGGKIMPRPSDGKLRYVGGETRLISIPRNFSWNELVQKTLKIYSQPHIIKYQLPEEDLDALISLSCDEDLQNMMEEYSSLEKANSSPRLRIFLVSQTECEDSSLDSRSLESEPEYQFVVAVNNLAQLKRSTSGNSLMSQSKHHLDNSPLHFRDTPVRQTDRDSGAKSLGGNSLNEPPSQFFIDPFTQPMVSESSATPSACLTRQRTMKQSRMQSSADKSILNQEYENKSEVYNGSNLKTMFPDHQHNKQNNTDTVIGVGTSPRHFQIQSQVKDLAVPRNESGLSSHTNYDMPITVETPFYSEKLSVHPENAVLSAEGMTHAFSDPLLKDRTQVLAANLSLAAGSHIASSFSQEIYQTKELERKLSVTRPDFVCVKPTDVARTEEPRHLVSNHTDQPYNQGIVSGTSVEPTIYYQQDSLSSNVRQGHDGGSTVQQWDKPYHQENRAGLKSYCARGARMSSDELDALESSVPTSVPANDHSCSFLNECSIGSRIENSDLGSQLDKLNLGRAAADYETAGCVSGNDKVFLPINSFDAFASQISMVNRESSVYQNGKLDQSSVHNYGLATSPLTGMSDSNVSANLLSSQNPFPVCVSSREVPLEYNITRNYVVNGFDNESMKLNDRMHNNVQMDAPVIVEDATDNAPLGILSSRPLVPLVEVAAEEQQQVIISSLKDDDARSDVPELANEDHDDEPAADGSISDAAVAELEASMYGLQIIRNADLEELRELGSGTFGTVYHGKWRGTDVAIKRIKKSCFAGRSSEQEKLTKDFWREAQILSKLHHPNVVAFYGVVPDGTGGTLATVTEFMVNGSLRNVLLRKDRMLDRRKRLIIAMDAAFGMEYLHSKSIVHFDLKCDNLLVNLRDPQRPICKVGDFGLSRIKRNTLVSGGVRGTLPWMAPELLNGSSSRVSEKVDVFSFGIALWEILTGEEPYANMHCGAIIGGIVNNTLRPPIPKNCEPEWRQLMEQCWSADPDIRPSFTEVTDRLRAMSSALKGHSQGNK

SEQ ID NO: 168324 - protein, 120 aa, Oryza sativa
  Clone ID: PAT_MRT4530_6684C.1.pep
MPGIAGGGVAPIQIYHRRRGSAAGDGTTSDEGPEASHVHGSDNGATLLAWEQRRRFRRDTLQLALVTAPLRGHGSGGGLRSGGARWQNSGGGKPPHSDRSTTTDLGSSGASAVTTMVDRS

SEQ ID NO: 168325 - protein, 160 aa, Oryza sativa
  unsure (1)..(160): unsure at all Xaa locations
  Clone ID: PAT_MRT4530_66850C.1.pep
MAKVKVGINGFGRIGRLVARVILQRDDCELVAVNDPFISTDYMTYMFKYDSVHGQCKSHEIKLKDEKTLLFGETPVAVFGCRNPEEIPWGQAGADFVVESTGVFTDKDKAAAHLKGGAKKXVVISAPSKDAPXMLLLGVNEHEYKSDLNIXFNAVVPQLS

SEQ ID NO: 168326 - protein, 116 aa, Oryza sativa
  unsure (1)..(116): unsure at all Xaa locations
  Clone ID: PAT_MRT4530_66851C.1.pep
FFDLFGSFYVGAAYINQYTTINGQGIGPIKTTLLINXNWLGINTHKWNWIDSFNNQVQXPGNGVGGRNWXWAQGRNEETKILNNISGAFQMVTLEGGGSSLNGYISKTWFFHCLPP

SEQ ID NO: 168327 - protein, 82 aa, Oryza sativa
  unsure (1)..(82): unsure at all Xaa locations
  Clone ID: PAT_MRT4530_66852C.1.pep
MXASALHQTTSFLGTGPRRDELVXRVXDSGGRIXMXRXXKSAPQSIWYGPXRSKYLGPXLEXTAXYXTGEFPGEXGWDKVGL

SEQ ID NO: 168328 - protein, 140 aa, Oryza sativa
  Clone ID: PAT_MRT4530_66853C.1.pep
LLRADPSAQRPSTSSRRPPWLSVSLHCFFWSVSLSLLLLTSLQPRLRSSRITRSMTTSIRTSTTKRITSPSTIQSPTTSPTTSLTTSQATSLTTMTCPAMSPAMSMTTSTHHTVMNTNTLLTGISPPTRMTHTVLRLHMM

SEQ ID NO: 168329 - protein, 59 aa, Oryza sativa
  Clone ID: PAT_MRT4530_66854C.1.pep
TGDGGGGGATGVAATTMRRRGWWRRPPALARRSWCWWRPWWRRRLLSDRWRRWGRRRAR

SEQ ID NO: 168330 - protein, 52 aa, Oryza sativa
  Clone ID: PAT_MRT4530_66855C.1.pep
YHRGFDVWHTMIPELMFSLANYGVGEVGGGTPARVGVLWGALWGPRVDAVWG

SEQ ID NO: 168331 - protein, 126 aa, Oryza sativa
  Clone ID: PAT_MRT4530_66856C.1.pep
ASGTPPAPPFPPRRRRQALARFSPPSTTSPPSPPSPRGGRSSLDFPCPRPPPPRALRCSPPSPPRDPPPPSLRCVGARGRLTGGPPVPPPGAPPCPVPPRPPSCGARPRKEPAFVRGCLGGLDRRT

SEQ ID NO: 168332 - protein, 251 aa, Oryza sativa
  Clone ID: PAT_MRT4530_66857C.1.pep
MSFSPPPLLSPLSPSSHLPSLATVTAVGGAEDDDLKKTPPARPPTAAPLRPVGFSPLSARPPPAPPRPAGFVLLCAGRRRRRGWRPPLGSAARRVAAARGRELDTARRRRPAEEEEATVAGCAGGRGGRGGRRAGCRRVAAAPPPFPAQARRNRRHTEDSMGIIVEHADQRPAKIQQKEKRTCDRSATLAALPSLRREDFHVVALSMAASMPAATTSSLRIVVVFSNVTVDETILGAERRGNPAAAAEEED

SEQ ID NO: 168333 - protein, 507 aa, Oryza sativa
  Clone ID: PAT_MRT4530_66858C.1.pep
MEEGRGSPEPAGAADWIVLDPYVRCSWRRRHKYEEEDITASKVGRTCTGFPVRASLRVADPPAVSRLYLHCPPQWPADLPEVRYPDVIAAHRGCILFVAAVPFEEPGFNVDGHYPLDYFIYSASPSSQPLLTRLPPCFVGGFTDQEEDELYQPYHQQRQRYMCSRDVGLLCRDGDGDGEDGRSLFTVAHLTSSGSKEVELCVVQSGEAEEWSITPLRVRRAMSMLGLNLGEWRTDAVLPLHDRFLCWVDYYQGILLIDVLNPGDEPHQFSFIPLPKPVRDGSTRLFSQSYCADPVRCVCVRGSSDSGFFIKLVCVTIAATADKDVYPPAFTITAWTLVSIDQKTWELDFTMEAAEFWDLCANSVGHTCALPRAVPTFSHLSLVDPGVVSFLLMEKIDDEFLFWIVELDMTNKVLRSLPTLYIQVEEEEEDDDEIKKVQEVQGPSRCKAYKRVFHGEYFFPSHFTSYLRKNPIQSRLRSQMMQKAKQESVMQKKQVNVMQEIPDCSTR

SEQ ID NO: 168334 - protein, 115 aa, Oryza sativa
  unsure (1)..(115): unsure at all Xaa locations
  Clone ID: PAT_MRT4530_66859C.1.pep
RRDAGDQTLHGVAHISWCTNRQKCRLLMELXHGCYHTNSCCXHEFCYCWGAXYTNGIQTCQCVLWDEESIXAASTAHYTHACEIWTRDTFDCMPTAIEGTRXQERAQMALIQRFL

SEQ ID NO: 168335 - protein, 956 aa, Oryza sativa
  Clone ID: PAT_MRT4530_6685C.1.pep
MPPKSDIEFRIDLVPGTTPIHKRPYRMAANELAEVKRQVDDLLQKGYIRPSSSPWGAPVIFVKKKDHTQRMCVDYRALNDVTIKNKYPLPRIDDLFDQLKGATVFSKIDLRSGYHQLRIKEEDIPKTAFTTRYGLFECTVMSFGLTNAPAFFMNLMNKVFMEYLDKFVVVFIDDILIYSRTKEEHEEHLRLALEKLREHQLYAKFSKCEFWLSEVKFLGHVISAGGVAVDPSNVESVTNWKQPKTVLEIRSFLGLAGYYRRFIENFSKIAKPMTRLLQKHVKYKWSEECEQSFQELKNRLITAPILILPDLKKGFQVYCDASKLGLGCVLMQDGKVVAYASRQLRPHEKNYPTHDLELAAVVHALKIWRHYLFGTRTEVYTDHKSLKYIFTQPDLNMRQRRWLELIKDYDMGIHYHPGKANVVADALSRKGYCNATEGRQLPLELCKEFERLNLEIVSRGFVAALEAKPTLIDQVREAQINDLDIQEIKKNMRRGKAIGFLEDEQGTVWLGERICVPNNKDLKDAILKEAHDTLYSIHPGSTKMYQDLKERFWWASMKREIAEYVAVCDVCQRVKAEHQKPAGLLQPLKIPEWKWEEIGMDFITGLPRTSSGHDSIWVIVDRLTKVAHFIPVKTTYSGSRLAELYMARIVCLHGVPKKIVSDRGSQFTSNFWKKLQEEMGSKLNFSTAYHPQTDGQTERVNQILEDMLRACALDFGGSWDKNLPYAEFSYNNSYQASLQMAPYEALYGRKCRTPLLWDQTGERQVFGTDILREAEEKVKIIQERLRVAQSHHKSYADNRRRDLSFDEGDYVYLRVTPLRGVHRFHTKGKLAPRFVGPYKVVSRRGEVAYQLELPQSLAGVHNVFHVSQLKKCLRVPTEEANLEQIEVQEDLTYVEKPIRILETNERRTRNRVIRFCKVQWSNHSEEESTWEREDELKSAHPYLFASSSESRGRDSV

SEQ ID NO: 168336 - protein, 81 aa, Oryza sativa
  Clone ID: PAT_MRT4530_66860C.1.pep
TSTHASRRARFTHRRRSRPPPPQAGRDRPARRSDGPRAGRPGVDVANDRNAMRSSPDPRPNKEEANSKERIGSRPEEAAAA

SEQ ID NO: 168337 - protein, 176 aa, Oryza sativa
  Clone ID: PAT_MRT4530_66861C.1.pep
PVQDPAKMTEVIVKALEITGQRGIINKGWGGLGTLAEPKDFVYLLDNCPHDWLFLQCKAVVHRGGAGTTAAGLKAACPTTIVPFFGDQPFWGDRVHARGVGPLPIPVDQFSLQKLVDAINFMMEPKVKEKAVELAKAMESEDGVSGVVRAFLRHLPLRAEETTPQPTSSFLEFLGP

SEQ ID NO: 168338 - protein, 49 aa, Oryza sativa
  Clone ID: PAT_MRT4530_66862C.1.pep
MANASVPKPAKRLSRKRSFRLGLPLLCGQPASVGMRTWASALRVLRGRR

SEQ ID NO: 168339 - protein, 94 aa, Oryza sativa
  Clone ID: PAT_MRT4530_66863C.1.pep
KPHLSAIAINSIEQLCKKKKRPFLVHEDPNKSTKYLGIKSIRYNYNSYNLCSTSKLLFACHSGTASPESHRMVNSCQKHAESLWWHNFIFCMSH

SEQ ID NO: 168340 - protein, 162 aa, Oryza sativa
  unsure (1)..(162): unsure at all Xaa locations
  Clone ID: PAT_MRT4530_66864C.1.pep
MTISLPATAAALSVVLAALCLLVVPAAGFYLPGVAPNDFEKKDHLPVKVNKLTSIKTQLPYSFYSLPFCKPDTIVDSAENLGEVLRGDRIENSPYVFEMRVPQMCQIVCKISVGEKEGKVLKEKIEDEYRVNMILDNLPLVVPIQRVDQEGAYFYQHXVHVG

SEQ ID NO: 168341 - protein, 143 aa, Oryza sativa
  Clone ID: PAT_MRT4530_66865C.1.pep
VGGARASSPRWRSPAVEGGSGAGRHRRHSCRSHRPTPPVPLASSTTDAASIPTPLASSSARRGGRCRHHSCRSHWPMPPAPLPPPSPCRSRHPPPPVPLLPAPPPSPHRTEVGAALQRREEKNWREVGEEKGEKRGGRRGIRG

SEQ ID NO: 168342 - protein, 457 aa, Oryza sativa
  Clone ID: PAT_MRT4530_66866C.1.pep
LTPPPPPPPPHPLHHLHPPPPAPVPPLAPPRPQLPATRQTAQAASPSRARQRTGEEEEAAAETRGLRLLSLLLRCAEAVAMDQLPEARDLLPEIAELASPFGSSPERVAAYFGDALCARVLSSYLGAYSPLALRPLAAAQSRRISGAFQAYNALSPLVKFSHFTANQAIFQALDGEDRVHVIDLDIMQGLQWPGLFHILASRPTKPRSLRITGLGASLDVLEATGRRLADFAASLGLPFEFRPIEGKIGHVADAAALLGPRHHGEATVVHWMHHCLYDVTGSDAGTVRLLKSLRPKLITIVEQDLGHSGDFLGRFVEALHYYSALFDALGDGAGAAEEEAAERHAVERQLLGAEIRNIVAVGGPKRTGEVRVERWGDELRRAGFRPVTLAGSPAAQARLLLGMYPWKGYTLVEEDGCLKLGWKDLSLLTASSWEPTDGDADADVAVAGDTPHESHDS

SEQ ID NO: 168343 - protein, 252 aa, Oryza sativa
  Clone ID: PAT_MRT4530_66867C.1.pep
GRETVCVCDGGRGKEPPWGPRGCSCAPTSRLLPGGRRRPSLPSEPRLAAPAAGSRAPPSRASVRPSAAAAPLAARGLPHHASVAGQNSGIYTVGDFMTKREELHVVKSTTSVDEALEMLVEHRITGFPVIDDEWNLVGVVSDYDLLALDSISGNGLAEVDIFPEVDSTWKTFNEIQKLLSKTNGKVIGDVMTSAPLVVRETTNLEDAARLLLETKYRRLPVVDSSGKLVGIITRGNVVRAALKIKKKFEGEL

SEQ ID NO: 168344 - protein, 51 aa, Oryza sativa
  Clone ID: PAT_MRT4530_66868C.1.pep
DAWVQVDDVPVRTFKKYDDTVVPLGGGYDSTPDTCCTIHYWNTSHRNVYTY

SEQ ID NO: 168345 - protein, 451 aa, Oryza sativa
  unsure (1)..(451): unsure at all Xaa locations
  Clone ID: PAT_MRT4530_66869C.1.pep
MMITSLMILGVDPADRYGSDNDGHSPRHYPQAEEGEEDDEIERLFKGGKKKKKNDRPRADIGLIVEQFIAEFEVAAEEDANLNRQSKPAINKLMKLPLLIDVLSKKNLQQEFLDHGVLTLLKNWLEPLPDGSLPNMNIRTAVLKLLTDFPIDLEQYDRREQLKKSGLGKVIMFLSKSDEETTSAPKKKNLQASKLSVEGRGMIKIRQPAPSPPLAAAAAMPRRGETTVVPIEMGGGGGGGGGGGQERPKAPRRHGSHGPGHYGNHHHHRSRPPPPPPPPSEFRPFRRWFPFLVPFFVVVNVALFVVTMYINDCPAHMQATGDAIGGDVGEGAASQGCWLEPELGRFAFQSYKENPLIGPSSATXLKMGALETSKVTNDHEGWRLITCIWLHAGVVHILANMLSLLLIGIRLEKEFGFMRIGTLYVIXXVGGSLLSALXMVSNILXGASGAL

SEQ ID NO: 168346 - protein, 291 aa, Oryza sativa
  unsure (1)..(291): unsure at all Xaa locations
  Clone ID: PAT_MRT4530_6686C.1.pep
LPGPTRQPLSAPEGGHVGAAGGRRRARAPMVAGGGHRHGGAAAVRGEGKGEMRRRSTAHPRSTVTTKKAVGADEGGGAARVDGDGGAPAVGELDEGVDGVDGSAAKPEEAAPGREAVPASGEGXPKVVGDGGERGRRRELDCGEEKARQRXWNGRRRCGEGLNRVGRGRGRPAXEGIGAGGPAAINGAGEICGSKSGHFNVRERGKKXGGKGEGITGSGGIRGGGGARRGRGGGSGGRKGMTGGPHPSARVAGGPARQRRARGERPDGPRGRGERGREMGRAGPREGKRDF

SEQ ID NO: 168347 - protein, 133 aa, Oryza sativa
  unsure (1)..(133): unsure at all Xaa locations
  Clone ID: PAT_MRT4530_66870C.1.pep
MVYLRVYRRSLYTLRKFITKSIDGRHCIVQGPMSPSSTWKPPDLRYKNDPLGGPKTSNLIAKITTIAYEAGAYRSQVVGXSSRINSTMISSILVPAYPNTLYIRSTSILRRHSSSGMMTQRWSRKLDCVVFLS

SEQ ID NO: 168348 - protein, 502 aa, Oryza sativa
  Clone ID: PAT_MRT4530_66871C.1.pep
MELGRSSDLNISLQSRRHSYLQEIRSLAVDSAGWSPSSSSRSARSSSYYSSSKSSSSRHRYAPYSISSSRRLARLEDKSPRDIARRMVRDGFMGKLIGEFGRAPRPALERWFSELDVGWVLRSALEKEKSELALDKLYDLAVQRWTRGFTVMAEALSATQRHLQEEGRSTAQVDRDDDLRLVRFVEATVCKMLAFANSLVAVADKTWNPMNKLSGLMNVRSCISHASEIIMLSLKKETLWLPDSDEMLQGLLNKTSNIFSTAKDNLGQAIQRMANDAEAVTPVLSGMHSWETFPQSAEIHKATHLIMDYARLFWGHIDELNSILGQCWPHRILKCDIIEQMISNLIDHLEKKSESFSDPILRYLFLLNNSYFIQDQYIAITGYSLPSDSKIGIKYCDYRNCYLNVSWDTVLSCLHIKMTTLWFSKPSQLARFKSEFQRTCRHQKLWKVPNPELRRSLRKAIIDKVITGPTGYRTYLEAHPEQEKCGSNQQDMEDMVNELFEG

SEQ ID NO: 168349 - protein, 209 aa, Oryza sativa
  unsure (1)..(209): unsure at all Xaa locations
  Clone ID: PAT_MRT4530_66872C.1.pep
GRDACLALIARPSRTCNWVVSQDISSLFDSLRFDEDLNADVXEFWTNLXVPYPTIHFMLLRYALEIXAYNVYHEQLSVADIKSSVLQXPHMMRKYDPRHGNDMAXWLMDREDDLPEDLNADEVIIKTKRTIELAHCRPNVLKCPIKYQPASVVRTXDLVNVDSAVCMIFNSAIVVDVYSRIQHKFDLMYSKRAFVHXYVREGMEEVELS

SEQ ID NO: 168350 - protein, 78 aa, Oryza sativa
  unsure (1)..(78): unsure at all Xaa locations
  Clone ID: PAT_MRT4530_66873C.1.pep
MLKWSAKKTPEAKMNSVTHEVDSIALVDRXLDATPTWRVNCRNKFSAIXKGGRARDLKVDGCGDKGFRQVQALSMRGN

SEQ ID NO: 168351 - protein, 56 aa, Oryza sativa
  Clone ID: PAT_MRT4530_66874C.1.pep
DCCIIIAQQLALKHHHHGKLRHSNHHNKSSLNSRHASCPQSSLFGGTCMIQGTMWM

SEQ ID NO: 168352 - protein, 97 aa, Oryza sativa
  Clone ID: PAT_MRT4530_66875C.1.pep
VPDSFSLQLLQSNNGMVPALGPASVSKGPCPPFGRTFPGAVSRGPRGFFSGFPFSGNFFLGVLGTLARVFLFFSGGFPPSGGLALCLNSPIWARFSP

SEQ ID NO: 168353 - protein, 244 aa, Oryza sativa
  Clone ID: PAT_MRT4530_66876C.1.pep
MPSFVDGPTLRSLLRPSTNGRRTKASDGGGGGGGGGIFKMFKLMPMLTSGCKMVALLGRHNRALLADHATTVTLFGHRRGRVSLAIHEDTRAPPVFLIELPMLTSALHKEISSGVVKLALESDTRSARRRLVEEYVWAVYCNGRKAGYSIRRKEASDDERHVLRLLRGVSMGAGVLPAAPEKEGGVPAGPDGELTYVRARVERVVGSKDSEAFYMINPNEGGVGGDSAGDGSAPELSIFLVRMK

SEQ ID NO: 168354 - protein, 41 aa, Oryza sativa
  Clone ID: PAT_MRT4530_66877C.1.pep
PGCPVCGTWWVVPRVFPKLFCRRLIGKPKIASAGVRKKKER

SEQ ID NO: 168355 - protein, 90 aa, Oryza sativa
  Clone ID: PAT_MRT4530_66878C.1.pep
TPRGGPLLFQHREGGFGFPPLGGRSRGPLLMFCGWRFPFPPCPGTPLLNLGLPAPLDPPFWEDPFCRVRPCFFFRPIIYIGPLHANIIEC

SEQ ID NO: 168356 - protein, 197 aa, Oryza sativa
  Clone ID: PAT_MRT4530_66879C.1.pep
GRSIEIELDGGERRRRGDDEREGQGRDPLVVGRVVGDVLDPFVRSTNLRVTYGSKTVSNGCELKPSMVTHQPRVEVGGNDMRTFYTLVMVDPDAPSPSDPNLREYLHWLVTDIPGTTAASFGQEVMCYESPRPTMGIHRLVFVLFQQLGRQTVYAPGWRQNFNTKDFAELYNLGSPVAAVYFNCQREAGSGGRRVYP

SEQ ID NO: 168357 - protein, 229 aa, Oryza sativa
  unsure (1)..(229): unsure at all Xaa locations
  Clone ID: PAT_MRT4530_6687C.1.pep
MSRVSTSWGFVYSSVNKAEGRSARTGSTGVGPTQQPLGPRWTGCTRLTPAGAVGPTRQPHPRARAADGRAPHGSRGARPKAASPAQPTGGGAPAPLWSPAAAIGTAERRPREGRGEGNEMGGSRLTPVRRRRRKRRPERRKAAARLGXKRTAAFRRSATETERWTRSARLRRTRRKRRRSGRKSGATTAADRSSAATAEREXDGASSIPTXRESGEWRKWWXEARGAFI

SEQ ID NO: 168358 - protein, 105 aa, Oryza sativa
  unsure (1)..(105): unsure at all Xaa locations
  Clone ID: PAT_MRT4530_66880C.1.pep
VIREESSSSRGSFETNYPCAPVLASKYRRFMIXVHAKGTIADDEYAILGSANINQRSLAGSRDTAIAMVAYQSHHTWTTKGGYPCRQGYWYRTSLWAEHLGMVDD

SEQ ID NO: 168359 - protein, 286 aa, Oryza sativa
  Clone ID: PAT_MRT4530_66881C.1.pep
MVGSPSNPSVFTPATTRRWRRRRGAPGRSEALVDPALRRPIRCRGRRLLRQLRRTAAALRSARRRRRYTPFDSINLFLDNLDLGDCTIRGNLEAFSCKHTGNDRRLSISLEHEILDCLSKSSDSDHSSPVEHLSCRSSRKTLIYLVLTLSHMYPDYDFSAVRAHLFFKEEEWESFKEMTDTYLSEASKQWAATNEGTSLLDSMTNVIDEVIKIGESDIYSYNPDQDGDPFLEKGVIWSINFFFYNRKLKRVVSFRCSCISKISGDDFLTSAPSDGEEEDALIDMDI

SEQ ID NO: 168360 - protein, 88 aa, Oryza sativa
  Clone ID: PAT_MRT4530_66882C.1.pep
MLLVIKYACCCSPLTMLNRVWFVKKGCRLLCQKWTNVCFGLQWSFFQFAAKPPVYRWVGFSGPFKPSATMSNEWACEEWWNNLSGCDA

SEQ ID NO: 168361 - protein, 138 aa, Oryza sativa
  unsure (1)..(138): unsure at all Xaa locations
  Clone ID: PAT_MRT4530_66883C.1.pep
LEHKLAVVCKSHFHDAERLRKPVGYVDPTKVYHRQHTVKMHEDCEELKDKEPTEKEAYIEKLHDHKKFEVATTLSVXVLGYETSKSNWFNSXYSDHYILLLIYPVNYLVVVLDLTNYNADSYIKFLTIMNFYHSYYKN

SEQ ID NO: 168362 - protein, 160 aa, Oryza sativa
  Clone ID: PAT_MRT4530_66884C.1.pep
MKFLEYTPFDSINLFLDNLDLGDCTIRGNLEAFSCKHTGNDRRLSISLEHEILDCLSKSSDSDHSSPVEHLSCRSSRKTLIYLVLTLSHMYPDYDFSAVRAHLFFKEEEWESFKEMTDTYLSEASKQWAATNEGTSLLDSMTNVIDEVIKIGESDIYSYN

SEQ ID NO: 168363 - protein, 34 aa, Oryza sativa
  Clone ID: PAT_MRT4530_66885C.1.pep
MDVSMALGQRMKEDTMALGWMCHDGWRGIAIDKI

SEQ ID NO: 168364 - protein, 147 aa, Oryza sativa
  Clone ID: PAT_MRT4530_66886C.1.pep
TRASSLPDPAAAGLIPSRSDGAGLVPLGSDETGGGRRWDRKRYQTAPGPDRSTVGAGSVARQRQASSGGGIAACGLAFEVVMGLPCLRAPSQAGRGGAGVGLAALLPFRALHYCSGGGDSIGNAETENVINGGNNNNTSSSCRAFSG

SEQ ID NO: 168365 - protein, 74 aa, Oryza sativa
  Clone ID: PAT_MRT4530_66887C.1.pep
SLWFVGKLFSLWSHFEEFLSRPCSDKSAFSNSFEAEAAILLPILNKRKKSPTRLHWLSKGHLPISPSPKAQSEH

SEQ ID NO: 168366 - protein, 411 aa, Oryza sativa
  Clone ID: PAT_MRT4530_66888C.1.pep
MAKRHHNYARRQEGLASIRHKVVTNLLFLYYSKYDDEYDMLNPFELLVAMDSIKQNVRANLNMDYSVSLEIHLHTQEKELKSPNSVSSMIDVTSDEVAICNNDGENAKLANISTTKDSSSSAAGNDSSGFKWLGPESHSKKREELQILLAKGIYIHVIRRRGDRIKVRYQHLQDPETPRANLEEWLLVTRTANPDPLCIRLSGRTRIRPHNMSERENPSTIGVGTVIDGWLYDGWWEGILLKLVAMSTEFFPLSEFAGEKKMVLFHRDQLRHSLEWIDSKWKAFAHREDLRISHYCTRSSYKRRSNEANGRPSNKQRVKLYYMTLRMNIDCNGCYHKIRRALLQMQELESHLIDRKHGRVSVFGAFSPQDVAIKIRKRTNRRVEILEVREAAPPPPFVGYYGGGGGGGHAA

SEQ ID NO: 168367 - protein, 320 aa, Oryza sativa
  Clone ID: PAT_MRT4530_66889C.1.pep
MKNSSNKRSLVADQWHPSSVCCDHRAALREIAKGQSLVTQLRAIVLPALHSDERCDLAAQMLEGILDCSRKAVSQLQLLLSSPHDDDDHHHVDDKRRVRKIISSSDDDDHCSSKAAEDDNAKPLRQHKRRRFGDSVSLETPVPHYDGHQWRKYGQKHINNSKHPRSYYRCTYRQEEKCKATKTVQQREDLHHANSYNGDHPIMYTVVYYGQHTCCKGPAALADDHVVVEASQISTDSHCQSPSSSSDLQAAEVHAGNSSQCSNISVTCSPSVVVEDCNKLLDMMPAADELTADVLLFDMTAYAPLDLDINWEMDTNALWV

SEQ ID NO: 168368 - protein, 63 aa, Oryza sativa
  Clone ID: PAT_MRT4530_6688C.1.pep
PGVVGLVSSLSHLLSSWCYRPLLCPSACFVLFVGSAVWFYMCFCRFVRGVVRYPTSAVHETGI

SEQ ID NO: 168369 - protein, 69 aa, Oryza sativa
  Clone ID: PAT_MRT4530_66890C.1.pep
PPTARRSHPTESPHRSHIPIPRKPHPPSSPHPRSPRVAPTPNPKPPAAAPPAPPPDRWERTPALAPASR

SEQ ID NO: 168370 - protein, 123 aa, Oryza sativa
  unsure (1)..(123): unsure at all Xaa locations
  Clone ID: PAT_MRT4530_66891C.1.pep
APAPPTPTAPPQPGNVLYLFCYSQNTPNTXTNXQGPSGXGXPPSRRGRRRGPGXRKRRLLFFFVALXQRARAAGRHGAAGHRRAPEALRAQXHRRIKHRQHXRRRRRDVTSPLGPXARCAMQS

SEQ ID NO: 168371 - protein, 64 aa, Oryza sativa
  Clone ID: PAT_MRT4530_66892C.1.pep
SLKHGHRHGYSENYPHKALLNEKRLDVNHVELLSQMSLTQRFIRVRQQRSFHCSRLYLSSTWRA

SEQ ID NO: 168372 - protein, 462 aa, Oryza sativa
  Clone ID: PAT_MRT4530_66893C.1.pep
MAVASLVDASDGSGIRGYLIEHRSECNRSAKLYISVDLKLELFTVLNYTVDDVERGIAEGKNDGVKDKMRGVAQQVIALKVYFMDSFQHGMDADKHHIFGERGNMIQLNMCASDGRSVVGQRCQRLGCNNVVEGQTLLCKSHSIGQRCQMLGCPHIVPDGSVLCMSHGGGRPLGEPGSSTVACSKSEISIKYEGESGFRVTQNAGNDLGSAGIYNPDGDVVMCKYQGCSKRAQGNAMYCKIHRGGSKGCMVQGCTKGAHGGTPLCIAHGGGKRCAVTGCPNAACGSSQGLTDRCVRHGGGRRCRFDGCVKGAQGNTDFCIGHGGGRRCKFEGCGKSAQGRSDYCIKHGGGRRCKFQGCATSAKWGMDFCSLHRKSLMSGSNSSHEMLPAPPPKRRAKKTKTAVGPSGLSSDPKSAESVMIKHASNAGHQQQPIHSMKSSPSSGLTASTEGDVAARSHALFGL

SEQ ID NO: 168373 - protein, 660 aa, Oryza sativa
  Clone ID: PAT_MRT4530_66894C.1.pep
MAQPGFYRDLMCNSHKAEASSWAFCHIHQKLVDVHSMCESCLLSFATNKKSNLATYRSLAGKLGVGIGNEGFRPSFSLDNSSEASVIKEDITNILCSCCSSPLKVKSYPSMVLQNIASAIDTEVNTRHVSRDQLIEEISLVRYSELKTSDSESEPWQHGGVASLLDDAVDNLKEDFTLSHPKTKFAGVIPTDDIAQDQVAKNSDLIQLQNGGSDSKNSQVSAELYHFRADGNADLQSTDFSSKTVQHPTEDSDTTDKSEDDVWHNALDSISELSVTDKPAETSTAENEPKAEFTDRTAMKDSFKAHEDLQLLLSQVSPNDAINIPGVQEQAILNNITRALSLDRNYSGSISESMAIDEAEEHCTVDQLKKQIELDRKSISLLWKELEEERNASAIATNQTMSMITRLQEEKAAMQMETLQYQRMMEEQSQYDREDLQKMAAMVQELEAEIEGYKTKLRDQSLVNEIRDAMRISRSEECETSMSRTARSLSLFEDEKAYISKHLKKLRQNLHQFSNNGKFIDPKKIDDKEDTFDVTNSEDVYQDADEDSEMTNSENSEMTNVIRNGRNFRYLSNGTEGLTNGKDDPEGQYYAMVSENDLVNFEDEISELTAKLKALEEDRSFLEHSINSLRNGQEGKELIHGIACSLRELRKMGITWKDCD

SEQ ID NO: 168374 - protein, 200 aa, Oryza sativa
  Clone ID: PAT_MRT4530_66895C.1.pep
MEASQAASAWSSVNAGIVLSLAAVLWTVVWNSLQSLQLHHLVGRHLARHARRLAAVVDPYLTVTVAEHDGGRMKRSDAYREVQAYLHRATCDASAGVRHLRAEPAKNPDAFVLSMADREEVADVFRGGVTVWWLAYSTPPREDDAGGGFYWGGRAARPARRRVRLSFLERDRDVVLGEYLPHVRREGRAAMVRNRQRKLF

SEQ ID NO: 168375 - protein, 106 aa, Oryza sativa
  Clone ID: PAT_MRT4530_66896C.1.pep
MASVTSGVQWEDGLFGASHLFASWNGLLVLNHRGCNQNGSSGGGRTRLRRPHDGRRAARSTAGGRRLRWSMAAQAPLRFEGGDGGSLAWICRVAAGNNEALRPGSS

SEQ ID NO: 168376 - protein, 99 aa, Oryza sativa
  Clone ID: PAT_MRT4530_66897C.1.pep
MLALFWSDQWIHGRSMAFMAPDLLLVVPPRLRASRNVAFALAGNSWVRDIRGVLTVPVISQFLMVWNAVCPIQLSPSTGDRLVWRWTGEQCYSARSAYH

SEQ ID NO: 168377 - protein, 800 aa, Oryza sativa
  Clone ID: PAT_MRT4530_66898C.1.pep
MAPVAAPVAAAAAEPRGMGADATMTRLEEEYQVRLALAISASDHAGLVDADSVQIRAAERISLGGAAGDRGPMEALSARYWNHCVVNYDERLSDGFYDVCGAPMHPHFQAKFPSLTTLRAVPVGGDAAYVAVLVNRERDPALKRLEGRALAIAAQDRAEHGGVASPELVQKIANLVVDAMGGPVDDADEMNREWGVKSRALCLQRNSIVLPLGLLRIGLSRHRSLLFKVLADRVNLPCKLVKGIYYTGTDEGAINLVKIDFDSVEYIVDLMGAPGTLIPSDISGSQFQDSNNSQLSNDAIEESVAELCIALEQISAGCKNTSDMGGSSSEQKSALALASSQLEDIFHTENPLKQSTISDGGEIPHLMKVNDAPMYLVPTEVDPQFAQNLQDLLLEGTALLPTYEKPEICKHTASEDDKTAGWLVIAKTGQNLPNGHVAEDSPLQHGNTKTLAVVNCFHEDAQHDVGNTEAIGRNLDLHDHTAHAIANEDQRFSEDSLVKMPGSSNGNLDKSSCSSTKTISSVIDDVADYEIPWEDLHIGERIGLGSYGEVYHADWNGTEVAVKKFLDQDLSGVALDQFKCEVGIMSRLRHPNVVLFLGYVTQPPNLSILTEYLPRGSLYRLLHRPNSQIDETRRLKMALDVAKGMNYLHASHPTIVHRDLKSPNLLVDKNWVVKVSDFGMSRLKHHTFLSSKSTAGTPEWMAPEVLRNEPSNEKCDVYSFGVILWELATMRVPWSGLNPMQVVGAVGFQNRRLEIPKEIDPLVATIISSCWENDPSKRPSFSQLLSPLKQLQRLVVPENC

SEQ ID NO: 168378 - protein, 120 aa, Oryza sativa
  Clone ID: PAT_MRT4530_66899C.1.pep
MAAAATAAASPVEGLTGGGGGGGGGVDGLFVELWRACAGPLVTVPAVGERVFYLPQGHIEQVEASTNQVAEQQGAPLYNLPWKIPCKVMNVELKAEPDTDEVYAQLTLLPGEQQDGNGSG

SEQ ID NO: 168379 - protein, 257 aa, Oryza sativa
  Clone ID: PAT_MRT4530_6689C.1.pep
MLEKVVVQRGDEPTRRNGWPKGRRRRRGWRGRRGDGVPAKPRSSWRRGQHSDVDRRTGDVQEPAGGGEVLDADEEATPASFGRGGGDAGDEGGVAEPREVVATSAGARETRQWRPEVEQWRQRHCFAGENASPVLSPRNGGLTEGEEVAARPREKTARPDGAPARRERRLEAAGAEEREGRRWERASGGHRAKRRAGRGGGGGGDAGGGDGAAGRRTVEAAQAAGGGRRRGRERRAAGRWLGTTGRLGRGLKRENGG

SEQ ID NO: 168380 - protein, 49 aa, Oryza sativa
  Clone ID: PAT_MRT4530_668C.1.pep
MMIREKENNGGGDNEGAIYRRQYVTLTGLGPQVDKLRDVDSSKRPRDPE

SEQ ID NO: 168381 - protein, 96 aa, Oryza sativa
  Clone ID: PAT_MRT4530_66900C.1.pep
VCTSAVEFVNAKRVTTSGVLIWSFHHRGVHGNAFISSNDLNRMLIKRAQLDLSNSSLSVLTEKWFLVVIDTIGNAVHKGECQLGELALHNHLLVVL

SEQ ID NO: 168382 - protein, 254 aa, Oryza sativa
  Clone ID: PAT_MRT4530_66901C.1.pep
MAMRWRAVAGDGSRRREAATGGAKGSGVGRKREKWEEEEVPHRGVAGAEGEGGDDDSASGGADGRRQRPRGERRGVRGREETRGDKNGRPKIGRTARLTGVRGEKGSGGVPATRGGGRDEPRGGEVNGGGGVRPEVAASGVASSEQCKRDGEHGRGRRARETRDGARGSVFMGEEGEDMDGNPLDLAGDVGRWGGRERGGFKLNPAPCKRARVRERSGKWATTWAQAQERRGMGSDGVEDVGRRRMELGSNGWR

SEQ ID NO: 168383 - protein, 77 aa, Oryza sativa
  Clone ID: PAT_MRT4530_66902C.1.pep
MADAEKDDGAAVFFNPAMGSRHFSGQDHALHDEHNMEKLRTVFHEEREDDVTITIMDTTVAHIMDQQEAITIKSSKC

SEQ ID NO: 168384 - protein, 968 aa, Oryza sativa
  Clone ID: PAT_MRT4530_66903C.1.pep
MAPPENPNGAGPAAPSDPAQPQPQPPAKSKWKKKDEKKDDDLSEEDLALKEQLELYVVRAQDADPGVQKLALESMRQEIRSATSSMTSVPKPLKFLRPHYGTLKSYFETMPESSDLKRYMADILSVLALTMSAEGERESLKYRLLGSEGDIGSWGHEYVRNLAGEIAQEFQKRQDDDMPIDALMELVQQIVSFHMKHNAEPEAVDLLMEVEDLDLLVEHVDSTNYKRTCLYLTSSSKYLPAPDDMLALDIAYTIYMKFEDLTSALRIALLLDNKSMQYVKQVYTATEDLQLKKQFSFIIARHGLAMEIDDEIAADGNDKEGLQEIVNNSKLSEGYLTLARDIEVMEAKSPEDIYKVHLIDGRGASSSLDSARQNLAATFVNAFVNAGFGQDKLMTAPSDSSSSGASGNWLFKNKEHGKASAAASLGMILLWDTDSGLAQLDKYLHSNDAHVVAGALLGIGIVTCGVKNDCDPALAILMEYINKDDTNIRIGAILGLGIAYAGSQKEELKSYLSTVLGDSEKSTLEVLIFSAIALGLVFVGSCNEEIAQSIIFALMERSEAELAEPIIRLLPVALGLLYLGKQESVEATAEVSKTFDEKIRKYCDVTLMSLAYAGTGNVLKVQKLLGICSQHLEKGETHQGPAVLGIALIAMAEELGAEMAVRSLERLLQYGEQNIRRAVPLALGILCISNPKVNVMDTLSRLSHDADADVSMAAIISLGFIGAGTNNARIAGMLRNLSSYYYKEAAHLFCVRIAQGLVHLGKGLLTLSPYHSDRFLLSPMALGGLVTVLHACLDMKSTILGKYHYILYIIVLAMQPRMLLTVDEDLKPLSVPVRVGQAVDVVGQAGRPKTITGFQTHSTPVLLAAGERAELATEKYIPLTSVLEGFVILKKNPEYNEERGILGNHAATWDRIFAYWVPSSAPPGVNRIGLLSLLPESRVLEQSSLNSEILFGCAMTDVTYHLYPNMGI

SEQ ID NO: 168385 - protein, 61 aa, Oryza sativa
  Clone ID: PAT_MRT4530_66904C.1.pep
SPCQIPTRKSSLLSLPWLITSRTPHNQWLTWERTFSNSDRDSIRSILTSHKCHPSRRYASR

SEQ ID NO: 168386 - protein, 90 aa, Oryza sativa
  Clone ID: PAT_MRT4530_66905C.1.pep
DAWADAWARMLLTVDEDLKPLSVPVRVGQAVDVVGQAGRPKTITGFQTHSTPVLLAAGERAELATEKYIPLTSVLEGFVILKKNPEYNEE

SEQ ID NO: 168387 - protein, 106 aa, Oryza sativa
  unsure (1)..(106): unsure at all Xaa locations
  Clone ID: PAT_MRT4530_66906C.1.pep
HRHTPSSTYGGRQEGFSAISDLVEYGFKEEDYPVVDYDLMNKEQHRLRPTGCRAITCXIRGPNLYKNLYLHLFYLNLAYTLVSKIPIXAKYRSRDLRRRHLQQQAT

SEQ ID NO: 168388 - protein, 61 aa, Oryza sativa
  Clone ID: PAT_MRT4530_66907C.1.pep
SVALEGIRIAVPGQSRWRPEGRRHPVGDRRRPLQDQAGVLTATTTSPTLTIREVVRGFYIP

SEQ ID NO: 168389 - protein, 351 aa, Oryza sativa
  Clone ID: PAT_MRT4530_66908C.1.pep
MPKKMGVNSKAEAARERRSVAEADRRDRVERAKEEEYWREAEGPKSRAARRREEDAEKRAEAAARKAENRRLAEAEAASASASAPSKTAARKASRVGAPAPKVTEAELARRREDERLRLEREAEAAKKRAARTAEEEEYERVVLVANTNRDDSIIEARSVDEAIARMSLVDSEGALPADKHPERRLKASFKAFEEAELPKLKEEKPGLTLNQYKDMIWKLWKKSPDNPLNQGYDCQLWWSTRMYEEWMQYGYRIKVKNMGRQQPRKEGPRAGMCGEGKVLVSSMSMHEEKKSGSGVNCHGWLQSDDAFLLNCRISKTSKWVRTSSDAHGLNVWEMISFSANNLQSDAVYIM

SEQ ID NO: 168390 - protein, 332 aa, Oryza sativa
  Clone ID: PAT_MRT4530_66909C.1.pep
MDGKPPPPNPNLPYREDCWSDGETAALVDAWGRRYVDLNRGSLRQPQWREVAEAVNARPGASARRRPPRTDIQCKNRVDTLKKKYKAERARGTPSSWYFYRDLDMLVGPTLSAAAAAGGGGSAKKPSPPRGLPMMRRRLESPSRSPSPPSPTPAVALPLPNYRQASNLPSAGLLFNKMAAAAAAESDSEDGYNNPNNNYEDDEDDGSQQSASRSVSSRSGGVAAAGAGGGGVSSSKRKRGGGGGGGFGELARAVETFAEMYERMEFAKQRHAEEMERQRIKFLKDLELKRMQAFVDVQLQLAKAKHGKHPDGATEMLMSLAALPFLSTPAYL

SEQ ID NO: 168391 - protein, 446 aa, Oryza sativa
  Clone ID: PAT_MRT4530_6690C.1.pep
MLRKYAVHTFGFSASHDPVPLRQISALSYGLYSFVCKNLDNITEAFARCLGGLRTVVAAEIRVDLKPKSSDKQQQQQPVLIKSIDSGGYESQVIGGGTSGKILIPVLYVDEVKKFIVHLKVPKVSATTVNNQQEILTADGDANSVDGKTVRIKEHKLAIRRPPEVVDQADLRPAPQVVEQVVVFKLLDMVPKTFQQRREDDHKGVKNTKVAVQLLQRNMDEIRRSDAWTDLDVGTRRRIDEQVKEIADHVEKGEGPAYVNSWVSSQEMQRANTMGSPNKVVAGRVRDAGDEDNSGGADPAPAPAHPAPTPIKQYSPRPDEKPADYPKSGQNPRPVVLPSEDLAPIQPPVLSSKQVVPAHVVVPPSCSEEISLRCPQCVELDFVDEHLAYWSNVKRDLLRVLDDAEAAAGLRHGVACFHDLSLGAINQAMYQSVCQAVEQARSLSKY

SEQ ID NO: 168392 - protein, 191 aa, Oryza sativa
  unsure (1)..(191): unsure at all Xaa locations
  Clone ID: PAT_MRT4530_66910C.1.pep
PAGLVSDAREEFKLKRLIRIWLPWSSPAMPPSSPAPATASASAMCSSTPSSTPACRGSATVASSPSSAATTTTPPSTRWCRRRPCSSAWGTSRRWXGRAGGRTPPATSTASCRRLACSPMPAWSSTSSSTSTTSSTASSPATTCGALRWPPATSATSGTTPTPPMAPSSSYASSSPFSTAIQSGRSSTGIW

SEQ ID NO: 168393 - protein, 46 aa, Oryza sativa
  Clone ID: PAT_MRT4530_66911C.1.pep
SITNEVDFLLFAAYKLYSYFIQLHKQRPFLSTDPCPTLSQILTDEA

SEQ ID NO: 168394 - protein, 394 aa, Oryza sativa
  unsure (1)..(394): unsure at all Xaa locations
  Clone ID: PAT_MRT4530_66912C.1.pep
MAILAGLQLHSTGKTQLGVADVIKGXRRRQAGPTSQRHKGAXHRGPGPPRRSTAGPXNRRPGLAQADRTATGRRGWGTVTAQSRPAEXMARGSAATGDDGRRRRGERQRMRAVAAHARERRRGAVRHGRWPTKGRKXEREGSAHRAARRQTGGRRQGTAAAGLLGKTARRSSGDGRRSGRGGRARPRXAEDLPVPAEPREATTRVGEDRSGVATRLEVAMVRERGGARGGGVPEAEWENGVGTGVELGGAMPAVVAQRRGGGWSGEERRLELVGECGGDGSSEGRAVRGARSSEKWGKWKGEAGYAFYGLGATGSCSREVATGRRGGRGIVGVVERLTGGDFRGESGGKGGGRGATGSHDRRARARGGGRKXGGVVGWLGRPWRRLEPEEGDDR

SEQ ID NO: 168395 - protein, 173 aa, Oryza sativa
  unsure (1)..(173): unsure at all Xaa locations
  Clone ID: PAT_MRT4530_66913C.1.pep
TSDRCLVSPPSPAGNGQSSLVPRXIRKPHRPSQGPSKLHHAHPCLDASTRGKLHYKPSHCPRWLVVSTIXLPGHPANRSLIAMGATSKTMHPQPTIQSHLEKRVADVIKGEGRRRQAGPTGQWHKGAGPPWTGPPSRSTAGPREPTAWIGLSRSDGHGARGWGTVTAQSRPAE

SEQ ID NO: 168396 - protein, 83 aa, Oryza sativa
  Clone ID: PAT_MRT4530_66914C.1.pep
KDTVNHLPISEQGNLWSCRITGLTLKRLDLESWCRDREKYIFPNASVLIPVPGKAGVHHTNMVQKAHLYYIDNIYIITKALKA

SEQ ID NO: 168397 - protein, 540 aa, Oryza sativa
  unsure (1)..(540): unsure at all Xaa locations
  Clone ID: PAT_MRT4530_66915C.1.pep
MAKVPDLGSDFTQKLLLDLRRRHEGLGFNSPVPPQRTSSSNAVALPRGQDGDRTRGGVGAVGEGQGGVWGGAERSRPGGGQPAGGEAAALTLPSAPESGSGVIKEKRVADVIKGEGRRRQAGPTGHWHKGAGPPWTGTTEAVHRRSTGTDGPDXAQADRTATXARGWGTVTAQSRPAEXMAHGSAATGDDGRRRRGERQRMRAVAAHARERQRGAVRHRRWPTKGRKGRGRGVLTERHDGKRAADGKERRRRGSSGRRRDGAPATGVAQEGADGLGLVAEDLPVPAEPREATTRVGEDRSGVATRLEVAMGPGWSSAGRCRRWRRHGAVVAGAARSGGWSSLVSGGEREHGGEGVPTMEWGKRSGAEVRQGTAKPQVAAEQHGDGCSSGGERMEXAGERRRXGAARGEQYRAREARENWGKWKGEAGDAFYGLGAMGSCSREVATGRRDRRGILGVVERLTGGDFRGESGEKGGGRGATGSHDRRARARGGGGRKRRRRGVARAALAVAAGQPEVGGGADRWGLGSHLSGRESGENGRGR

SEQ ID NO: 168398 - protein, 87 aa, Oryza sativa
  unsure (1)..(87): unsure at all Xaa locations
  Clone ID: PAT_MRT4530_66916C.1.pep
SPLRASRXAATTTASFPRAPLRAANDTTFRRTGSVGPGPRXGRRXPGRCHGGHXEDGCHGSGCLHPEECCSEEGEEEEGRTRGRTRG

SEQ ID NO: 168399 - protein, 441 aa, Oryza sativa
  unsure (1)..(441): unsure at all Xaa locations
  Clone ID: PAT_MRT4530_66917C.1.pep
LRLQLRSTTLLKRGNNSKTEYNHRTQXATPTMQTCKGIQGGEKRVADVIKGEGRRRQAGPTGQWHKGAXHRGPGPPRRSTAGPREPTAWIGLSRSDGHGARGWGTVTAQSRPADTLGSGGAARXVRRQPTARHSRQRRGXAAAATRSDGHRRRRRVVSRHRRWPTKGRKXEREGSAHRAARRQTGGRRQGTVAAGLLGKTARRSSGDGRRSGRGGRARPRSEENQGGARADFRRRGPVAKDLPVPAEPRKATTRVGKDRSGVATRLESSVSGGERERGGEGVPTMEWGKRSGAEVRQGTAKPQVAAEQHGDGCSSGGERMESXGERRXMGAARGEQYRAREARENWGKWKGEAGDAFYGLGATGSCSREVATGWRDGRGIVGVVERLTGGDFRGESGEKGRGRGATGSHDRRARARGGGGRKXGVVGWLGRPWRLQPASQR

SEQ ID NO: 168400 - protein, 438 aa, Oryza sativa
  unsure (1)..(438): unsure at all Xaa locations
  Clone ID: PAT_MRT4530_66918C.1.pep
LHFPIGLGKFTKVSVWALVDKVADNLPGWEASLMNIASRLIMVKVVLTAVHIYLMMVMDLPKWVIKAIDKXKRRRCFLWKGQENARXASDGSCLVXWDHVYRLLQYGGLGLHNXEKLGWALRMXWLWLQKTDPTRPWAGLPIQVPQSVHALFNVVVVTTDGNGXETKFWTDCWLKGKKIVEWAPNLFLMIPKKIKESXRTIVQALINRRWVDDILGSLTMLVIYEYLQLCDLVDGLILQCVGAVCXKISGSGSYTSKYAYXYFVGSIRFAPWSRIWKSWAPXPCKFFTWLAVNNRGXTSDRLAKFGLQHREACTLCDQEEETIXHLFVKCVFSRQLWFLILEKIGMAAAAPQSSSTRFSNXWFKAIQKVPKKEKKGLNSLVILGSWTLWMHRNHCVFYGTAPKLADALLLAKEEAQLWFLPASGAIIIDYSRAGWLVS

SEQ ID NO: 168401 - protein, 40 aa, Oryza sativa
  Clone ID: PAT_MRT4530_66919C.1.pep
KLIMGVMGCFRLYTRKFQWWPQNISSGSTYNSRCLNSLWA

SEQ ID NO: 168402 - protein, 1120 aa, Oryza sativa
  Clone ID: PAT_MRT4530_6691C.1.pep
MSFLIGFGTAPLYAQIPHDCDEEKCRVKVTLNSNREDIPSVMFEAGGGSYIHACQEVARIAIGELHESYNDRLADTEYRYHPRQPQGSDRGSYLEPAEIENDATTRHLVEMLWAMDETRAEIVIAAQDCEDRNRGKICKLEDKVDRLEKELAALKGEAPPQKARVRLTARKRALFVPRYQLAPKVRVVEKEATPAPVDPPVVNVSDDDEEESKRTHSKVEWGATQDDGDMVLTRSNGNGPNPNKNNNNAENPTLAQVLAQQAQLKNLMMQQLQNQQNQGNNHAPPPNKLVEFLRVRPPTLSSTTNPIEAGDWLHAIEKKLDLLQCTDQEKVSFASHRLHGPASEWWDHFRLNRTTAEPITWLEFTAAFRKTHIPSGVVSLKKKEFRALTQGSRSVTKYLHEFNRLARYAPEDVRIDEERQEKFLEGLNDELSNPLMTGDYHDFQKLVDKAIRQEDKYNRMEQKKRRIAHFKAQQGNTPTQHQPAKREQGSKPGVCFNCGDPGHYADKCPKPHRAKVVPAQNNPSAPATKARVNHVAAAEAQGAPDVILGTFPVNSVPATVLFDSGATHSFLSLSFAGNHEMEVEDLRRPLMVSTPSNQALSSQRSPSVRIEIQGVPFLANLILLESKDLDVILGMDWLAKYKGVIDCANRKVTLTSNDGQVVTVHALPSEPLRSSLNQITLEEIPIVQEYPDVFPDDLPGMPPKRDIEFRIDLVPGTTPIHKRPYRMAANELAEVKRKVDDLLQKGYIRPSSSPWGAPVIFVEKKDHTQRMCVDYRELNDVTIKNKYPLPRIDDLFDQLKGATVFSKIDLRSGYHQLRIKEEDIPKIAFTTTYGLFECTVMSFGLTNAPAFFMNLMNKVFMEYLDKFVVVFIDDILIYSRTKEEHEEHLRLALEKLREHQLYAKFSKCEFWLSEVKFLDHVISAGGVAVDPSYYWRFIENFSKIAKPMTRLLQKDVKYKWSEECEQCFQELKSRLISAPILILPDPKKGFQVYCDASKLGLGCVLMQDGKVVAYASRQLRPHEKNYPTHDLELAAVVHALKIWRHYLFGTRTEVYTDHKSLKYIFTQPDLNMRQRRWLELIKDYDMGIHYCNILKMCHFLILHHADSYVLNNLLNLGKYT

SEQ ID NO: 168403 - protein, 418 aa, Oryza sativa
  Clone ID: PAT_MRT4530_66920C.1.pep
MASATYFWSNALNAFLFNQGPMTPTLLDITMITGLDVTSSANPMSLNTKNQFDFRAKSIGGWSGYVAAYMGKGSVTPREHTAFLLMWLEKFLFCGLSCGPTTNGQFLAEALETKKQIPLGKILLGYLYQMLSNASAKIATGSVVGAGGPWWLLQTWLNLVVIKVVNWPPLIDAEFPRLEPTTNDDGKEVTHHRCMLYGEAASTPADSRAKLSAELLKDWFCSFYEGFQKDARVWFPYEDSVNFDLPADFRFEDINSKKFDKSREVFSAAISPCILPVGIHQGRNIQVSYEFYYPMSSARQFGMGQLPIGLFFADKIQCRGEISSTLMMDRLLNIPGPPLGSIENIELARFMSRNFDRWWGEWKQHIFHQSTSKYMTDLFPDVIPQTTWIWRVGPPEIFLEMTYHRPRSSGCFGETSNI

SEQ ID NO: 168404 - protein, 84 aa, Oryza sativa
  Clone ID: PAT_MRT4530_66921C.1.pep
MEDTHDYQHTPTRSHNIQANIRQDTPPDIDFTDRHGYSPTVSPDTVRRYESAIFDLAGYGLEEEDYPVVDYESDLQTDMSTTVR

SEQ ID NO: 168405 - protein, 324 aa, Oryza sativa
  Clone ID: PAT_MRT4530_66922C.1.pep
LDTINNINKLGEGGFGIVYKGVLPEGREIAVKRLSQSSRQGIEELKTELVLVAKLRHKNLVSLVGVCLEEGEKLLVYEYLPNKSLDTILFDYEKSKDLDWGKRLNIVSGVARGLQYLHEDSQLRVVHRDLKASNVLLDFDHNPKISDFGLAKLFEWDQTQDVTSHIAGTYGYMAPEYAMRGQYSVKSDAFSFGVLIIEIVTGRRNSSFSNSEQSIDLLSLVWEHWTTGTIEELLDPAIGSRAVNVLLKLINIGLLCVQDNPADRPAMSAVNVMLSSDTVSLQAPSRPTFSIQEMDGAAPTGDGNTRAAAAASPNELSLSELEPR

SEQ ID NO: 168406 - protein, 42 aa, Oryza sativa
  Clone ID: PAT_MRT4530_66923C.1.pep
YNELSFITLIQLFFIHQSLQSAYLYGDRNPLILTISFSLWRY

SEQ ID NO: 168407 - protein, 243 aa, Oryza sativa
  Clone ID: PAT_MRT4530_66924C.1.pep
MASSKLYSDDVSLAVVVVDTNPLFWATAALPFADFFAHLIHYVNSLLLLNHLNHVVVIAAGLSSCTYIFDSSDASASGAADVAATFAKASRKMDEFIAEDARATSSNGCLDIQRVFRSGTRHPQPRVPIDSCIVGTQDSAFLQQASYITGGVYLKPQELNGLFQYLAAVFATDLHSRTFLRLPKTLGVDFRASCFCHKKTIDMGYVCSVCLSIFCKYHKKCSTCGSEFNRVMPDLNSVPDQRQ

SEQ ID NO: 168408 - protein, 711 aa, Oryza sativa
  Clone ID: PAT_MRT4530_66925C.1.pep
MATTVATAMRRRRNLTPCDSRLATAVPLLVAFLLLLHAPPLAEAQPLPWQMCDTAGGNYTEGSTYQANVRALASALPVNASSSRALFAKGAAGAAPDVVYAIALCRGDTNASSCAACVATAFQDAQQLCAFNRRATMFDDPCILRYSDQDILANATDGQGNFIAWNYNNVSAARAAAFDAASGRLVNATAGYAAADPVRRFGTGEVGFDDATYPRIFSLAQCTPDLSEADCRSCLGRIIRWVPQYFAGKPGGRVFGVRCNFRFESYSFFSGRPLLQLPGPPPAPAPSPANMAPPSPPGTMGGRTRHRTGRVLAITLPIAGAILALIVLTCFCFWRRRTPARKASPVPYSTNPDDIQSIDSLLLDLSTLRAATDNFAERNKLGEGGFGIVYKGVLPEGREIAVKRLSQSSRQGIEELKTELVLVAKLRHKNLVSLVGVCLEEGEKLLVYEYLPNKSLDTILFDYEKSKDLDWGKRLNIVSGVARGLQYLHEDSQLRVVHRDLKASNVLLDFDHNPKISDFGLAKLFEWDQTQDVTSHIAGTYGYMAPEYAMRGQYSVKSDAFSFGVLIIEIVTGRRNSSFSNSEQSIDLLSLVWEHWTTGTIEELLDPAIGSRAVNVLLKLINIGLLCVQDNPADRPAMSAVNVMLSSDTVSLQAPSRPTFSIQEMDGAADTDLYESGAYPRSAFQPTGDGNTRAAAAASPNELSLSELEPR

SEQ ID NO: 168409 - protein, 698 aa, Oryza sativa
  Clone ID: PAT_MRT4530_66926C.1.pep
MATAVAATAMRRGQHLPLSLSLCYNLAAVALLVAVFLHAPPRAGAQPLPWQLCNATAGNYTEGSTYQANVRALASALPGNASSSPALFAEGAAGTAPDVVYAIALCRGDTNASSCAACVATAFDTAQQLCAFNKRATLFNDPCILRYSDLDILANVTDNSGRFVAWNYNNVSAAKAAAYDAASGRLVNATADYAAADPVRRFGTGEVGSDDATYPRIFSLAQCTPDMSEADCRSCLGDIIRKATPKYFVGKPGGRVFGVRCNFRFEAYEFFSGRPLLQLSGPPPPPANMTPPVTSEGRTSHRTGRILAITLPIAGAALAFIALTCFCFRRKRTPANKASSLPFSTNPDDIQSIDSLLLDLSTLRAATDNFADRNKLGEGGFGAVYKGVLSEGQEIAVKRLSQSSRQGIEELKTELVLVAKLRHKNLVSLVGVCLEGDEKLLVYEYMPNKSLDTILFDYEKSKDLDWGKRLKIVSGVARGLQYLHEDSQLRVVHRDLKASNVLLDFDHNPKISDFGLAKLFEWDQTQDVTSHIAGTYGYMAPEYAMRGQYSVKSDAFSFGVMILEIVTGRRNSSFSNSEQSIDLLSLVWEHWTTGTIEELLDPAMRGRSADDLLKLINIGLLCVQDNPADRPTMSAVSVMLSSETFSIQAPSRPTFCIQETDSAADTDLYSSALRSTGDSKTRAVASPNEVSLTELEPR

SEQ ID NO: 168410 - protein, 784 aa, Oryza sativa
  Clone ID: PAT_MRT4530_66927C.1.pep
MAGHRLHLTFWYNLAAVALLLALLHGPLAEAQPLPWQLCNATAGNYTEGSAYQANVRALASALPANASSSRALFAEGAAGTAPDKVYAIALCRGDTNASSCAACLAAAFDTAQQLCAFNRRATLFNDPCILRYSDQDILANVTDNRGMFVAWNYNNLVSTSGDYASAVYDAFSGMLVNATADYAAKDSVRRFGTGEMGFNVFDSPYHNIFSLAQCTPDMSEADCRSCLGDIIRRMMPKYFVGKPGGRVFGVRCNFRFEAYEFFSGRPLLQLSGLPPSPPPPGLSAPSGLPPSPPGLRPAASGNRTQILVIILPLVAISSVAAISICMWNIRKKRRWRRAENSDTAEDFESIKSTLLSLSSLQVATDNFDENKKLGEGGFGAVYKGLLSGQEVAVKRLAKGSSQGLEELKNELVLVAKLHHRNLVRLVGFCLEEGERMLVYEYMPNKSLDFFLFGTINNLTLNLDIHPSHVHRGYMSPEYVMRGQYSTKSDVFSFGVLIIEIVTGQRNNRPYLFEQNEDIISTVSIPASSYSTMWYYLRLQVWRRWSDGTVAKMIDHSLGKNYPEAEVLKCINIGLLCLQENPVSKTFLQSYVNSLEQVKNNPQADLVTGKQALYHEERKIQKPKQNPLNNNCRWVKLKQGWMKLNVDGSIDINSEKWGIGVVLRNSMGMCSSPLEAELLACREGISLALQWTLLPFIVETDCLVVKNLIESAVQGRSELTFIVRGIGELLSGNREVIIVKIQRNQNNVSHTLANRARCESLTEFCPDDKCNFIAHFVCEDSLAE

SEQ ID NO: 168411 - protein, 54 aa, Oryza sativa
  Clone ID: PAT_MRT4530_66928C.1.pep
MILKESSSSSSSSYADFAKESRGVAWLLTFGANECGRSDRGLNSGLTADVEENL

SEQ ID NO: 168412 - protein, 118 aa, Oryza sativa
  Clone ID: PAT_MRT4530_66929C.1.pep
MANSGSEDFLDNASKEVVTPREKEGLTAVILSTVFPSPCLNVRSPSAEVVDEDGGGWQREAAVVEGAVDADEVGGGDGRGRWQRLRTTADADTDEGSSVGHGEHRRGRQAGNGGDRGI

SEQ ID NO: 168413 - protein, 134 aa, Oryza sativa
  unsure (1)..(134): unsure at all Xaa locations
  Clone ID: PAT_MRT4530_6692C.1.pep
GLEDFCIFPKSLAGAIEGAXEIAAPVSFPSGRPLSLPTLYKHSPCLPPPFRHSPLSLPVGIELAPSLSLSAVAAELRSAAVVAPDLLPLRRRLLRXRGNLADLVHPSVSPADHRNAAVPVDPSSAAAFLRSGRH

SEQ ID NO: 168414 - protein, 89 aa, Oryza sativa
  Clone ID: PAT_MRT4530_66930C.1.pep
MSSPPRAPLLMLCLLLLLCFASATSSGVGHGQRRTRPPATSLAWSVVEEDAAAGDELWRGMWMAEDVAAPVMISVMGCRAATTELQHVE

SEQ ID NO: 168415 - protein, 171 aa, Oryza sativa
  Clone ID: PAT_MRT4530_66931C.1.pep
MLRAGGRRLLAPGLRRVLGGGAAAPVAVGGAKAYHERVVDHYENPRNVGSFENDDPSVGTGLVGAPACGDVMKLQIRVDESSGKIVDACFKTFGCGSAIASSSVATEWVKGKQMEEVVTIKNTEIAKHLSLPPVKLHCSMLAEDAIKAAVKDYEAKKAKLAQKGEEKAAEA

SEQ ID NO: 168416 - protein, 144 aa, Oryza sativa
  unsure (1)..(144): unsure at all Xaa locations
  Clone ID: PAT_MRT4530_66932C.1.pep
GAAAAAEPQPPPAGSGGGDADITTSDTHNNPPTVIQGPITRARARQLNLEVSSFLCSSLYEFENRLLPNDYIVIRNNGGDKETLGEGLTAIEYHRGRPSXGGGPNQVDXGAIRSPGPVCTKTGVQVAYVLGLGCSLYRWKAKKI

SEQ ID NO: 168417 - protein, 40 aa, Oryza sativa
  Clone ID: PAT_MRT4530_66933C.1.pep
FCILILQITDNIMPPIISFHEIQLQICTSLSKIYLNWLLI

SEQ ID NO: 168418 - protein, 66 aa, Oryza sativa
  Clone ID: PAT_MRT4530_66934C.1.pep
NLSLWRQQLEPYGDIQESLTFQNNEIQQVRIIMQVSIIHIPFVVLIISMGFIIHQYPFQSTQRQIF

SEQ ID NO: 168419 - protein, 765 aa, Oryza sativa
  Clone ID: PAT_MRT4530_66935C.1.pep
MGEEEQGPRRKQAGPDDAVQISMQRVKVYRLTDDGKWDDQGTGHVTIDYIEGSREIALTVVDEEDSDTLLLHHITSDDIYRKQEGRVCVPYNEIYNLMSLMHLLFLYPTVQEAAPPAAFESLEASRNPPFHDESLSSTSRELKKLPPLDLSSLSSILKTILECSMTERMRVSVAELILQYHDFFPQLVNLFRTCESSGNMDALHMIFRLVKGIILLNSSAIYDKIFSDDFILEIIGALEYDPEARTVQNHRTFLKEHVVFKEAIPIKNASVVSKIHQTYRIGYIKDVILPRVLDDSTMASIAAIIHANNAAVVCLLKDDASFVKELFAKMRSSNISAESKRELVLFLLEFCTLTKSLQAVQQLRLSRDLASEGVFDIMSDVLQSQDKVLVSAGTDILVYFLNQDPNLLRSYIARQENSQEGNSLLGLLVQGMVTDFGEGMHCQFLEILKILMDGFATNMPTNYDELLLSHVIKFNSLKPIIEVFVENGDRYNMLHSVVLELLEYIRKENLNSLVIHVTKSFWDQLVRFEKLGSIQAFKLKYQQLMESGETTQSISLVDMRKKPEERGLDKEEEDYFNKGSDEEDSDKQTSYAQKESLDKLPKGSDIRHIPARSKSGGLVDYDDDDEGYNPPPKRAVKADEDDEALVIKRNPVDDKQADGRSPKKPKMEPRFICSKIVAAASVAGRRSNLADKQGPHPPSSSTKTSEGNGDVGEEGPGSQNLQHDPGSLDSTHQNGDDCTKDAGNSPSEMTVNTSKATDSEPYSVR

SEQ ID NO: 168420 - protein, 84 aa, Oryza sativa
  Clone ID: PAT_MRT4530_66936C.1.pep
MTVNQGHVGPRLAPLLRRPPEIRENRISLRARGTRPKQASDGGRPAPEELREVAAPWAPVTHLVTELRSPKGYPESGRGAPEAT

SEQ ID NO: 168421 - protein, 1015 aa, Oryza sativa
  unsure (1)..(1015): unsure at all Xaa locations
  Clone ID: PAT_MRT4530_66937C.1.pep
MGADEVAAGRTITGQRYEWLAPSPNMAAPVTLAPCSCHRGTRAYVAVLTGRRGGASHTGAAPHTAAPAWLAHPFSMDRLVRVYYGGRVVEPYVGAHVEFEDMSLKTILFPTHPTLDELRSRVKEVLGWTEDNVEIRFYGRYDVGQGHKYILNVIGEAGPSKIHCGSDDMDVAREMKRELVQEGLDLSEHLSESVHWSSYEGNPEYPTQVAGQYVNPDDYFVVELSGGHDSVSVEVNREEVDEEASVEQYDVEFAEDSDDDRPFPPLTNNDKLALEECRAFEKVFGRKPDIPEFRDLTHAHGAILDGGINLDQLPEQFQVDGLRKGLEFPSMVVLKLWLQEYAIVHHRPYRVVNSAANRRVKYDKAWRAREEAMKLIYGEWGEAYVRLPTLLQAIKQRNPSMVYHIDTHPDRVVNVDGVTKKNFMRAFWCFGPSIEAFKHCRPVLAIDATFLTGKYGGALMTALSADAEDQLVPLAFALVEKENSRDWCWFINLVRRVVVGLHREVCIISDRLAGIMNAMKTPVPGLPPVHHRWCMRHFSANFHKAEGNRLQVFNLMLHRCKVDARYVTRRXMAEERQPPTYLALEEYYEARHRGAAIEAGRXFDDRYIPDLRAAGLLGVALVVSRGMLVFNAPALTALVDRWRPETRSFHLPSGEMTITLQDVAMILALPLRGHAVTGRTENPGWRAQVEQLFGIPLNIEQGQGGKKKQNGIPLYAGGDIASVANLGDLGRFSWGSTMWMWLRLPVGRPKWRQSFTPWPYNEPDMEKTVAYLFESTATAYAHRDVVYKYYVNEMDCLQPQHIEWLPYHTNEASIEYHLPHRVMRQFGKKQDWPVEDISTRVELHKYDRVRTKKVKDWGLEHNRYIDEWRTAGRNDRIEEREEVGGSSSSRIPQGRGKGKAPAPPSDDDDDDDEEDENYVAPDAKEIDMEAEGGASHPGAVAGEGGASQWREAEGFRXGGGRRQPRPGGRRSRGGGVRRQDGWCREEGCARHAGAVVCGGRQCDWRPALPSQQRHI

SEQ ID NO: 168422 - protein, 1437 aa, Oryza sativa
  Clone ID: PAT_MRT4530_66938C.1.pep
MTEMDRLVRVYYGGRVVEPYVGGHVEFEDMSLKTILFPTHPTLDELRSRVKEVLGWTEDNVEIRFYGRYDVGQGHKYILNVIGQLEWEVYFDLVKESQFRSLEVFASKLVRTVENLDLNKSPSYHYVEKNFVTYYSRRGGGASKSELVREDLEGEGEKKRPLLGNDLWEAGPSKRHCVEVNRDDVDEEASVEQYDVEFAEDSDDDRPFPPLTNNDKLALEECRAFEKVFGRKPDIPEFRDLTHAHGALLDGGINLDQLPEPFQVDGLRKGLEFPSMVALKLWLQEYAIVHHRPYRVVNSAANRRYTVKCENPRCKWKVHATKRSSGTWRISRVGKEHSCATAEGSGSHRQLTSKFIANRLCNTIKLQPTLSASALALYIFEVFQYRVKYGKAWRAREEAMKLIYGEWGEAYVRLPTLLQAIKQRNPSMVYHIDTHPDRVVNVDGVTKKIFMRAFWCFGPSIEAFKHCRPVLAIDATFLTGKYGGALMTALSADAEDQLVPLAFALVEKENSGDWCWFIDLVRRVVVGPHREVCIISDRHAGIINAMMTPVPGLPSVHHRWCMRHFSANFHKAGADKHQTKELLRICQIDEKWIFEKDVEALRQRIPEGPRKWLEDELLDKDKWPRAYDRNGRRWGYMTTNMAEQFNSVLVGVRKLPVTAIVSFTFMKCDDYFVNRHDEALKRVQLGQRWSTKVDIKMKVQESKANKHTARCFDKQKKTYEVTERGGITRGGVRFGARAFKVEGISQPKAVVNTWASRFEPYLDPTQWPSYNGEEFVADPNLKIKTRGKRRSKRFKNEMDSGLGGSGRKPPSCVQLDAAPVQNRCSLCHQEGHKKTKCPKRPKKKKSKKNLSVREVLQPLRVRAHAPPVFDDRYIPYLRAAGLLGVALVVSRGMPVFNAPALTALVDRWRPETHSFHLPSGEMTITLQDVAMILALPLRGHAVTGRTETPGWHAQVQQLFGIPLNIEQGQGGKKKQNGIPLSWLSQNFSHLDDDAEPWRVECYARAYILHLLGGVLFPDAGGDIASAIWIPLVANLGDLGRFSWGPKWRQSFTPWPYNEPDMEKTVAYLFESTATAHAHRDVAYKYYVNEMDCLQPQHIEWLPYHTNEASSLTLNSMCNRDSDYFMYQCPLICFWAVEYHLPHRVMRQFGKKQDWPVEDISTGVELHKYDRVRTKKVKDWGLEHNRYIDEWRTAGRNDRYIETIHQNHLFSEYLRWLHRTYRLFLRPTWTEADIEDDRDSDEGRNPYDVRTTVGYQMEHAPLRDRVSRELLRSVNEMGHALQAPRGGEDTENTLRNVLEKVRQRCRKLAARLGCRSVGLDDVYQPGRLPPPLPQSARPSTARHSIRIEEREGVGGSSSSRIKQGRGKGKAPAPPSDDDDDEDEEDEDYVAPDAEEIDMSQLPDAPQGTQPTQYNLRSTRAAKKRYTPGSQAIRRQRKK

SEQ ID NO: 168423 - protein, 36 aa, Oryza sativa
  Clone ID: PAT_MRT4530_66939C.1.pep
LKKTISFIFPEAIYPIMPILHFHSYWFLTNKQNQAF

SEQ ID NO: 168424 - protein, 700 aa, Oryza sativa
  Clone ID: PAT_MRT4530_6693C.1.pep
MSSAHSHVPTTRLPPAEVEVDRESLRFHPKPPAEPAKGGLCGLPVRSHELRHLARQFFLFSLMAEQAKVHDLSPSVSGDDGEPNPRRRARTPPPPPHQNPKQGEALESVEKSAASPVAGDAGERRDGERRLLVYGDGSTPQGALQAVGALLRHPPVVPDPESPAQRWLDDVANLVMTAQQRLGAGGRSATTKTSGAATTGSVSSRRRARRAAAVARHSAATPSSAPPTREDQHGEPDARLDIERWRNSRRTPRATEGASSSRVSPRHGREDLPSVPPAGGVGCRAFVASLRNVRWPPRFRPTITEKYDGSVNPTEFLQVYTTGIEAAGGDDRVMANFFPMALKGQARGWLMNLPPASVHSWEDLCQQFTMNFQGTYPRPGEEADLHAVQRGDDESLRSYIQRFCQVRNTIPCIPAHAVIYAFRGGVRHNRMLEKIASKEPQTTAELFQLADRVARKEEAWTWNPSDSGGGRRGRPIPTMRVMSTSSRAFRWPPERGGLRATKRRKPTLPDLGYLEERRRRAALRAARYQQSLRRYHQRHVRARSLYVDDLVLRRVQTRAGLSKLSPMWEGPYRVIGVPRPGSVRLATGDGTELPNPWNIEHPRRFYPYLVVAVVRTTVTALLVGVEGEREPRGRTLEAVDDVVGGVPDLRACAVLGSGRELFQRCPRGEVRVREAPKPNGGPRPPTAGVGPPLACPTVSG

SEQ ID NO: 168425 - protein, 75 aa, Oryza sativa
  Clone ID: PAT_MRT4530_66940C.1.pep
QGLNKFELNLNGLHRTSWEFDLALLLVSRPSHRPPLSCGAHLGRPMLLDTGGDEPHHGRRLRTRAHLRRTSSNDA

SEQ ID NO: 168426 - protein, 853 aa, Oryza sativa
  Clone ID: PAT_MRT4530_66941C.1.pep
MAAPATLAPCPCHCGPRAGVEMDRIVRVYYGGKVVEPYVGAHVEFEDMSLKTILFPTHPTLDELRSRVKEALGWTEDNVEIHFYGRYDVGQGHKYILNVIGQLEWEVYFDLVKESQFRSLEVFASKLVRTVENLDLNKSPSYHYVEKNFVTYSSRRGGGASKTELVREDLEGEGDKKRPLLGNDLGEAGPSKRHCGSDDVDAAREMKRELVQEGLDLSEHLSESVHWSLYGGNPEYPTEVASQYVNPDDYFDVELSGGHDSVSVEVNREEVDEEASVEQYDVEFAEDSDDDRPFPPLTNNDKLALEECRAFEKVFGRKPDIPEFRDLTHAHGAILDGGINLDQLPEHSRWMVSEREYAIVHHRPYRVVNSAANRRYTVKCENPRCKWKVHATKRSSGTWRISRVGKEHSCATAEGSGSHRQLTSKFIANRLCNAIKLQPTLSASALALYIFEVFQYRVKYGKAWRAQEEAMKLIYGEWGEAEVCIISDRHAGIMNAMRTPVPGLPPVHHRWCMRHFSANFYKAGADKHQTKELLRICQINEKWIFERDVEALRQRIPEGPRKWLEDELLDKDKWSRAYDRNGRRWGYMTTNMAEQFNSMLVGVRKLPVTAIVSFTFMKCNDYFVNRHEAVKRVQLGERWSTKVASKMKMQKSKANKHTSRCFDKQKKTYEVTERGGITRGGVRFGARAFKVEGEGNSCSCQRPLLYHMPCSHLIHVYLIHAIDEESPNRMPYHFSSRAVVNTWASRFEPYLDPTQWPPIEEREEEREEVGGSSSSRIPQGRGKGKASAPPSDDDDDEEEDEDYVAPNVEEIDMSQLPDAPQGTQPTQYNLRSTWAAKKRYTPGSQAIRRQRKK

SEQ ID NO: 168427 - protein, 113 aa, Oryza sativa
  unsure (1)..(113): unsure at all Xaa locations
  Clone ID: PAT_MRT4530_66942C.1.pep
LSYIYIYRICSDPDNTVKRMYVEGXLKIELRRALGQNELEERMELQEKLAPIQLHKKDLMIWKLNQLGHFTTKSLYREMIFGGIKDIKIQELWKSSIPXKIEVFMWLMLKGRI

SEQ ID NO: 168428 - protein, 417 aa, Oryza sativa
  Clone ID: PAT_MRT4530_66943C.1.pep
MAAPAILAPCPCHRGTRAVVEMWMWLRLPVGRPKWRQSFTPWPYNEPDMEKTVVYLFESTATAHAHRDVAYKHYVNEMDCLQPQHIEWLPYHTNEASSLTLNSMCNRDSDYFMYQCPLICFWAVEYHLPHRVMRQFGKKQDWPVEDISTGVELHKYDRVRTKKVKDWGLEHNRYIDEWRTAGRNDRTYRLFLRPTWTEADIEDDRDSDEGRNPYDVRTRVGYQMEHAPLRDRVSRELLRSVNEMGHALQAPRGGEDTENTLRNVLEKVRQRCRKLAARLGCRSVGLDDVYQPGRLPPPLPQSARPSIARHSIRIEEREGVGGSSSSRIKQGRGKGKAPAPPSDDDDDEDEEDEDYVAPDAEEIDMSQLPDAPQGTEAEGGANHPGAAVGEGGASQCREAEGFWAGGGRRQLPWRRDP

SEQ ID NO: 168429 - protein, 74 aa, Oryza sativa
  Clone ID: PAT_MRT4530_66944C.1.pep
MRLTDANQAAVAVQTRRRTPSAQSHQKTLSGGVATCPHGATGQNRASCCCCAAYIQQWSTMVATVWVPACRMQR

SEQ ID NO: 168430 - protein, 613 aa, Oryza sativa
  Clone ID: PAT_MRT4530_66945C.1.pep
MDRLVRVYYGGRVVEPYVGGHVEFEDMSLKTILFPTHPTLDELRSRVKEVLGWTEDNVEIRFYGRYDVGQGHKYILNVIARVMKRELVQEGLDLSEHLSASVHWSSYGVNPEYPTEVAGQYVNPDDYFDVELSGGHDSVSVEVNRDDVDEEASVEQYDVEFAEDSDDDRPFPPLSNNDKLALEECRAFEKVFGRKPGIPEFRDLTHAHGALLDGGINLDQLPEPFQVDGLRKGLEFPSMVALKLWLQEYAIVHHRPYRVVNSAANIKCENPRCKWKVHATKRSSGTWRISRYRVKYGKAWRAREEAMKLIYGEWDRHAGIINAMMTPVPGLPSVHHWWCMRHFSANFHKAGADKHQTKELLRICQIDEKWIFERDVEALRQRIPEGPRKWLEDELLDKDKWSRAYDRNGRQWGYMTTNMAEQFNSVLVGVRKLPVTAIVSFTFMKCNDYFVNRHDEALKRVQLGQRWSTKVDSKMKVQESKANKHTARMAEEGQPPTYPALEAYYEARHHGAAIEAGRLRRSSANSSRAAPPLSFTPHCAVALPGIAAAVRTPSTAPFPLSTFEAPQPRAPPLSAAAAGSSRLFSQLQPPPCRAVATVGIAAPSSTPSYTSFP

SEQ ID NO: 168431 - protein, 1167 aa, Oryza sativa
  Clone ID: PAT_MRT4530_66946C.1.pep
MVLFGALEWLAPYPNMVAPAIFAPCPCHHGTRAVVEMDRIVRVYYGGRVVEPYVGAHVEFEDMSLKTILFPTHPTLDELRSRVKEVLGWTEDNVEIRFYGRYDVGQGHKYILNVIGQLEWEVYFDLVKESQFRSLEVFASKLVRTVENLDLNKSPSYHYIEKNFVTYSSRRGGAASKTELVREDLEGEGDKKRPLLGNDLGEAGPSKKHCGSDDVDAAKEMKREGNPEYPTEVAGQYVDPDDYFDVELSGGHDSISVEVNREEVDEEASAEQYDVEFAEDSDDDRPFPPLTNNDKLALEECRAFEKVFGRKPDIPEFRDLTHAHGAILDGGINLDLLPEPFQVDGLRKGLEFPSMVALKLWLQEYAIVHHRPYRVVNFAANRRYTVKCENPRCKWKVHATKRSSGTWRISRYRVKYGKAWRAREEAMKLIYGEWGEAYVRLPTLLQAIKQRNPSMVYHIDTHPDRVVNVDGVTKKIFMRAFWCFGPSIEAFKHCRPLLAIDATFLTGKYGGALMTALSADAEDQLVPLAFALVEKENSRDWRWFIDLVRRVVVGPHRELCIISDRHAGIMNTMRTPVLGLPPVHHRWCMRHFSANFHKAGADKHQTKVLLRICQIDEKWIFERDVEALLQRIPEGPRKWLEDELLDKDKHDEAVKRVQLGERWSTKVTSKMKVQKSKANKHTLRMAKEGQPPTYPALEAYYEARHRGAAIEAGRVLQPLRVRAHAPPVFDDRYIPYLRAAGLLGVALVVSRGMPVFNAPVLTALVDRWRPETHSFHLPSGEMTITLQDVAMILALPLRGHAVTGRTKNPGWRAQMWLRLPVGRPKWRQSFTSWSYNEPDMEKTVAYLFESTATAHAHRDVAYKHYVNEMDCLQPQHIEWLPYHTNEASSLTLNSMCNRDSDYFMYQCPLICFWAVEYHLPHRVMRQFGKKQDWPVEDISTGVELHKYDRVRTKKVKDWGLEHNRYIDEWRTAGRNDRTYRLFLRPTWTEADIEDDRDSDEGRNPYDVRTRVGYQMEHAPLRDRVTLTYIFSRFPSRELLRSVNEMGHALQAPRGGENTENTLRNVLEKVRQRCRKLAARLGCRSIGLDDVYQPRRLPPPLPQSTRPSTARHSIRIEEREEVGGSSSSRIPQGRAKGKAPAPPSDDDDDDDEEDEDYVAPDAEEIDMS

SEQ ID NO: 168432 - protein, 67 aa, Oryza sativa
  Clone ID: PAT_MRT4530_66947C.1.pep
TLVLAFFLLTTHKPNNYINTTHFDKIYIKNQERIYCSWDRKRTILSYWPDHQCCSRIYNAHPSDKLW

SEQ ID NO: 168433 - protein, 732 aa, Oryza sativa
  unsure (1)..(732): unsure at all Xaa locations
  Clone ID: PAT_MRT4530_66948C.1.pep
MQALKRVQLGQRWSTKVDSKMKVQKSKANKHTARCFDKQKKTYEFTERGGITRGGVRFGARAFKVEGWPRRXQPPTYPALEAYYEARHRGAAIEAGRVLQPLRVRAHAPPXVFDDRYIPYLKAAGLLGVALVVSRGMPVFNAPALTALVDRWRPETHSFHLPSGEMTITLQDVAMILALPLRGHAVTGRTETPGWHAQVQQLFGIPLNIEQGQGGKKKQNGIPLSWLSQNFSHLDDDAEPWRVECYARAYILHLLGGVLFPDAGGDIASAIWIPLVTNLGDLGRFSWGSAVLAWTYRQLCEACCRQAPSSNMSGCVLLIQMWMWLRLPIGRPKWRQSFTPWPYNEPDMEKTVAYLFESTATAHAHRDVAYKHYVNEMDCLQPQHIEWLPYHTNEASSLTLNSMCNRDSDYFMYQCPLICFWAVEYHLPHRVMRQFGKKQDWPVEDISTGVELHKYDRVRTKKVKDWGLEHNRYIDEWRTAGRNDRTYRLFLRPTWTEADIEDDRDSDEGRNPYDVRTRVGYQMEHAPLRDRVSRELLRSVNEMGHALQAPRGGEDTENTLRNVLEKVRQRCRKLAARLGCRSVGLDDVYQLGRLRPPLPQSARPSIARHSIRIEEREGVGGSSSSRIKQERGKGKAPAPPSDDDDDEDEEDEDYVVPDAEEIDMSQLPDAPQGTQPTQYNLRSTRAAKKREAEGGANHPGAAVGEGGTSQCREAEGFRAGGGRRQLPWRRGP

SEQ ID NO: 168434 - protein, 832 aa, Oryza sativa
  Clone ID: PAT_MRT4530_66949C.1.pep
MDRLVHVYYGGRVVEPYVGAHVEFEDMSLKTILFPTHPTLDELRSRVKEVLGWTEDNVEIRFYGRYDVGQGHKYILNVIGQLEWEVYFDLVKESQFRSLEVFASKLVRTVENLDLNKSPSYHYVEKNFVTYYSRRGGSASKTELVREDLEGEGEKKRPLLGNDLWEAGPSKRHCGSDDVDAAREMKRELVQEGLDLSEHLSASVHWSSYGVNPEYPTEVAGQYVNTDDYFDVELSGGHDSVSVEVNRDDVDEEASVEQYDVEFAEDSDDDHPFPPLTNNDKLALEECCAFEKVFGRKPDIPEFRDLTHAHGALLDGSINLDQLPEPFQVDGLRKGLEFSSMVALKLWLQEYAIVHHRPYRVVNSAANRRYTVKCENPRCKWKVHATKRSSGTWRISRVGKEHSCATAEGSRSHRQLTSKFIANRLCNAIKLQPTLSASALALYIFEVFQYRVKYGKAWRAREEAMKLIYGEWGEAYVRLPTLLQAIKQRNPSMVYHIDTHPDRVVNEMDCLQPQHIEWLPYHTNEASSLTLNSMCNRDSDYFMYQCPLICFWVVEYHLPHRVMRQFEKKQDWPVEDISTGVELHKYDRVRTKKVKDWGLEHNRYIDEWRTAGRNDRTYRLFLRPTWTEADIEDDRDSDEGRNPYDVRTRVGYQMEHAPLRDRVSRELLRSVNEMGHALQAPRGGEDTENTLRNVLELCLTNFFFFEMQKVRQRCRKLAARLGCRSVGLDDVYQPGRLPPPLPQSARPSIARHSIRIEEREGVGGSSSSRIKQGRGKGKAPAPPSDDDDDEDEEDEDYVTPDAEEIDMSQLPDAPQGTQPTQYNLRSTRAAKK

SEQ ID NO: 168435 - protein, 375 aa, Oryza sativa
  unsure (1)..(375): unsure at all Xaa locations
  Clone ID: PAT_MRT4530_6694C.1.pep
ILNKNRIIASAGREGARTGSTGVGPTRQPLGPRWTGSTRLAAVGAVGPTRQPHPRXRAADGRAPPGSRGARPKAASPARPTGGGAPAPRWSPPATTGAAERRPRERRREGSEXTVHGSPRXDDDDGNGDRSGGRRRRGSGRRGRRSSGGRRAKRRGGRGRRRRGEAEGGDAESGGSPERRRRRTGGRRRRRRERWTSRARIRRREQAANGGNGGERHGEQLYSAGRERGWPEREETAAEISATIDDAGEDYGXIRTNPRERERGKRGKRERESQGVISPSLMRAGTAGCGGIRGGGGARARAXRRARREEGDDRWVPPVSESGGRARLSAARARGGGRWAAGEEREREGXGPSQPKKGXGGKEDFFGIFLFIKPF

SEQ ID NO: 168436 - protein, 101 aa, Oryza sativa
  Clone ID: PAT_MRT4530_66950C.1.pep
PPPSTYPQGKAPFFGGSPPNLPLFCFGGPLIKNGPIFPLVYMTPGGVKKPTVGPGRSVGEINARHLPSKGGFQAAIPPICVLKKAPLSPKKIHLPLFNRFG

SEQ ID NO: 168437 - protein, 135 aa, Oryza sativa
  Clone ID: PAT_MRT4530_66951C.1.pep
MEVNRGEEEDVNLELTLCYTSASSPEPIGFFLCMYCDRKFYSSQALGGHQNAHKYERSLAKRRREIAAALRAHGAPPPPPAPGGAGAAAAQKAVGVEAQQKHQHAPVVGGFARGGGKSSPPAAEYGDGLDLSLRL

SEQ ID NO: 168438 - protein, 1203 aa, Oryza sativa
  Clone ID: PAT_MRT4530_66952C.1.pep
MTEMDRLVRVYYGGRVVEPYVGAHVEFEDMSLKTILFPTHPTLDELRSRVKEVLGWTEDNVEIRFYGRYDVGQGHKYILNVIGQLEWEVYFDLVKESQFRSLEVFASKLVRTVENLDLNKSPSYHYVEKNFVTYYSRRGGGASKTELVQEDLEGEGEKKRPLLGNDLWEAGPSKRHCGTDDVDAARVMKRELVQKGLDLSEHLSASVHWSSYGVNPKYPTEVAGQYMNPDDYFDVELSGGHDSVLVEVNRDDVDKEASVEQYDVEFAEDSDDDYPFPPLTNNDKLALEECRAFEKVFGRKPDIPEFRDLTHAHGALLDGGINLDQLPEPFQVDGLRKGLEFPSMVALKLWLQEYAIVHHRPYRVVNSAANRRYTVKCENPRCKWKVHATKRSSGTWRISWRAREEAMKLIYGEWGEAYVRLPTLLQAIKQRNPSMVYHIDTHPDRVVNVDGVTKKIFMRAFWCFGPSIEAFKHCRPVLAIDATFLTGKYGGALMTALSADAEDQLVPLAFALVEKENSRDWCWFIDLVRRVVVGPHREVCIISDRHAGIMNAMTTPVPGLPPVHHRWCMRHFSANFHKAGADKHQTKELLRICQIDEKWIFERDVEALRQRIPEGPRKWLEDELLDKDKWSRAYDRNGRRWGYMTTNMAEQFNNVLVGVRKLPVTAIVSFTFMKCNDYFVNRHDEALKRVQLGQRWSTKVDSKMKVQKSKANKHTARCFDKQKKTYEVTERMAEEGQPPTYPALEAYYEARHRGAAIEAGRVLQPLRVRAHAPPVFDDRYIPYLRAAGLLGVALVVSRGMPVFNAPALTALVDRWRPETHSFHLPSGEMTITLQDVAMILALPLRGHAVTGRTETPGWHAQMWMWLRLPVGRPKWRQSFTPWPYNEPDMEKTVAYLFESTATAHAHRDVAYKHYVNEMDCLQPQHIEWLPYHTNEASSLTLNSMCNRDSDYFMYQCPLICFWAVEYHLPHRVMRQFGKKQDWPVEDISTGVELHKYDRVRTKKVKDWGLEHNRYIDEWRTAERNDRLFLHPTWTEADIEDDRDSDEGRNPYDVRTRVGYQMEHAPLRDRVSRELLRSVNEMGHALQAPRGGEDTENTLRNVLEKVRQRCRKLAARLGCRSVGLDDVYQPGRLPPPLPQSARPSIARHSIRIEEREGVGGSSSSRIKQGRGKGKAPAPPSDDDDVEDEEDEDYVAPDAEEIDMS

SEQ ID NO: 168439 - protein, 134 aa, Oryza sativa
  unsure (1)..(134): unsure at all Xaa locations
  Clone ID: PAT_MRT4530_66953C.1.pep
MGGIVGRGDSPRHTSPASKLERKMVEAMQQRAQKGTSVKSFNSVIMKFPKIDESLRNCRIIFQQFDEDSNGEIDQQELKHCFQKLDILFTDEEIKDXLFQACDIYENMGMKSNEFNVFLCLGYLLKNRWCRSQK

SEQ ID NO: 168440 - protein, 123 aa, Oryza sativa
  Clone ID: PAT_MRT4530_66954C.1.pep
MDERNAAAAAGLVRAGLLVLTLTSGAAIYRAAGDAGAIAFVATSYATLLLLFRYLRAYELAAAAEREGLRRKVWYICTVVTTLFAWKVAGVMPPAAAAAVWLLAVATSAGYVLMGRSLYVYVF

SEQ ID NO: 168441 - protein, 90 aa, Oryza sativa
  Clone ID: PAT_MRT4530_66955C.1.pep
MRASGSGEHGRRMRADGSGRRRREQGATTTEGRRRREQSGRRVRAWRENMGGERERGKGVGPMIGKSILAGQSWPAGGVVWPAGWLGEGD

SEQ ID NO: 168442 - protein, 366 aa, Oryza sativa
  unsure (1)..(366): unsure at all Xaa locations
  Clone ID: PAT_MRT4530_66956C.1.pep
MESRKPPPSALVDNHVVPGDVVLDLAEMTNQTIKLGAGLRQDCDTIQATSAGRLRLSKPSKYWVESSQKRYIPSVEDTVLGVVVDTKPDNFLVDIKGPNLAFLPVLAFEGGTRRNIPKFEIGTLIYARVVKANSIMNPELSCMDATGKAAEFGQLKDGYMFDTSTGLSRIIFEWHRATKYGGKSLGETILMGAVEECTHKQLPSLSDLCVTLGEFSHICLASRRLSPSQSGMTSATGVEKVEVWCQDLAMGGRRVEINANKCGTHPTPSKPYYVDKIDTNEQKVVHYQVNCRPARDRNTGSYSVKHHYPSPIVSWIEDLSXSFGNVSFXQVPEHADEESRSSVGKCSRSGSWGENQISDILTDEFR

SEQ ID NO: 168443 - protein, 329 aa, Oryza sativa
  unsure (1)..(329): unsure at all Xaa locations
  Clone ID: PAT_MRT4530_66957C.1.pep
KLPLNSQTLASPSPRFASGEQGSVHDGAAVTARSRPLRPDLAGWRLAAGRAAAKAGACGAGRWWLKAAGMAMAVGMASAEGAKVAAVVLVRRRRRCPXQIRSSRPDLEGGQWWWSATAVESRRLATAVGDGGXAVVVAAVGGGGGIGXRCRRRTWRQRGGGRQRNGRWQCRRRFVKPVAGVGGSGDXRLTCGGRDCGGGGEGVGCEVRMATAXGGGLAQRGATDGSEGRLGARGAIGGDGGWLGARGAADGGRLDWRERRVRWRRRPRCEEELPVGVARSXAHEGWPAGDAGAGVPHVGRVCVVVEHRCISRGFAGGEWRVKTQFGLGR

SEQ ID NO: 168444 - protein, 89 aa, Oryza sativa
  Clone ID: PAT_MRT4530_66958C.1.pep
MIDDPLIGNRCHSGWNGVQHSRRLGGQRYCCHHGMYAGVGVKEPLLAPGCGHKEAAVVALHQAQGLSVDLIAPSVPGVQALAPAPLPKT

SEQ ID NO: 168445 - protein, 155 aa, Oryza sativa
  Clone ID: PAT_MRT4530_66959C.1.pep
MEGGDSGFFRFSAAAPVPMPAHQARRALSDLQTILGLGAAPPQRLPQTSSGQRRVTPMAPPQQRQQVNGGTAVPMASLPVNQAPTGAPLPQRRRTSHGGNNTVVPPDAYCAEHHSSHCGTGCRSKDHQSWHRAFYGGNTGYLGALGCRFTGGCPC

SEQ ID NO: 168446 - protein, 2053 aa, Oryza sativa
  unsure (1)..(2053): unsure at all Xaa locations
  Clone ID: PAT_MRT4530_6695C.1.pep
YKRDPPGGPXGIESQSQHNPHSLRNPCTNVPQYPLYPVYGYHPSTVACQVGALGTQGSTTMSSSLVNNSVNTNLSQVFPASTMLVWTQVGEIVFPVYTTMPISTCPLMTGNENAVATNRDDSMSKDTPTEAKNGISTTSELEKDSNAAKPCRSDMNREPTKMTSEATRSWCPIHKTSKHTLQTCWVFLNVRAEIRICKERGIQRISPTRDVYCPIHKTKNHDLSSCKVLLSAMKAPPPKVQQSHIPIRDKDKERGATPTSDRFVGVIDIDPHEPSVLHLLEDYGSSTTSALREVLAIDDVGTSARTNAEAENQLATPAQHIRAVNAILRETPYDPVLNDDLARWTARLRESVTNLSNTFEEAAAAAHPEQPPTGDANGEEPEWRESPHXATPPPCGTSDLRDHVNGRREARRTRDNENRSRRHVSSRRHNDGDNRHNRHDHNDRERRVPDDTGXGRRHNDDDDGDWRRDNSGRRRQDSRDPGRHPRDRTPEPSDPSSSSSSSASSSSDRHPRRTHNRRQPTAPXAGCRAFSRSLRDVXWPERFRPGAIEKYDGSTDSEEFLQVYFTVLYAAGADDNALANYLPTALKGSARSWLMHLLPYSISSWADLWQQFVANFQGTYKRHAIEDDLHALTQNSGESLREYVRRFNECRNTIPEITDASVIHAFKSGVRDCYTTXELATRRITTTRXLFEIVERCAHADDALRCKNDKPKTGGEKKPATDAPESSKKKNRKTGKRKSQAEVLAAEYANPPKRPDPQSGDTKKAWCPIHKTDRHCLEDCLVFKKXSLEKHIASEKGKRVCVVEKDAEAAPQESDLAYPDSDLHVLHIFXVPQRNFPLHTNPPIFLFQVQVYLRAARMDGIGAFVSFLXINCLSSQSSGTHTLFPFHRVPCSSSVKPAGSSELPTEVGGAKKTEQITFDVAEFDTAYNAIIGRTALAKFMAASHYAYQVLKMSGPKGTITIQGNTKLAVQCDKRSLDMVEQTPSPPDTTEPPKKVSKTNKTLKPDGAIKIVPLYSANHDKTELALITFLRDNADVFAWQPSDMPGVPREVIEXKLMVRPDAKPVKQRLRRFAPDRKQAIREELDKLLKASFIREVLHPEWLANPVMVRKANGKWRMFVDFTDLXNKACPKDHFPLARIDQLVDSTAGCELLSFLDAYSGYHQISMAKEDEEKTTFITPFGVFCYVKMPFELITAGNTFQRTVQGALSDQLGNNVEAYVDDIVVKIKTCDSLIDDLRETFDNLRRYHLMLNREKCTFEVPSGKLLGFLVSGRGIEANPEKIKAIENMKSPTRLKEVQKLIGCMAALSRFVARMGERGQPFLALLKKQDKFVWTQEAEEAFVALKRYLSNPPVLVAPQPNEELFLYIAATPYSVSTIIVVEREKVQRPVYYVSEALHDAKTRYPQIQKLLYAVIMTSRKLRHYFQAHRVTVVSSFPLGEVVRNKDVVGRIAKWIVELSQFDVHFAPRTAIKSQVLADFVADWTMPDNKSDNQLDNETWTMAFDGALNSXGAGAGFILTSPSRDQFKHVIHLNFRVTNNTAEYEGLLARIRAAATLGVKRLIVKGASELVANQVHKDYKCSNPELSKYLVEVRKLEKRFDGIEVRHVYRKDNIELDDLARRASRQEPLEPGTFLDILTKPSVKEVSGEVSPVTLDISSKATKAERAVADIETTDDWRFPLIKFINSEELPEDDTEAEKITRKAKIYCMVGNNLYKKAPNRVLLKSISSDNGRHLLLDIHEGIYGSHAAGWTLVGKAFRQGFFWPTTLKYACDMXTHKAIRASAPDYPSYLAVLVLGARYTRAIPTRTGRLXFQFVAIDKFTKWIEAVPMGEIKAVNAIKFIKGIFCRYGLPHRIITDNGSQFISADFQDYCIGLGVKICFASVSHPQSNGQVERANGIVLQGIKTLLWAVRTTPTTCNKETTFFLVYGSEAMLPSELXHQSTRVQKHSDEDQEEQRNVDVNLLEEHRERVVVRAASYQQALRRYHEKRIRVCIHSIGDYVLRRVQSQAARNKLSPKXEGPYTITQVLRPGAFKIADGDGHELANSWNINQLRKFYV

SEQ ID NO: 168447 - protein, 170 aa, Oryza sativa
  Clone ID: PAT_MRT4530_66960C.1.pep
MQMRFARSKKKYLVGCNNAHRKRFSTGHQTSIQSKGKRKLRFEKVEIIIQIHDEKEKCMKKTMKKAMKKAASVTGVQSVTLCGGNRNLLMVIGEGVDTNKLLKKLRNNVGAADIVETMPAEAEEFEAAAAVSGSKNFMKMMPRWPKSWSFVKQESLVDQLNFPRHSLGVC

SEQ ID NO: 168448 - protein, 310 aa, Oryza sativa
  unsure (1)..(310): unsure at all Xaa locations
  Clone ID: PAT_MRT4530_66961C.1.pep
ISYGPMSERDIARQSNLRFIYHTDDTNCLNQLRMRRAPFFQLCNLLRERELLRDIIHSSVEEQVAMFLLVVGHNHRFRALQPTFRRSIETISRYFREVLYVVGELRHEMITTPSSHTHLKITSNTRFNPYFKDCIGAIDGTHVDAXVPYAISAAFRGRKGVTTQNMMAAVDFDLRFTYVLAGWEGSAHDALILADALERDDGLSVPPGKFYLVDAGYAARPGFLPPYRGCXYHLREYGRRNYPRDRRELFNLRHSSLRVTIERAFGALKNRFKILYNKPFHPYKTQVKLVLACCILHNWILRFGHDGHVP

SEQ ID NO: 168449 - protein, 301 aa, Oryza sativa
  Clone ID: PAT_MRT4530_66962C.1.pep
MARKCSYCGNYGHNSRTCSSSASAGHRDTTMLCDGGDGGGGSGLRLFGVQVHVAAGGGGGGGGGGLPMKKSYSMDCLQLAAAGAAPGSLVSPSSSSSSSMLLSIDEGGLERASNGYLSDGPHGRIVQERKKGVPWSEEEHRLFLVGLEKLGKGDWRGISRSYVTTRTPTQVASHAQKFFLRQSSIGKKKRRSSLFDMVPICENGARVSEQLSGEGAAAAAAASTSLSLMNTHETSSDRVAAIDLNSTEEDDTVGASGRPFFPVVLMEQQQQASHGHGHHHHCTPLDLELGMSVSSTPSIGT

SEQ ID NO: 168450 - protein, 80 aa, Oryza sativa
  Clone ID: PAT_MRT4530_66963C.1.pep
AGHTKEASAITRINLLSLDAGIAQSGYSLLLQRMRMPMLALPLAACPTASILTGCHNDPPRFYDGWLSLPPQVATCEPSL

SEQ ID NO: 168451 - protein, 94 aa, Oryza sativa
  Clone ID: PAT_MRT4530_66964C.1.pep
GNPRVRPGGWGRPSGLRILVWTPPCFSGSLPGICIPGGFPAMSLGKTLGQRIWNHCFKQFFLQSGASWGALCKCFWPSFWNKFPGLFPWLVGEI

SEQ ID NO: 168452 - protein, 94 aa, Oryza sativa
  Clone ID: PAT_MRT4530_66965C.1.pep
RAPPLSPAAPAVPAASLPLPLSASPAAPPAAPTIRAASPPSPASSPRAAAPAPSRMPLSLSPFPRRPPPHPPLPPSGPPLSPSPACSPRAAAPA

SEQ ID NO: 168453 - protein, 103 aa, Oryza sativa
  unsure (1)..(103): unsure at all Xaa locations
  Clone ID: PAT_MRT4530_66966C.1.pep
PQVTEEKTMAKIVLGRDLVGSWIYSCYPPAYKDYSKVFLXVFCLNFMKRLVQLKGHMKRRMLKHALEHEIYRSVSLSMTVAIGEVNSVYSQNHWHIVRLFVEH

SEQ ID NO: 168454 - protein, 45 aa, Oryza sativa
  Clone ID: PAT_MRT4530_66967C.1.pep
SACVSNDFIHAITTTIPDLKYVSKFIIIAFCYVLHTSAACSPGIH

SEQ ID NO: 168455 - protein, 703 aa, Oryza sativa
  Clone ID: PAT_MRT4530_66968C.1.pep
MDVRFGPEEQIVWPASVLAGILMCAAVYDITREVSSRCYKGYNGLNELHKLEWNNRGFSTFHALVAAVVSFYLLVISDLFSKDVHGAIIIDRKSWMSDAMFGVSLGYFLTDLLMILWHFPSLGGKEYLLHHGLSMYAISLALLSGKGHVYILMVLITEATTPFVNLRWYLDLAGRKDSKLYLYNGVALFAGWLVARVILFVYFFAHVYLHFDQVRTVFPLGFYSMMAVPPAMSAMNLLWFRKICKGMVKAMSSANRSQCAKTDEGCAGEDDSPEFVEPPAAAAAAGTFEQRPELGACKEVYSEEGGAAEERTGVAMAGADVEQVAVEDEEEAHGVRMIALLMECAAAMSVGNLAGANGALLELSQMASPYAASCGERLVAYFARAMAARLVGSWVGVVAPMAPPPSCGAINAAFRALYNVAPFARLAYLACNQAILEAFHGKRLVHIVDLDVVPGGALQWLSLLPALAARPGGPPVIRVTGFGMSASVLHDTGNQLAGLARKLCMFFEFYAVAKRPGDADAVADMPGRRPGEAVAVHWLRHAMYDAAGDDGASMRLVRWLEPARFVSALHHYSAVFDAMGASRPDGEDASRHLAEHGVLGREIANVLAVGGPARSSGREGPGSWREVLARHGFAHAGGGGGGRAQLVAAACPGGLGYTVAGDHDGTVRLGWKGTPLYAPQEMKNGLSWIVASKTSGNKMSYGS

SEQ ID NO: 168456 - protein, 139 aa, Oryza sativa
  unsure (1)..(139): unsure at all Xaa locations
  Clone ID: PAT_MRT4530_66969C.1.pep
GGTIARLNPPQAAELAAGLEASHRPFIWVTKDTDADAAAAAGLDARVVADRGLVIRGWAPQVTILSHPAVGGFLTHCGWNSTVESLSHGVPLLTWPHFGDQFLNECLXVDVLGAGVRAGVKGARHARRRRELPGAGAER

SEQ ID NO: 168457 - protein, 90 aa, Oryza sativa
  Clone ID: PAT_MRT4530_6696C.1.pep
RTPSSTTSSRALQPYPLIINHHVQERPDRSAPPLHPPHEDHYDDASDPVDIVTDYLDRLPGLRTQTRDMSLSSQGRHSPSRGLNPFSLTT

SEQ ID NO: 168458 - protein, 493 aa, Oryza sativa
  Clone ID: PAT_MRT4530_66970C.1.pep
MQDSLGLMQFLDHHQYLYSSSSSNLPLQQPLLSHHHRFLEANEGCAGEDDSPEFVEPPAAAAAAGTFEQRPELGACKEVYSEEGGAAEERTGVAMAGADVEQVAVEDEEEAHGVRMIALLMECAAAMSVGNLAGANGALLELSQMASPYAASCGERLVAYFARAMAARLVGSWVGVVAPMAPPPSCGAINAAFRALYNVAPFARLAYLACNQAILEAFHGKRLVHIVDLDVVPGGALQWLSLLPALAARPGGPPVIRVTGFGMSASVLHDTGNQLAGLARKLCMFFEFYAVAKRPGDADAVADMPGRRPGEAVAVHWLRHAMYDAAGDDGASMRLVRWLEPAAVTLVEQERAHGGGGGHGRFLDRFVSALHHYSAVFDAMGASRPDGEDASRHLAEHGVLGREIANVLAVGGPARSSGREGPGSWREVLARHGFAHAGGGGGGRAQLVAAACPGGLGYTVAGDHDGTVRLGWKGTPLYAVSAWTWCSPPHARA

SEQ ID NO: 168459 - protein, 124 aa, Oryza sativa
  Clone ID: PAT_MRT4530_66971C.1.pep
APRRLLVLAGLLGTFGGRTSDDGSEQPGGRGRQGGSEVGSRRERAAKAVRGRRGDGDGVDARDDGGGGSDGEKSGHEHGWGNMARSRWGHWRGGTSSVSSASARKKTRTGEREAGLRREKGRDN

SEQ ID NO: 168460 - protein, 120 aa, Oryza sativa
  unsure (1)..(120): unsure at all Xaa locations
  Clone ID: PAT_MRT4530_66972C.1.pep
LCEGGQILNIFLACFLIANKGFIGVSADELFGCCIGLQGLHPIGFYWIILLLYXYYHQPIVFIXIIYIRYIADCSKPYQHRLDQTDWHARTSSRFGPALELSRSPRPVCVFRINTFSARP

SEQ ID NO: 168461 - protein, 201 aa, Oryza sativa
  Clone ID: PAT_MRT4530_66973C.1.pep
MVVPTAAQTDDIPLKQMITRTIYTANIITMLIFCKNKYQPEKGYFPLLRLASINILAFLKIDEFGWFCFSPFLKIDGLGKLHLILVRRRELLADLTNARYGGFVGEYVRWRTLRFRTLTKNYAHASPIPSLSPTPSRIHLRSAADHGVAGVSLAYADVSSSDSSPPIAAAPAVADHGLAARRRAVGRRRVPAMLWSPSIRA

SEQ ID NO: 168462 - protein, 174 aa, Oryza sativa
  Clone ID: PAT_MRT4530_66974C.1.pep
ITALPPGKPTVSTTLFQTTGNARRRTGFLAITPTAKGGAVFASAAPGALVNATLKRVVAAVPYNISVLQISNFVVPPGVLTRPRPGPGPLPLPSPPLPRMKPMAIAPTPAPVPAPTKMVPIPPSLPLTDPADEDGDEAPAAAPAPSHGNAVKVMSWWSGLGVLVGTMACVFGYL

SEQ ID NO: 168463 - protein, 84 aa, Oryza sativa
  unsure (1)..(84): unsure at all Xaa locations
  Clone ID: PAT_MRT4530_66975C.1.pep
MVVPTAAQTDDIPLKQMITRTIYTANIITMLILXEHVRQYLILGVSFPLLRLASINILAFLKIDEFGWFCFSPFLKIDGLGKLH

SEQ ID NO: 168464 - protein, 150 aa, Oryza sativa
  Clone ID: PAT_MRT4530_66976C.1.pep
MAPLLLLRLLLLAGAATAAAVAADNATATGGSGDGATGNNNNNNNPTICSGEGCQPPPGQPLPIYGYPSPPPPSQPAGPSSHTPPCPPAAVVCCGGGQYTPQQPYYYAPPAGYVPYYNNSAASPPVLLAHAAVGYYYYVMAAYLLLWLVV

SEQ ID NO: 168465 - protein, 159 aa, Oryza sativa
  Clone ID: PAT_MRT4530_66977C.1.pep
VFRGLGEAKLRQRSLHSAWRCATTVHEKIVFGAWLRYEKRGEDIISDVLASCRKCCKEFGPLDVASEMPEGDFEILGSCDIGTSSKVSPVVTFQIRDGKVTCNRCKIASLSPLLWSMLNGPFTESQLDLVDLSENGISLEGMRAVSEFSCTYSLEDLPL

SEQ ID NO: 168466 - protein, 152 aa, Oryza sativa
  Clone ID: PAT_MRT4530_66978C.1.pep
MSHLQHLAAGELVTALRGASCPSSALRLYSLIRIHARPSDPALFAWRPAVLALKPLSAAASLPLLSHFHAHLIRSNLLAYPHVASSLLRGYSLLSPEHAHHLFDQIPPSTCNLVVVNVMLGSLCRSSDLASARAFFDGIPDKDVVSWSTMLA

SEQ ID NO: 168467 - protein, 149 aa, Oryza sativa
  Clone ID: PAT_MRT4530_66979C.1.pep
FPPPWKTFFLWGPFFLGKGGPPPRLGFFPKVTGNYVWAFFLGWEKRVFPHWGGFWGVRGKKGEPLFFKSPVFKLKTPKFLQKGCAPSLRKTPKNFFCRPFEWVKGLGQSLRSQSLGGFFLVRVKAKPQFFGPLSWGYIGGFSQSKKLVP

SEQ ID NO: 168468 - protein, 354 aa, Oryza sativa
  unsure (1)..(354): unsure at all Xaa locations
  Clone ID: PAT_MRT4530_6697C.1.pep
AASYTTPRNILITGAAGFIASHVANRLLRDHPSYRVVALDKLDDYCATLNNLAPAMASPNFAFVRGDVASADLVLHLLLAERINTVMHFAAHTHVDDNSFEFTKNNVLGTHVLLEPCRRKXAAGAIRRFVHVSTDEVYGDAATAGNHEASRARPTNPYSASKAAAEMLVMAYXASSYGLPAITTRGNNVYGPRQFPEKLVPKLILLAMRGGKXLPVHGDVXSRHARSYLYCDDVAEAFDVVLHXGEVGXPRVIDVARHVCGVFGLDPGEAVATVSDRPFNDHKYFVDDXKLKALGWSERTPWEEGIKKTAEWYVEHGAEWWGDVDVSAALLPHPRILTPQQSFDTTAMTNFDFK

SEQ ID NO: 168469 - protein, 78 aa, Oryza sativa
  unsure (1)..(78): unsure at all Xaa locations
  Clone ID: PAT_MRT4530_66980C.1.pep
KNQPNRRRIALVRTXXXSXLHQTTSFLGTAPXRDELVRRVETXGGRITMGRTVKSXPQSIWYGPDRPKYLGXXSEQTQ

SEQ ID NO: 168470 - protein, 165 aa, Oryza sativa
  Clone ID: PAT_MRT4530_66981C.1.pep
MAAAAAVAPSTTTSSSASFKLPLTAGNVESVLDQVRPYLTADGGDVALHEIAGNVVRLKLQGACGSCPSSLITIKRGIERRLMEKIPDVAAVEPVTDKETGLELNEENVEKVLNEIRPYLAGTGGGGLQFLMIKGPIVKVRLTGPAAVVRTVRIALCQRVQIRKT

SEQ ID NO: 168471 - protein, 58 aa, Oryza sativa
  Clone ID: PAT_MRT4530_66982C.1.pep
SYYGRSLLICLTFSSPAFWFLLQLVRLDHGGLHMLGSLLSLVWILNVHYVYSISLLLS

SEQ ID NO: 168472 - protein, 64 aa, Oryza sativa
  Clone ID: PAT_MRT4530_66983C.1.pep
MADRPPAMADRTATFVDLVIAIILPPLGVFLKVGCEIEFWICLLLTFLGYFPGIIYAVWVIVNH

SEQ ID NO: 168473 - protein, 226 aa, Oryza sativa
  Clone ID: PAT_MRT4530_66984C.1.pep
MQTTTVPMAAAAAVAPSTTTSSSASFKVAAYAWSSCRSSSSPATRLVAAPNHQRPPLVVGAIAGLDPVTAVQLPLTAGNVESVLDQVRPYLTADGGDVALHEIAGNVVRLKLQGACGSCPSSLITIKRGIERRLMEKIPDVAAVEPVTDKETGLELNEENVEKVLNEIRPYLAGTGGGGLQFLMIKGPIVKVRLTGPAAVVRTVRIAVSKKLPKKIPSIQIVQLLS

SEQ ID NO: 168474 - protein, 133 aa, Oryza sativa
  Clone ID: PAT_MRT4530_66985C.1.pep
FFFFMEHCMDLEVLSVFNFFTALKKLSLIDLIYTHRTRSLATLAILAIEGIPDDDDGTCAAARRSPPPPPPPYPGSSRSSCWRGAVHRARSSSLDGRRRHSPRLAAGGDAPASMSPRRRPSGPPSRGCSRRAS

SEQ ID NO: 168475 - protein, 136 aa, Oryza sativa
  Clone ID: PAT_MRT4530_66986C.1.pep
MDESSDLQWRQGWLAVGLPPAPVVAVSAIVGFFLYLTWQMDEYEEQLRRRTQAGLWVLLVLGAVALVLLGSHALVDAGGRVAVPVSWRWGGGYGGSSGDDGGGASPWAVAAVVAVLLVLASHKPSFQMFRPPWHYK

SEQ ID NO: 168476 - protein, 46 aa, Oryza sativa
  Clone ID: PAT_MRT4530_66987C.1.pep
YTGVSACSSEGQKSRPPTSHATFTLVVTYDLIVEEGDLASSIVTSV

SEQ ID NO: 168477 - protein, 447 aa, Oryza sativa
  Clone ID: PAT_MRT4530_66988C.1.pep
MEVQVKRSSVVPPPPTCETEEVPLTVFDLVAPTYHVTVLFAFSPPNPTTRALLDALSAMLPHFPLLTARLERRGARRRPFFVTGRGGAGALVVEAEVSSELADHLPLAPSPELARLHPPVNTDAPTPHVLLVQINRFACGGLVVVSSAHHQAADGFSMSTFFHAWTDAVRRNGAPLLDRPVPYGPGALSPRRPPRCEFEHRGKEFLPHDGVTSRQGQGADTGAVRIDPSEVANVLLHYPSEFVAELKRRAQGKYTTFETVSAHVWKKITAVRGLDAGARTSVNVSVNGRARLGTGTVPNGFFGNLIINASSGPTARELTTGTLADAAALIRAGIRAVDRRYFQSFIDFGALHVDGGRDEEEPLQPANVDEPGVLSPDVDSDSWLHLELHRLDMGLGGRLAGILPAKVPEDGVVVVMPSLRKSGGVEVFVALWEKHANELTSIAYTMD

SEQ ID NO: 168478 - protein, 734 aa, Oryza sativa
  Clone ID: PAT_MRT4530_66989C.1.pep
MVAVARVRRPRLLRHQEEGRRTARARARGGGGGGVCGGGGGGDLRRRREEVYYFTGSKIPFPIQLDKDSTAEAIYDATYWLVVLMIYISVTAASEKHKEKKHKKDKKDKERKEGKDKKDKERSKDKHRDKKDRKEKHKDKKKDKSKDKSRELEEGTERHSEALHGQKVGESSRKSEEIKDPKSREDLVTRTQNEKGTTNQSVQNFSVSNQRGREGFSAAPALENERTAANKMHSHSINASRKTEVLGQKSISINQQKNGTAIRRGDNITSSSQRTSDVFIAAPTAEKERVKVARPLSNSTDSAPKKDGMGQRINNISILVQKRTDSPNKETAKKEAGTNSPLLPSPANTMHKGNGKVGRPMEIPTQRFDSPSTSSATAGTDRGMPRSSIPSPSITIRRPNGLVRPPESISISSKKPDAGGASPAMGKEKEQGGRILQNNIIDPKQINSKPPTMEKITDGRTERMEKVRDGAPDVAKEDKKSDRHEKKKKKEKDKHKEKKRDKEAKKEKDEQNNNKEHDKLRENSINYQVDNSLHMKSSTPPLAPPADDAKAAQADENLKKRKNHEMNGYLQNHHDTMRPTKLPRPAHSNTPVENGTASHVAAPLSSVKPEAINIEKAIRQHKKEEKINGNQEGQRSSVEPRLHDPLVASENGAPTKKLPHPDSKYLSQIYSIPEAPQMMEWHGHDDQDWLFDHDGTQPKKTESETEADGASQVWAQPLKIDQADVIALPYVIPY

SEQ ID NO: 168479 - protein, 85 aa, Oryza sativa
  Clone ID: PAT_MRT4530_6698C.1.pep
RLPRGWRRRRRRRRGWSWSWNWSRRQLCRVLSPVPLRAPPAWYPRCMCEIDRSIERAVGFISTNSSRPQLGPAIHIFTNSECDCL

SEQ ID NO: 168480 - protein, 512 aa, Oryza sativa
  Clone ID: PAT_MRT4530_66990C.1.pep
MVAKKPRVVVVGAGISGLAAAHRLCGAGGDRFEVAVVEAGDRVGGRILTSEFAGHRVEMGATWVQGVVGSPVYALARDAGALGEEEGRGLPYERMDGFPDRVLTVAEGGEVVDADTVAGPIEELYRGMMEAARAGEAGGGGGVEEYLRRGLRAYQAARSAGGGGGGGKELEEVDEALLAMHINRERTDTSADDLGDLDLTAEGEYRDFPGEHVTIPGGYSRVVERLAAALPPGTVRLGLRLRRLKWGGTPVRLHFADGAPPLTADHVILTVSLGVLKASLGNKDTAGVGAAAIAFDPPLPPFKREAVARLGFGVVNKLFMEVEAVAPSEPEDVAGVQPAAAGFPFLHMAFRGHVSKIPWWMRGTESICPVHAGSTVALAWFAGREAAHLESLPDDDVIRGAHATLDSFLPAAPRWRVRRIKRSGWATDPLFLGSYSYVAVGSSGDDLDRMAEPLPRGPDAAADERPPSPRLLFAGEATHRTHYSTTHAAYLSGVREANRLLQHYRGGANHTT

SEQ ID NO: 168481 - protein, 47 aa, Oryza sativa
  Clone ID: PAT_MRT4530_66991C.1.pep
GVFSGPSGTELNHAVLVVGYDETEDGTPYWIVKNSWGAGWGESGYIA

SEQ ID NO: 168482 - protein, 118 aa, Oryza sativa
  Clone ID: PAT_MRT4530_66992C.1.pep
MDGSYGETARSAAYPAAAPSALSVWFAYADLLSLGPALLAEPWAMASCLLELTLRWSAAESSLFLLVNGICDELSPCKLNGMVIVRRALLPGWVLVHLRSMPIKRCSCSIGRPSEALT

SEQ ID NO: 168483 - protein, 1709 aa, Oryza sativa
  Clone ID: PAT_MRT4530_66993C.1.pep
MRTRFLATDYFAPSSSSAAGKALALEFFSFPSLPVPALPPDPHFLPFTSADELPAATVADDGLGPLPIASALSDFLAAVIPQALPVPTVPAADEVLDDFLYDRGGYGEDFSSWEFGAFRIPKASEGYGVINREKDEKGEGSRSDGLEISSVMKRWEQLKELRFEVVEVDLLMALQEDIASFGEEESGGGVTLLLRVPDMKIHLDFIDIETDIKIRYQSDLPESVYQVEKVPVKDNDGNGHSSLREDCCLEIAALDHGAVIPRLEVSRNSWELDDCLTETDRYGVFDNVVRHLDEAQIQHSVFKSTEFLRSTDMDMLTFVCEDAPCHDIQVDKPAEIKAAVEMDVVRINGNILLEKNSALYPLKPDGTCSDLPCSILLEEVQIIDFPSDNVFKMLVQSETNKMNISDEIFKDDFDPARRLYESMVSCELALVDDTFRSLPTPILNDDIAVRSRVPPIQEILCSLKPHPLSASDGIYLDWHLLLEGPCNREICCSYASMVEEAKTCHLSSELQRSCQSTSVFVSDFLEDFQRSPKLQDEDKHSDIYVPAPLSHDPQKLEATQKCEQEGGTRNHSSMKRPSPEKSSSFPELISHSGDLNFYLNVRSATKSGTNNENTSTLDVPHSEEQALSLSTRAKVDKLIEIHPVSPSNLIQGLIEQIHASYTSALQESTYWRHSFSDEQGLGISKQKLLELITGEGSEGSYNHCEHKDKMELIVLYALKQVAYYLCFFGLHAAHLYISNLTRSLENTPERLKHILWSISEAQRKSERQLFESHPSLSCIETILRSNKQIDQKILIVADRAFWLPLGQKLASMRMTFVEFGQNPATTFVDLVNKTNSTAWVLEELLKSDCILLDNKNIPASFPFDKFGIILEYGGPNKSSTLLSLAPKLDGLPPLHFLYVKVDGKDFPAALVEDNHKDQDLKSTLDKVLLTLQKDLQERMNKMRIVDSLNFIPATNQLQGLQEKRSKHFAADATKELLPDDQPHRLQNLNKKNTFDSHNVVLADEQLHIQQTLSNKPVVNSQCVPTVEKSSSTSSVSANVLKDPQENQSTTDLPSCVKNDCIMPGRLSVPDVVIVVNTGNHGKTMLVSRRSSYQQILALEKGGMQVVERDIDLPVDLILSAAVCLVWYETALFEANELTTSAETSGIKENVENIATNILMSVSFSFTGCIMVFEGEADFLSAVMDSSDSLYTAAASLDMNLQLFFSHTPRSTDEIILNCITNVTSCYKAPLPDIPESESLAESFLTSFPSINPVSAYMLLSSGGSLVEFLSWPHERRIQAVGKYLLSPKIISLFNALCKFGELGESRSVMTECSSVDSDISSAFLQSPRKRKQRSLQACAVPTNKLLFSDSLNQIPGDYAEHAEVFSPSKLRKFSDMDNTIPELPDVFTFDESLNMRSEGFSYQQKKHDVDAIPGNQVINDDFSNGLTPNNQAYNRRTGNMVDTFDLPWQPEFGGTHPSKSTFHTSRPSCSRTHSNPVFSTAFEINDDPGEWNISGGTKQTWKGLAHGGTVDDSYRYDMDNRYHEPRDEIMQHPASSLAFQKLDFGSHATSQGSCWEIDYLRQMSAKRKARQERSRCSNSPGMSIPRMRDSNSKILNPPPKESFRYRGDRDTPSRDQSPSIGTQHYGKGKEGAKAQNRRARKDFNVQPTSHKKRIEPSIDPTWTPIDKRARQKLSFVTYGKEKQSKLVWRNQNSPGVGCGFRKRFREEGT

SEQ ID NO: 168484 - protein, 95 aa, Oryza sativa
  Clone ID: PAT_MRT4530_66994C.1.pep
IVTLNIGVATRRNIKASPRKVPIHIGSKQARARPIRWSLQASQKRPALNMAFKISVGLVDAAKVGGGPIRKKKTSHRMAQANRALAHLRYAMTSI

SEQ ID NO: 168485 - protein, 101 aa, Oryza sativa
  Clone ID: PAT_MRT4530_66995C.1.pep
FGFFFFFGFLFFFFFFCFFFFFLLSGIKTKVRGFGPKTEKRGGPLGQDNQAWGGKKKKACEEHLGGGFYGDMGKKWNEPGGELQKMSLKSAPKPRDQGLRK

SEQ ID NO: 168486 - protein, 82 aa, Oryza sativa
  Clone ID: PAT_MRT4530_66996C.1.pep
TPPRRRLCAAAPLHLSRRAAAPRVLVEPEGVADLSEGQDSQDFEQGKSSLFFEHVDPNYEIVLFTKKIACNDEHPTCDYAMP

SEQ ID NO: 168487 - protein, 104 aa, Oryza sativa
  Clone ID: PAT_MRT4530_66997C.1.pep
HASGSRSRAAPFFFFFFFFFFFFFFFFFFFFFFFFLGTGPGHREGQHTHHYQGKPGMERDPFISKRARRKNNPTHMEKVLKKTKKTLREAKIWKGRAGLFPNHL

SEQ ID NO: 168488 - protein, 57 aa, Oryza sativa
  Clone ID: PAT_MRT4530_66998C.1.pep
NPISTFAPNVQHCFSVSAHGDSGILIYSLHLINIHSFFLFFFAGKPHLLKLSGVVAL

SEQ ID NO: 168489 - protein, 155 aa, Oryza sativa
  Clone ID: PAT_MRT4530_66999C.1.pep
MGVDDIIAELRVLPAKILLKKKPKQFQKVEVKVRMDCEGCERKVRKAVEEMKGVSSVEVDAKQNKVTVTGYVEQEEVVGRLRRRAGKKAEPWPYVPYDVVPHPYAPGAYDKKAPPGYVRNALADPDAAPLARATEEEEKLASAFSDENPNSCAVM

SEQ ID NO: 168490 - protein, 384 aa, Oryza sativa
  unsure (1)..(384): unsure at all Xaa locations
  Clone ID: PAT_MRT4530_6699C.1.pep
MSRVSTSWGFVYSRVNKPGERXARTGSTGVGPTRQPHGPRWTGCTRLAPAGAVGPTRQPHPRARAADGRAPPGSRGARPKAASPARPTGGGAPAPLWSPAAAIGTAERRPREGREGGNEMAVLGSPRVDGDDGNGDRSGERRRRGSGRRGRRCSGGRRAKRRSGRGRRERGEAEGGDAEAGGGPGRRRRRTGARRRRRRERTTARARFRRGEKAASGGNGGGRHGERLNRVGSERGRPEGKEIGAAISGSIDXAGEVRGSXIRTNPREREREKWGXRGRESRGVISPSLWRAGTAGCGGFGGGGGARARAXRRERRKVGDDGWAPPVSEGGGRARPSAARARGKAXWAAGERREREGDGPSRPKRGRGGGXKRLFRVFLFIKSF

SEQ ID NO: 168491 - protein, 1345 aa, Oryza sativa
  unsure (1)..(1345): unsure at all Xaa locations
  Clone ID: PAT_MRT4530_669C.1.pep
MKDYDKSTSFEVDDSTIDGDVELGGGLTVVGNERNDGRGFVGENGASNKRSLRYNSMLMQVCAETAACVSLDFCNDETFEKXRCDKLAEGDRAGLRTSLAYNAELGAAENCALECDAGFDATXNSANHVXGLDLAEVGSVPLNGMDAYIKESEGXIGKLDDXLVTLSEEPNESGGGTSVGGINDSQENKAVNGLCQGLVIAPFDTANGNAWTIRKKISDSGRESIEQEDTVMCSNEEQKVENHCQFDDKHKEAEISQIELAVDNHIMLTDCTNQKKGIDSPVNETKGDSTPDIVFIRRKSITRKTCEAKQVKSEDEVRFEKRVTRSATVRQREVSASMCVGATNDANLESKERKEDVHHYTRKVGSTVRSKVHHTGVAECDTDTKKKLKGTVTTRRNSDAIANDDPPSITQNKESKTQMKIDIKSQPLTRRGSIVNKTEDAVSGLDQNICSSAITDKNDIELTDSEGVKSENKAAVRKSILSVGAKIVASKKRILESGLDKASGESPVAIPSLKKARDTSSDTELEQPKMSSGKKLTRNNCGSSKKGMSTRRQHQSQTAKLSTSVNCSNKNESKLSQNESDDDGTGSDTSLKNTCVRRTRSGGVVPKKQEDSSESEEPIILRKNHQRGKYSGKRAGSTPRKVKAPKGNRKEVKASSLKSSGPSEQINTGSLREEKQKISDHIKGMLLDAGWTIDLRPRNGRNYLDSVYIPPSGKGSYWSVTKAYAVFLEGMESEKKGRAKDQRPSKKSVGSPGKSHVSEEILSKLKRIVVNKRRTKVELQKLKKRKHGLLKKQKTSKRNSRGSKNKISNSRKLHLGSERKKRGGCALLARGSNKDGGSSTNGFVPYEWKRTVLSWLIDLDIIDINAKLKCVDETHSKVLLEGVTTRDGINCRCCSKVFTVLEFVAHAGGPVSKPYRNVLVDGLDTDLLHCLINAWDKQSDSERQAFFPISTETDDPNDDTCGICGDGGNLICCDGCPSTFHMSCLELEEHSRQDAQDIAEVDSSLCTCSQCEEKYHPGCSPETTNTSNVSSQACDLFCQQSCRLFSIRFLGGNDIYGTVNSALMQSLRYIYSLFSCDIHYRGKLFEGLRNLLAVKKDLEPEFSCRIIQRIHENVPETVVALDERVECNSKIAVALSLMDECFLPIVDQRTGINLIRNVVYNCGSNFVRMDFHGFYIFVLERGDEIIAAASVRIHGTKLAEMPFIGTRNMYRRQGMCRRLLDGIEMILSSLNVEKLIIPAIAELVDTWTSKFGFSSLDVSEKQEVKSTSMLVFPGTGLLQKPLLKKTSPGENSSSQEVDGVFSELESGKTSNVANEDSLCSANAETQGSAAPCYGDNSKDASACND

SEQ ID NO: 168492 - protein, 123 aa, Oryza sativa
  Clone ID: PAT_MRT4530_66C.1.pep
MAAADPLKQVVSSSSLSPQSYLGVERKRKSSHCCEATKLSLSEDTTGEVYDIEYRYSEKSAAKEKGGSGKVYIIGGDLSEDTASEVRGIKYFCSEKSAAEECGKGGGGDLNPSILEDSSKQGD

SEQ ID NO: 168493 - protein, 53 aa, Oryza sativa
  Clone ID: PAT_MRT4530_67000C.1.pep
YSFRIKSWTLRSLMCLVPSFAFIVINFNIFLSVSLVFSYCNWLKPFLKKAEMF

SEQ ID NO: 168494 - protein, 556 aa, Oryza sativa
  Clone ID: PAT_MRT4530_67001C.1.pep
MSLEIHEEEGGGTAAAAAVKVMTVSGSGKRGRYVRQVTGRHNDTDLHVAARGGDAGALRRALDEAAAAVATGEGREALEEVRRAVAAEPNEAGETPLVAAAERGHLEVVRELLRHLDAEGVAAKNRSGYDALHVAAREGRHAVVQEMLLHNRLLAKTFGPANTSPLISAATRGHTEVVKLLLELDDFGLVEMAKDNGKNSLHFAARQGHVEIVKALLEKDPQLARRNDKKGQTALHMAVKGTNCDVLRALVDADPAIVMLPDKNGNTALHVATRKKRAEIVAVLLRLPDTHVNALTRDHKTAYDIAEALPLCEESSEIKDILSQHGALRSRELNQPRDELRKTVTEIKKDVHTQLEQTRKTNKNVHGIAKELRKLHREGINNATNSVTVVAVLFATVAFAAIFTVPGGNANNGVAVVVQAASFRIFFIFNAIALFTSLAVVVVQITVVRGETKSERKVVEVINKLMWLASVCTTISFIASCYIVLGRHFQWAALLVSLIGGITMAGVLGTMTYYVVKSKRMRKIRKKEKMSRRSGSSSWYDNTELSETELNQVYAL

SEQ ID NO: 168495 - protein, 74 aa, Oryza sativa
  Clone ID: PAT_MRT4530_67002C.1.pep
PRRRRDLRGERWRGEHRDTRRRQGENPNPSQSHARSLSLSVELNTTLRGYMRWRRKSARGGGDRETGEGHARAP

SEQ ID NO: 168496 - protein, 128 aa, Oryza sativa
  Clone ID: PAT_MRT4530_67003C.1.pep
IIIVPMEPSTWYKHNLNELTNTSFFSTFNTSHTISNTSSTLLSACSRSTHTSSVSTVTTTSCFPLVIPFNIHHHTWGVTHGCISCMVFHQTHGRCHVSKSAQQHLHFPWHGQAHTHTHHLVPIFPHGP

SEQ ID NO: 168497 - protein, 58 aa, Oryza sativa
  Clone ID: PAT_MRT4530_67004C.1.pep
MALQILNAITRAKGRRCSRGRGCVMERQRRWVRKGRSGGGGGGNREDGRPDGWVQTRS

SEQ ID NO: 168498 - protein, 80 aa, Oryza sativa
  unsure (1)..(80): unsure at all Xaa locations
  Clone ID: PAT_MRT4530_67005C.1.pep
MICLYFYICFCNLFEQITEKLYWQLETRTKKLRXTLPFTLLAFPVYLWYRSPGKTGSHFLPSSDLFSPREXSDVIVSTTA

SEQ ID NO: 168499 - protein, 446 aa, Oryza sativa
  Clone ID: PAT_MRT4530_67006C.1.pep
MAAVEAEKVVAELRERCATPASLLRDVAAAMAGEMGAGLEKEGGSRVKMLLSYVDKLPTGREDGLFYGLDLGGTNFRVLKVHLGGSKKHVVNSESREVSIPPHLMSGTSSELFGFIAGELGKFVAEEEEGTDMPNGKKKELGFTFSFPVRQRSVASGTLVKWTKAFSIDDAVGEDVVAELQTAMVKQGLDMHVAALVSIDWLLPFINIIYLQCQINDAVGTLAGARYYDEDVVAGVIFGTGTNAAYVEKANAIPKWEGELPNSGDMIYEKLTSGMYLGEISGIFGSIDNSKLKTCFHLRFKADPKISVNVANRTPHISAMHHDETPDLKIVAEKLHQILEITHTSLEIRKMVVEICDIVARRAARLAAAGVAGILMKLGRNGGINNQRSVIAIDGGLFEHYTKFRECLESTLGELLGEEASKSVAVKHANDGSGIGAALIAASQSR

SEQ ID NO: 168500 - protein, 210 aa, Oryza sativa
  Clone ID: PAT_MRT4530_67007C.1.pep
MARFGAVIHRVFLPLLLLLVVLGACHVTPAAAAAGARLSALAKALVVEASPRAGQVLHAGEDAITVTWSLNATAAAAAAGADAGYKAVKVTLCYAPASQVGRGWRKAHDDLSKDKACQFKIAQQPYDGAGKFEYTVARDVPTASYYVRAYALDASGARVAYGETAPSASFAVAGITGVTASIEVAAGVLSAFSVAALAVFLVLENKKKNK

SEQ ID NO: 168501 - protein, 66 aa, Oryza sativa
  unsure (1)..(66): unsure at all Xaa locations
  Clone ID: PAT_MRT4530_67008C.1.pep
WLPPSRLPELAXMVPLTQDDRPHPGVAIAYRDQFPEAMDYFRALYLDGELXXLSLHLTXEVIDLNS

SEQ ID NO: 168502 - protein, 157 aa, Oryza sativa
  unsure (1)..(157): unsure at all Xaa locations
  Clone ID: PAT_MRT4530_67009C.1.pep
PPLPPSPLRAACAAGIAAPHRTPAPTFLPLTVAETPPPPPTRATSPPAASSRTPSPHEPLPHPPPMQTEDAAAFAASGRLSPPVPSTMTCAVASFGSATXRMSSAAAPAFSHPPNHTTPSPLPPRGARRRTAVTVASPRSPSRWLPRCRLAVAALVS

SEQ ID NO: 168503 - protein, 118 aa, Oryza sativa
  unsure (1)..(118): unsure at all Xaa locations
  Clone ID: PAT_MRT4530_6700C.1.pep
ITVVPGVARFGKGFAELADGRVIALDAVVLATGYRSNVPQWLQXNDFFNKDGYPKTAFPNGWKGESGLYAVGFTRRGLSGASADAMRAAKDLARVWKEATKPTKKSTACHRRCISVIF

SEQ ID NO: 168504 - protein, 239 aa, Oryza sativa
  Clone ID: PAT_MRT4530_67010C.1.pep
MQASKQLARAAAMAIVGEEYCSAEERVLTVRKTSHFSPGDGFAAYDHRTGGLAFRADTYGRGHGGGAASAGELALLGPAGEALITVRRRRPSLHQRWEGYLGARADGQKPLFSARRSSILGGAAAGAVVELLAPLPASFSSTHAAAAELLRVDGSFPRRCCRVVAPKAESGGEAAVVAEIRRKVDEGARVVMGRDVFVLRVGAGFDAAFAMAIVLVLDQIAGDEADGNAGEETNRAMIW

SEQ ID NO: 168505 - protein, 282 aa, Oryza sativa
  unsure (1)..(282): unsure at all Xaa locations
  Clone ID: PAT_MRT4530_67011C.1.pep
PRLRQFPLRAACAAGIAAPHRTPAPTFLPLTVAETPPPPPTRATSPPAASSRTPSPREPLPHPATTPTSCAAARASXPPLFSTKTAPKHHLHCKPRTPLLLPPPAAXSPPVPSTXPAPSPPSAPQRRGCPRPPPLFTGNPPEFHSPHAPMSSPPSPLPPXEPVAGPPSPLPPRGARPAGFPVVVSPSPPXEHPSSPPCSLPPLAVPPLTAPPLAVSGRWPCAAAAGGRPAGSSPLRSAPAPLPXPPPFGPSRSRSGPSDRPQSPPGPPVCLFYCLLNKMFYN

SEQ ID NO: 168506 - protein, 455 aa, Oryza sativa
  Clone ID: PAT_MRT4530_67012C.1.pep
MLLPAAAAAAGGVHRLKSLCPVRRISSLKVPWRRDAALDAAILRDRRYRLASRLVREVLLSPGRRLLLRFLSKRQQRIHHTELLWTFFRRYPFLLSVSPHPGTVASPSPHLLSFLEFASRHHALHSPLLASRLAKLLMISSTRALPVPKIAAAKRDFGLPDDFLTSLVPRYPHLFRLVGDPGPDASGNAFLELVSWDDQLAKSVIELRADKEADVVGIRPRPNFTVKLPRGFYLKKEMREWVRDWLELPYVSPYADTSGLHPASPEAEKRLIGVLHEVLSLSVERRMAVPIIGKFCDEFRLSNAFANAFTRHPGIFYVSLKGGIKTAVLREAYDENGELVDKDPMIELKERFVAIMDEGHREYLEELRKKREELEKQRLQEAYRGAKVGTGIEDEMEEEGTDESDEDDDSEEGEALMTWGAVAKLTRSGVGNGIAAFVLEPLNSLSRLEDILCDY

SEQ ID NO: 168507 - protein, 110 aa, Oryza sativa
  Clone ID: PAT_MRT4530_67013C.1.pep
MAPSQPKSGLFVGINKGHVVTKRELPPRPSDRKGKSTKRVTFVRNLIREVAGFAPYEKRITELLKVGKDKRALKVAKRKLGTHKRAKKKREEMAGVIRKMRSAGTTDKKK

SEQ ID NO: 168508 - protein, 58 aa, Oryza sativa
  Clone ID: PAT_MRT4530_67014C.1.pep
ECLRLCYCPPRQHPASLDPPLPVALYLGVAHLALGVPALRVSLLAPLAYALSMLESVT

SEQ ID NO: 168509 - protein, 55 aa, Oryza sativa
  Clone ID: PAT_MRT4530_67015C.1.pep
MDPPLLNRRPRSPDATSSSRMHCWRAISRGGRHQSGATLTRCNVLIPHAMLEGNI

SEQ ID NO: 168510 - protein, 62 aa, Oryza sativa
  Clone ID: PAT_MRT4530_67016C.1.pep
LTFYQDRPGKLRQNKSFKKKIPKAPKKVQKRAPRITHQDLLKAGAEKPKRRKNNPLITELRT

SEQ ID NO: 168511 - protein, 111 aa, Oryza sativa
  unsure (1)..(111): unsure at all Xaa locations
  Clone ID: PAT_MRT4530_67018C.1.pep
MYVVCRYGIPCAYTDSSFIRKEIYHVIETESTDGRSPTRIRLGLYHIVRGPISPSPTWRSTNPWYKRDPXARPKASNLTANTSTTAYEAGAYRSQVIGXSSRTNSTMVSII

SEQ ID NO: 168512 - protein, 70 aa, Oryza sativa
  Clone ID: PAT_MRT4530_67019C.1.pep
KQGQELRFKTIPKKDRRSNYTELIQELRLIHPNHRAMVILPPRHELIKRLTPPPPPTYLGTSRLRTTDTG

SEQ ID NO: 168513 - protein, 750 aa, Oryza sativa
  Clone ID: PAT_MRT4530_6701C.1.pep
MLEPVKAEIKRLYDAGFIRPRRYAEWVSSIVPVIKKNSKVRVCIDFQNLNKATPKDEYPIPVADQLVDAASGHKILSFMDGNAEYNQIFMAEEDIHKITFRCPSAIGLFEWVVMTFGLKSARATYQRAMNYIYDDLIGWLVEVYIDDVVVKSKEIKDHIAYLRKVFERTRKYGLRMNPTKCAFGVSAGQFLGFLVHERGIEVTQRSVNAIKKIQPPENKTELQEMIGKINFVRRFISNLSGRLRHYLLSNECTVVCKADVVKYMLSAPILKGRVGKWIFFLTEFDLRYESPKAIKGQAIADFIVEHRDDSIGSVEIVPWTLFFDGSVCSHGCGIGLVIISPRGACFEFAYTIKPYATNNQAEYEAVLKGLQLLKEVEADTIEIMGDSLLVISQLAGEHECKNDTLMVYNEKCQELMKEFRLVTLKQFSREQNIEANDLAQGASGYKPMIKDVKVEIAAMTADDWRYYRGCQDCQKFGAIQRAPASAMNPIIKPWPFRGWGIDMIGMINPPSSKGHKFILVATDYFTKWVEAIPLKKVDSGDAIQFVQEHIIYRFGIPQTITTDQGSIFVSDEFVQFADSMGIKLLNSSPYYAQANGQAEASNKSLIKLIKRKISDYPRQWHTRLAEALWSYRMACHGSIQVPPCKFVYGHEAVLRWEVTKDKERIARHYNKKVVPKDFSEGELVWKLIVPIGTRDSKFGKWSPNWEGPFQIYKVVSKEAYMLQGLDGEVYGRVPNGKYLKKYYPSVWVNA

SEQ ID NO: 168514 - protein, 55 aa, Oryza sativa
  Clone ID: PAT_MRT4530_67020C.1.pep
THHWVATPPGITYRARVGVCTRCIYPGHRVTFAGCHQLHTCRHVVSFQTRLRAVS

SEQ ID NO: 168515 - protein, 128 aa, Oryza sativa
  Clone ID: PAT_MRT4530_67021C.1.pep
LAHPIPTDCAGRAAGVLAARAGGGLVCAGAGPRRRRVLRASCVDGDAGGARGRDAGSVGRAAATAGLSGTLALARPDPASSRARAWTRSKQVAGTATSKLAQVQVAATSVRRSVLSSCLSSYGPICLF

SEQ ID NO: 168516 - protein, 47 aa, Oryza sativa
  Clone ID: PAT_MRT4530_67022C.1.pep
MGLGIGPQLLLWLDAPLKKNDSSRKANPTWASTRVADLVPTGLRVAL

SEQ ID NO: 168517 - protein, 236 aa, Oryza sativa
  unsure (1)..(236): unsure at all Xaa locations
  Clone ID: PAT_MRT4530_67023C.1.pep
FSNQYVAISSTETSIGVREIILLAHWLSNQYVAISRTGNFHWCSRDNSTRSLALEPVRSNLSHRNFHWCSRDNSTRSLVLEPWSSLDYIWFSTSGVAILPLFLLLVVEFRLHLVLDQRCSDSPTISTSSGRVATTTWSSTPTKLTSDTQYHQGFYPEIPCHDXHLALKPILLSLYAVLTRPPRNLRELRLGTPRADKALSDPVETKDHILCLLDHSRTVGGSRQGIRNGEMVYPPR

SEQ ID NO: 168518 - protein, 86 aa, Oryza sativa
  Clone ID: PAT_MRT4530_67024C.1.pep
TYSDTQAKGQGLTLGAGQRDQDQLAYITSTNSLINQPTGWRAAPWTCRQYSTEPTDPRSIPPYQGTSGLIAGWPTSTRVAPVGPED

SEQ ID NO: 168519 - protein, 92 aa, Oryza sativa
  unsure (1)..(92): unsure at all Xaa locations
  Clone ID: PAT_MRT4530_67025C.1.pep
EAPAPLPQAAQLGYKPNVLSFWIIFLQLRLIDYCKXEYMEYCASHTANIQVHKDSEGRHDISSFAKVAFSKLLGXRTHEPSQRRKRQANTQN

SEQ ID NO: 168520 - protein, 296 aa, Oryza sativa
  unsure (1)..(296): unsure at all Xaa locations
  Clone ID: PAT_MRT4530_67026C.1.pep
FSNQYVAISRTATSIGVREIILLTRWFSNQYVVISRTETSIGVREIILLARWSSNQYVAISRTXNFHWCSRDNSTRSLVLEPVRSNLSHRNFHWCSRDNSTRSLVLEPWSSLDYIWFSTSGVAILPLPXLLVVEFKLHLVLDLRCSDSPTTFTSSGRVYTTXWFSTSGVAILPLFLLXWSTCDYHLVLDQRCSDSSITSTPTKLTSDTQNRQVFYPEIPYHKRHLALKPILMSLYAVLIRPLRNLRELRLGTPRADKALSDPSETKDHIMHFLDHSRTVDRSRQGIRNEQMVYPPR

SEQ ID NO: 168521 - protein, 154 aa, Oryza sativa
  unsure (1)..(154): unsure at all Xaa locations
  Clone ID: PAT_MRT4530_67027C.1.pep
MEVAVREIATYWFENQRASRIIFRTPMRVAVXEIATYWFENQRASRIISRTPMGVAVREIATYWFENQRASRIISRTPMEVAVREIATYWFENQRASRIISRTPMGVAVREIATYWFENQRASRIISQTPMEALELVYYMCISCVRIRHSMWWV

SEQ ID NO: 168522 - protein, 351 aa, Oryza sativa
  Clone ID: PAT_MRT4530_67028C.1.pep
MTTPGLPNFTVNNSSPTQLAPTTTMLLPWPEDNNNGDTMFIFQGNPWWTRQGILLAYAVSLTATDHHLTRDVVREAVVFLLEFMPGKIRDSAFVSPDSIRRHRRGLTVLILEVDIRRLVLAQEIYLGGYTISSFRIPCRHPPTVLDLVVRESFSEDKALGPLTCLGSDKALSALGVPSRSSLRFLGGLVKTAGNGRIATPLVKNQVSLDHLKSWCEDRCVAAVVVPQPSEVAVREIATYWFEDQRTCRIISRTPMEVAVREIATYWFEDQRTSRIISRTPMEVAVREIATYWFEDQRTCRVISRTPMEVAVREIATYWLENQRASRIISRAPMEVCGAGDCYVLVREPASE

SEQ ID NO: 168523 - protein, 44 aa, Oryza sativa
  Clone ID: PAT_MRT4530_67029C.1.pep
FKVSWFINYCSRFICCVQFLKDLFFMSAVYIKMINLRLKSQVHR

SEQ ID NO: 168524 - protein, 52 aa, Oryza sativa
  Clone ID: PAT_MRT4530_6702C.1.pep
LKNGRLAMFSMFGFFVQAIVTGKGPIENLFDHVADPVAHNAWAYAAKFVPGK

SEQ ID NO: 168525 - protein, 164 aa, Oryza sativa
  Clone ID: PAT_MRT4530_67030C.1.pep
ASRGNADGERQSMAGLTDSPGRSNRRLVAGLTGPRGRSDLGALEMSRKIESDTVTSTSNKNIKNHCLVPGKQQQPKWIPSSLSRSQKRRLQRFRAIGQKEKEAENIRDQTCKDLEPRTVHKQVWRPKEFIGIHVCEAYDFGDSLLIILQVAKCFDTLIIVSKAT

SEQ ID NO: 168526 - protein, 111 aa, Oryza sativa
  Clone ID: PAT_MRT4530_67031C.1.pep
AQRKKTLKSRRNSREVARVDVKEVVDRTGSTFSSLCVLLAVLPRRSAPQTNGASTGSITRASKARRTPIRISILSSYILGCNPKTPFRSTRQQRPLVERIDPPGIHKDHIG

SEQ ID NO: 168527 - protein, 111 aa, Oryza sativa
  Clone ID: PAT_MRT4530_67032C.1.pep
AQRKKTLRSQRNSREVARVDVDEVVDLTGSTFSSSCVLLAVLPRRLAPQTSGASTGSITRASKARRTPIWIPIRSSYILSCNPKTPFRSTHQQRSLAERIDPPGIHKDHIG

SEQ ID NO: 168528 - protein, 67 aa, Oryza sativa
  unsure (1)..(67): unsure at all Xaa locations
  Clone ID: PAT_MRT4530_67033C.1.pep
GHRSRRRRGGXGRSRDDADEEHATTRSRRARSIYGSGLVXAPLLDAPARRPAPPTRSLKPRPKRQSV

SEQ ID NO: 168529 - protein, 111 aa, Oryza sativa
  Clone ID: PAT_MRT4530_67034C.1.pep
AQRKKTLQSRRNSREVARVDVEEVVDRTGSTFSSSCVLLTVLPHRSAPQTSGASTGSITRASKACRTPIRIPIRSSCILGCKPKTPFRSTHQQRPLAERIDPPDIHNDHIG

SEQ ID NO: 168530 - protein, 74 aa, Oryza sativa
  Clone ID: PAT_MRT4530_67036C.1.pep
KRSKINIAAACTATTTLFFCSPLVFSTTALLFSSLSGQPEAAGSRARVSGGEARRLCPWRRSYSRGPWRCCQRS

SEQ ID NO: 168531 - protein, 111 aa, Oryza sativa
  Clone ID: PAT_MRT4530_67037C.1.pep
AQRKKTLRSRRNSREVARVDVEEVVDHTGSTFSSSCVLLAVLLRRSAPQTSGASTGSITRASKARRTPIRIPIRSSCTLGCNLKTPFRSMHQQRPLAECIDPSGIHKDHIG

SEQ ID NO: 168532 - protein, 67 aa, Oryza sativa
  Clone ID: PAT_MRT4530_67038C.1.pep
MLQQMELQAIYRTMSYIRQKAPPLLTDVFYLKKHNGYCIIQTNHIKLTTCVESRTIQGSRNKHYHNE

SEQ ID NO: 168533 - protein, 843 aa, Oryza sativa
  Clone ID: PAT_MRT4530_67039C.1.pep
MRFPLRRLLIRRVELTPPPRPCCLRTTTFSTTAAAASPDRRLLAVLRGCVSPSHLSLGLQVHGRAVTAGLHATDTALQTRLVGMYVLARRFRDAVAVFSSLPRGAAACALPWNWLIRGLTMAGDYRSALLFYLKMWAHPSAPLPDSHTFPYVVKSCAALGAIALGRLVHRTARTLGLDGDMFVGSALIKMYANGGLLWDARQVFDGMAERDCVLWNVMMDGYVKAGSVSSAVELFGDMRASGCEPNFATLACFLSVSATESDLFFGVQLHTLAVKYGLESEVAVANTLVSMYAKCKCLDDGWKLFGLMPRDDLVTWNGMISGCVQNGFVDQALLLFCDMQKSGIRPDSVTLVSLLPALTDLNGFNQGKELHGYIVRNCVHMDVFLVSALVDIYFKCRAVRMAQSVYDSSKAIDVVIGSTMISGYVLNGMSQEAVKMFRYLLEQGIRPNAVAIASVLPACASMAAMKLGQELHSYALKNAYEGRCYVESALMDMYAKCGRLDLSHYIFSKISAKDEVTWNSMISSFAQNGEPEEALNLFREMCMEGVKYSNVTISSVLSACASLPAIYYGKEIHGVVIKGPIRADLFAESALIDMYGKCGNLEWAHRVFESMPEKNEVSWNSIIASYGAYGLVKESVSLLRHMQEEGFKADHVTFLALVSACAHAGQVQEGLRLFRCMTEEYQIAPRMEHFACMVDLYSRAGKLDKAMELIVDMPFKPDAGIWGALLHACRVHRNVELAEIASQELFKLDPHNSGYYVLMSNINAVAGRWDGVSKVRRLMKDTKVQKIPGYSWVDVNNTSHLFVAADKSHPDSEDIYMSLKSILLELREEGHGDLIAMLSNTAS

SEQ ID NO: 168534 - protein, 144 aa, Oryza sativa
  Clone ID: PAT_MRT4530_6703C.1.pep
MAPGQPVNPRLLMREQPQHGGQVVNRLHNYQGGNLNYQYQPPSPQAQYQLGALAQPQFASQYGQFEPMQQQSQGAAQQQPWANVIADVMREQFGLSGPPPTFGRRRPRTSPTPRTRPALPSPTSPATPCLSRPRPTSPDPPPPL

SEQ ID NO: 168535 - protein, 111 aa, Oryza sativa
  unsure (1)..(111): unsure at all Xaa locations
  Clone ID: PAT_MRT4530_67040C.1.pep
AQRKKTLRSRRNSREVARVVVEEVVDRTGSTFSSSCVLLAVLLRXSAPQTSGASTGSITRASKARKTPIWIPIRSSCILGCNPKTPFRSMRQQRLLVERIDPPCIHKDHIG

SEQ ID NO: 168536 - protein, 111 aa, Oryza sativa
  unsure (1)..(111): unsure at all Xaa locations
  Clone ID: PAT_MRT4530_67041C.1.pep
AQRKKALRSRRNSREVARVDVEEVVDRTSSTFSSLCVLLAVLPRRSAPQTSGASTRSITRASKARRTPIRIPIQSSCILGCNLETPSRSTRQXRPLAERIDPPGIHKDHID

SEQ ID NO: 168537 - protein, 111 aa, Oryza sativa
  unsure (1)..(111): unsure at all Xaa locations
  Clone ID: PAT_MRT4530_67042C.1.pep
AQRKKMLRNRRNSREVACVDIEEVVDRTGSTFSSSCVLLAVLPRRSAPQTSGASIGSITRASKARRTPIRIPIXSSCILGCNPKTPFRSTRQQRPLTERIDPPGIHKDHIG

SEQ ID NO: 168538 - protein, 600 aa, Oryza sativa
  unsure (1)..(600): unsure at all Xaa locations
  Clone ID: PAT_MRT4530_67043C.1.pep
VDAPAAARGRVARFINAAGTTGFPTGKRAVSATPRTAAVAQLRRPLAGGSTQVIAASTRLRTRLQSRIRKEKVYIDXYVKWINFTSSGEPWSLEEAVNDKHWKEAMDAEYMALMENKTXHLVPPQKRRNVIDCKWVYKMKRKADGGGLDRYKARLVAKGFKQRYEIDYEDTFNPIVKAATIRIVLSLAVSKGWSLRQLDVKNVFLHGVLEEEVYMNQPPGYEKKSLYNYVCKLDKDLYGLKHAPRAWYSRLSAKXIDLGSMSSKANTSLIFYKKGHVSIFLLIYVDDIIVASSTLDATSALLQELSKDFALKDLGDLHYFLDIEVHKVRNAILLSQEKYASDLLWXVGMHECKPDSTPLSTSEKLSVNEGALLGPQDSTQYRSVVDALQYLTLTRLDXSFSINKACQFLHAPTSXYWAVVKRILRYVKYTVNMGLRFSRASSLLVNGFSDVYWAGSPDDRRSIXGFVVFLGPNLVSWNAXKKQAIVSRSSTEAEYKALANATAEIMWIXMLLQELGVESPRAAKLWCDNLGAKYLSANPIFHSCTKHIEVDFHFVRERVARKLLEIAYISTKDQVADGFTKAIPVRQLKMFKNNLNLERV

SEQ ID NO: 168539 - protein, 109 aa, Oryza sativa
  unsure (1)..(109): unsure at all Xaa locations
  Clone ID: PAT_MRT4530_67044C.1.pep
RKKTLRSXRNYHEVARVDVEEVVDRTGSTFSSSCVLLAVLPRRSAPQTSGASTGSITRAXKARRTPIRIPVRSSYILGCNPKTPFRSTRQQWPLAERIDPPGIHKDHIG

SEQ ID NO: 168540 - protein, 244 aa, Oryza sativa
  Clone ID: PAT_MRT4530_67045C.1.pep
MVVVGVGVPRARSSQWDPLLLVGVVIPLVPAGSRRGAVAGVLLLLRRRIEGVPLFSLPATSARVGTHASSTFNSFWPSSSMCQEEWPPGRQYQHQHELRAGDGPAAMYTVVPDSQIRNATIERFLKEIAGEKPIRFTAQQLAGFTNNYLARLGAGGFGTVYKGMLPNGHMVGRCALGRLPPPPLRASAPFRFTGRRALARRLRRPPLSPARRPAVCSLPVGWPAIEEWQREREGRKGKKRGKGS

SEQ ID NO: 168541 - protein, 111 aa, Oryza sativa
  Clone ID: PAT_MRT4530_67046C.1.pep
VQRKKTLGSRRNSREVVHVDVEEVVDRTDSTFSSSCVLLAVLPRRSSPQTSGASTGSITWASKARRTPIRIPIRSSYILGCNPKTPFQSTRQQRPLAERIDPPSIHKDHIG

SEQ ID NO: 168542 - protein, 271 aa, Oryza sativa
  unsure (1)..(271): unsure at all Xaa locations
  Clone ID: PAT_MRT4530_67047C.1.pep
MERRSSVRFAPSEIARMEKLVTHKKEQVLDEIFCRKLAEEFNCSPGRVGSKALQAVQVQEWFRQKFPASTVIPPCLPTGSEEKALASQASAPVSEEKPPSSEENALAVDTSISNDIGEVSPDLPIDNIDKLPEIEDMQFEARSSKDYAXVWYDIATFLAYRKLSSGEFEVRVRFQGFGAEEDEWINVRKAIRLQSIPLESSECKLIREGDLVLCFKESNDEALHFDAHVLEIQRKQHDIRGCRCVFLVEYDHDGTQERVNLRRLSRRPKHS

SEQ ID NO: 168543 - protein, 111 aa, Oryza sativa
  Clone ID: PAT_MRT4530_67048C.1.pep
AQRKKTLRSQRNSREVARVNVDEVVDRTGSTFSSSCVLLAVLPRRSAPQTSDTSTGSITRASKARRTLIQIPIRSSYILGCNPKTHFRSTRQQRPLAERIDPPGIHKDHIG

SEQ ID NO: 168544 - protein, 76 aa, Oryza sativa
  Clone ID: PAT_MRT4530_67049C.1.pep
NSGTIRSENPMSVNMVIGTMLFSVLQVLWQAVFLIWHIYCICFNIKTDEWVMSNFPCFGLFLHQLQAIFSFAVSYS

SEQ ID NO: 168545 - protein, 1165 aa, Oryza sativa
  unsure (1)..(1165): unsure at all Xaa locations
  Clone ID: PAT_MRT4530_6704C.1.pep
LQDQINWHAHAFEGELWTCTGVKQISQASCFLSTRFWHAWWDRLEVSKQFFLMAEKPPLSPSSASPSTVKEKIQKLGLTDVNEGNIVPIDPEKFTPEQKKYFEVMLQQARDQFLNSFMQTRKGTLVQKYKVKVVADDPGTSSSKGEDVKQALDGSAQLSDKGATDGSLGSQGDNSQGVHGVQGDGVHGVQDRVDYAVHHALINQSEVLVNTLSNMMKSIADGSIAEHQAAGPVYLQGGVFPNYRPLITDAQPSIQAVSPIAPLAQPTAPASTPLPAPSALALGQLVNPQLLMREQPQHSGQVVNRPTQDQVAAMFLPPQPAVDPIQXSRFNRHFRFSRLYNQSSNNWWTACTTIFKSSRPRTLGSPRTAGWHDVMREQFGLKPKETGSLYRQPYPEWFERVPLPNRFKVPDFSKFSGQHGVSTYEHISRFLAQCGEASAVDTLRVRLFWLSLSGSAFTWFSSLPYGSINSWVDLEKQFLSYFYSGVHEMKLSDLTAIKQRHDEPVHEYIQRFREMRNKCFSLSLTDAQLADLAFQGMIAPIREKFSSEDFDSLSHMIQKVTLHEHRSMEARKSSKKVNHVCPYMYGSDDDEDDFEIAAAEWVRSKKVIPCQWVKSSGKEEKYDFDITKADKIFDLLLREKQIQLPAGHTIPSAEELGKKRYCKWXLKTIMVLKDFGGNPSETKGVLNVELTVSSKTIPTTFFVIDGKGSYSLLLGRDWNRWRLAKADXLLVXNLSPEFRTKLIELLKEFRDCFAWEYYEMPGLSRSIVEHRLPIKLGVRPHQQPPRRCKADMLEPVKAEIKRLYDAGFIRPCRYAEWVSSIFPVIKKNDLNKATPKDEYPMPVADQLVDAASGNKILSFMDGIAGYNQIFMAEEDIHKTACRCPSAIGLFEWVVMTFGLKSARATYQRAMNYIYHDLIGWLVEVYIDDVVVKSKEIKDHIADLRKVFERTRKYGLKMNPTKCAFGVSAGQFLGFLVHERGIEITQRSINAIKKIKPPENKTELQEMIGKINFVRRFISNLSRKLEPFTPLLRLKADQXFTWGAEQQKALDNIKGYLSSPPVLIPPQKGIPFRLYLSAGEKSIGSVLIQELDGKERVVFYLSRRLLDAETRYSPVEKLCLYLYFSCTRLRHYLLSNECTIICKTDVVRYILSAPILKGRVGKWIFS

SEQ ID NO: 168546 - protein, 72 aa, Oryza sativa
  Clone ID: PAT_MRT4530_67050C.1.pep
CYRARLCHMDSQTLLQNLIEAVPSSGIQGISSSLSGKSHLLAIRNSKREDGLQLMKEESKAWEVCHFSLHLS

SEQ ID NO: 168547 - protein, 242 aa, Oryza sativa
  Clone ID: PAT_MRT4530_67051C.1.pep
MAAAAAAAGSSDSRKPAAHPPPRDFLVHVEAYLSRRDGVDKLLKISRYAARLALAAGPLPPAASARLKSFESSVGLSRKAFRLGKFVQNVNALRAHPHPPPAVALLAYGGEGVYYFLEQFVWLAKAGLLPAHLLPRLQRLSAWAELLGYVGSITIKLEEIGKLESSVKMRLKEGCREESDVVRTLRVKLLLKRMSVVQDVADAVMALGDVTDGKGLLGSSTLMASAGLLSALISAHKNWNSC

SEQ ID NO: 168548 - protein, 113 aa, Oryza sativa
  Clone ID: PAT_MRT4530_67052C.1.pep
MVRVERKMRQAQLAEIQAREEVLDSLMRDTEEERQAALIASSVLDEALGDICLQYEAHAEDLERRIQDARGILDAAAAQERRASEANASLQARMTALEAERKALVPLPSPITV

SEQ ID NO: 168549 - protein, 399 aa, Oryza sativa
  unsure (1)..(399): unsure at all Xaa locations
  Clone ID: PAT_MRT4530_67053C.1.pep
AAGAAPEKGCLINWRAEAHGGGGGDLGDRMESMGEYCSNTPCKWLLDLGKGGAHDTYAHNLFDGMPSQPDMSKEDXRISELVPINSIMNKEGNXLDKALDLILKKFEQMEAKRTCEEKIDXILEKLDEIXANRNKFFKEMSASIKATTADFNSASFSTPPTSSPPVSPKCLTECFNNNITWVVANSSHIGEVLAPTAAXELEDREDKXKLPTFVTMDLPKVTPTNSSMICSSYDAKSDHTVAIVVTCVTSTVSSMELLSTDGTIGGTNINILDSTKAMLTNCLTVGLDVKXGADHARVTCQTMMGVSKGVLVPDASSEVSSLWLIAEMDLIKLMPSECLMKCLKGNNKLLVGHPKRNPWPPPWLGWEVWHIPWYVLDSFWTSVGLMSPWPPPIRLEQCK

SEQ ID NO: 168550 - protein, 135 aa, Oryza sativa
  Clone ID: PAT_MRT4530_67054C.1.pep
WVVVDKGVMSAVPPTTTTPASSSLSTVEWWRGEQCGHFAAASSSAAGDFPAAVAAAAFSSWPVRRCCPVGLRLETRKPNPLPPICPHPGLSPPPQYARVAVAPPSRSSALRAHLRSEGHGLAATSSSSSSPFDWT

SEQ ID NO: 168551 - protein, 505 aa, Oryza sativa
  Clone ID: PAT_MRT4530_67055C.1.pep
MAWLGIGMGRQIVPVLVFVAVLCSGVDASFNRYSFPKDFIFGTGSAAYQRCILALLNYLQYEGAAKEGGKILNGDTGDVADDFYHRYKEDVNLLKDMNMDAFRFSISWSRILPNGTLSGGVNKEGVAFYNNLINEIIAKGMKPFVTIFHWDTPQALESKYGGFLSENIIKDYVDFAEVCFREFGDRVKFWATFNEPWTYCSQGYGTGIHALGRCSPYVSTSCAGGDSSREPYLAAHHVILAHATAVHLYRTKYQPTQHGQIGITAVSHWFVPYNDTAADRRVVQRSLDFMYGWFLDPIVHGDYPGTMRGWLGARLPAFTAEQAAAVRGSYDFIGVNYYTTYYAKSVPLPSSNRLSYDTDIRANTTGFRNGKPIGPQEFTPIFFNYPPGLRELLLYTKRRYNNPIIYVTENGIAEGNNKSLPITEALKDGHRIEFHSKHLQFVNHAIKNGVNVKGYFTWTFMDCFEWGDGYLDRFGLIYIDRLNNLKRYHKQSSYWIANFLKRKKY

SEQ ID NO: 168552 - protein, 518 aa, Oryza sativa
  Clone ID: PAT_MRT4530_67056C.1.pep
MVVVPLEALPDDGLPAAAAAEEEDVMVVDRVEALPDDGLPAAVAPVEAAAPVGEDPMVVIPDDAVLRIISFLPLESAIRTTVLSKEWLRLWKEDWGQKSRRYEIRARCAPSVEDLLKILEEERRLERLSVVVHTIMKSSHLREIIERSADRRVEQLHVELTNPNVVDKVRFHLPILSRVIALQHLSLRQIVVSKMRFKPQQRFNELSEICFHFVSIESYMLRNVITRCPNLRVLDLRSCFDLDAVAISPGGPKLSSLTIAGCKHLNKVNVVGVTSLRSVFYSGRFLSSFYLPRTSRRSSFTDLYICYDGPIIPMVFGKWAQDALSKLSNLSNLTICSNSLTACLIVPSLPDEERTTQLKWLGGFRRLKELQLLMFDIKTINVFDIYAFLQSFHFPNLTKLFLQLPRIREDVQEAVREDVLQSMSEGVPEYALDNLKVVRMMNFNRTRIEMHLVRFFLRKARNINSLQLVSLFHNAIPLGLAVQQGDIIQGALASGVIQESNSGAGTTQPCHSEVFIDF

SEQ ID NO: 168553 - protein, 825 aa, Oryza sativa
  Clone ID: PAT_MRT4530_67057C.1.pep
MMERSLIEALATAAQGGTVGTSVFDMLKYAVLPIAKVFTVCFMGFLMASKYVNILQPNGRKLLNGLVFSLLLPCLIFSQLGRAITIEKMLQWWYIPVNIVVGAVSGSLIGFVVASIIRPPYPYFKFTVIHIGIGNIGNIPLVLIAALCRDPTNPFGDSDKCNEDGNAYISFGQWVGAIIVYTYVFKMLAPPPGESFDSAEEDILPIKASGDNVVPEKGKYPTSTRTSTVAENEPLLSSEGDKNVSTSLGSKIMGIVRSMVKFLKDKQLLQPPIIASVFAIAIGVVPVLKNFVLTDDAPLFFFTDSCLILGEAMIPCILLAVGGNLVDGPGEGSNRLGVRTTVAIIFARLILVPLAGVGIIVLVDKLGFIPKDDKMFKFVLLLQHSMPTSVLSDAILHRNVHKIKISPDIPEKDSTMTCTLASKPWRQPEGWVPDIHPRTYMNAKIKIFACKLMPAVPKQGVHGEATDGQRDNSGDEVGGRQQWGSKPGVAMTPASYAGQFRQQTMMARQKASGKMGGTRDGQLPRAVAAAGRERDGEEIGDTNQIGAIAEGVKYCTKIDASGNSDVNWGTKFSLSVDEHDMSMQQMELTVEVYRREPVFLREHLQGTAVIQMKEYFDKFSQGKDPSGVTEETSSFQLRRKKSDKPHGFVDISIRICKEENNRATFSGSQEGLKYPDQVGITLAIEDGPVYNYPPMPSSHFKGYTQDVDHYSNSMPVTAATRPGQSPPGSNYSYQPTMVPPILPHPTSNPSFFTPQYPTRGPVPQTYINVPPRMGGQNSTPNFGMGLGAGALAAGTMIFGENLLSGQSLNTGLDGASLSISNDAPF

SEQ ID NO: 168554 - protein, 1328 aa, Oryza sativa
  Clone ID: PAT_MRT4530_67058C.1.pep
MASKTVREFAAPYADNVAIGPQVNIGDVDFDLKSSLITMAQASPFCGKPNEDANAHLQQFLEIYSTYTIKGVSPNAVRLRLFPFSLLERAKQWFYANRAAVMMRTSTPSIHPRPPIYSMMVLLPALVHDECPRGRVDAHHKFAATIGDVVTPFIGKFVVVYFDDILIYSKSMGEHFNHLRAVFNALRDARLFGNLEKCTFCTDRVSFLGYVVTPQGIEVDQAKVEAIQSWPTPKTVSQVRSFLGLAGFYRRFVQDFSTIAAPLNALTKKGVPFTWGTSQGNAFHMLKDKLTHAPLLQLPDFNKTFELECDASGIGLGGVLLQEGKPVAYFSEKLSGPVLNYSTYDKELYALVRTLETWQHFLWPKEFVIHSDHESLKHIRSQGKLNRRHAKWVEFIESFPYVIKHKKGKENIIADALSRRYTLLTQLDYKIFGLETIKDQYAHDADFNDEAHGGGLMGHFGAKKTHDILASHFFWPHMRRDVGRPVLKKNIKMWEECLPHIEFAYNRSLHSTTKMCPFQIVYGLLPRAPIDLMPLPSSEKLNFDAKQRAELMLKLHETTKENIERMNAKYKFASDKGRRELNFEPGDLVWLHLRKERFPDLRKSKLMPRADGPFKVLAKINENAYKIDLPADFGVSPTFNVADLQPYLGEEDELESRTTQMQEGEDDEDINTIDTSTSPHIQHDGPITRARARQLNYQDECPHGRVDAYHKFAATIGDDRATNPSGFASCQHLGQMLYGIPLEILPDGQNQCPSWKDFQLPADKGRVHSRSMGMTTGKMVSNMGWREKRLQTRQRGMHTIKETELLAAKLDLLMKRLDDHKKRSQGTVKALDSHVTCEVCSNTDHSGNDCQKTREEAMYMGNNNGYCPQGGQGWNQPRPYYQGGNNNCNFSNQPSLKDLVFAQAKTTDALSKKLAANEKVLENINVKLDGFASAFQNQLSFNKMIETQLAQVASLVPANETRRIPGQPDPSGENVKVITTRGGTNGMSKEASSNDSADKEVQPEKTLPQEYYDTRLLPFPQRLRKPSVDEQFARFVEVIQKIHINVPLLEAMQVPTYARYLKDILNNKRPLPTMEVVKLTEHCSNLILHKLPKKKKDPGCPTITYSIVAQQFDQALCDLGASVSIMPKDVFDRLNFTVLAPTPMCLQLADSSVRYPAGIAEDVPVKIRDFFTPVDFVVLDMDTGKETPLILGRPFLSTARANIDVGTGSIRFHINGKEEKFEFQPRTEQCSMVRMKYGPNPQNIQMVEVEPPKTDSLVKFMQNFLEKETTIPRNRYWKTPVKCPIPAKKLEQPTQKKPPSAPKPKKVWREKQKTLTPSPPEMGRKSVN

SEQ ID NO: 168555 - protein, 140 aa, Oryza sativa
  Clone ID: PAT_MRT4530_67059C.1.pep
LSDDAPLFFFTDSCLILGEAMIPCILLAVGGNLVDGPGEGSNRLGVRTTVAIIFARLILVPLAGVGIIVLVDKLGFIPKDDKMFKFVLLLQHSMPTSVLSGAVANLRGCGKESAAILFWVHIFAVFSMAGWIILYLSLLF

SEQ ID NO: 168556 - protein, 924 aa, Oryza sativa
  Clone ID: PAT_MRT4530_6705C.1.pep
MAEKQPQPPSTPGSVKKKMLKLGLTDVNEENVMPIDPEKFTPEQKKKFEAMLQQARDLFLNSFIQTRKETLVQKYKIKVIADDPRTSSLWDGDGKQAPGGSAQPSTKGATDGSPSDQGDNSQGVHGVQGDGAQEPQGGNLNQNSELAQDFFNNFQDRVDYAVHHALINQSGVLVNTLSTMMKTIADGSIVEHQAAGPIYLQGGVFPNYLSLITDAQPSVQAVPSVAPTTQPTAPASTPLPATLAMSPGQPYSSSRFSRHPQSSRLYNQPNSRKLGRSAEDLIKTNMVLKDFGGNPSETKGVLNVELTVGSDKIEIVPADSQSRMEKPSCYFEGVVEGSNVYAKDTDDKQGQGFMSADELEEIDVGPAEIKRLYDAGFIRPCQYAEWVSSIVPVIKKNGKVRVCIDFRDLNKAIPKDEYPMPVTDQLVDAASGNKILSFMDGNAGYNQIFMAEEDIHKTAFRCPGAIGLCEWVVMTFGLKSAGATYQRAMNYIYHDLIGWLVEVYIDDVVVKSKEVEDHISDLRKVFERTRKYGLKMNPTKCAFGVSAGQFFGFLVHERGIEVTQRSVNAIKKIQPPENKIELQEMIGKINFVRRFISNLSGRLEPFTPLLRLKADQQFTWGAEQQKALDNIKEYLSSRPVLIPPQKGIPFRLYLSAGYFWPTMLEDCLRYYKGCQDCQKFGAIQQVPASAMNPIIKLWSFRGCGIDMIGMINPPSSKGHKFILVATDYFTKWVEAIPLKKVDSEDAIQFVQEHIIYRFGLPQTITTDQGSIFVSDEFVQFADSVGIKLLNSSPYYAQANGQAEASNKSLIKLIKLKISDYPRQWHTRLAEALWSYRMACYGSIHVPPYKLVYGHEAVLPWEVRIGSRRTELQNDLIADEYYNLMADEREDLAQSRLRVFAKVMCSWCNRLWFADVQWPILLYRP

SEQ ID NO: 168557 - protein, 412 aa, Oryza sativa
  unsure (1)..(412): unsure at all Xaa locations
  Clone ID: PAT_MRT4530_67060C.1.pep
RRRSSRAAATAGATAEHGFGDDREPRFGNLWNDRSGADNRTTGTGDTERTRTGQRXRRDPYHHATRRGDDNDERARRRRXGEGTTSAAILGRRRDAAGTRLDDAEPRTKTTTGAAATLTKHRGRTRTARRRDECHNDRERREDDDDDDWGWRGGDEGSRQQLHGGEDGVGHAAAMPTTVAAQPDDEPGERPDVDDENERRRRRWTAEGXSSKGEARPRAILPLRRRRWRRRRAAGVGADETEGEAARVTAVFRRNRGAXPEERTMLRRRRRRRRRRSAYRRRTAAGRRRCSGGDATGRRRGASPAXFPTNRRQRRRRGGGCDAEEGDGTAGRRSGEEGEAAEREKEKAGRGGAATGELGKGLKRENARRGFHFIAEGSKSGMGEGGTATGNTAGGHGRRPGKTCPFPTIGGA

SEQ ID NO: 168558 - protein, 415 aa, Oryza sativa
  unsure (1)..(415): unsure at all Xaa locations
  Clone ID: PAT_MRT4530_67061C.1.pep
PPPRRRPLSRVPPAVFSRPCRRVSTPAGCAVASSSVTAASSSPACPXFPRRPPEARARQQLVALPPPTASSRPCRAAQVRAGRTVSSLGVAASTSTLAYPLIRPETAVARAGLSILFVADVPSAAPPSSPARRLAAPPPPPASQRQGRPRPRLPFDRTPPVFVVVVIVPPRRLVISRRRLRRRHRSDVFHAVLVSVQPLPAALVASSPAPVVVVIALSSFPVVVAPILVFVLASTSSGLMPAVSRLRSRIAAEVVPSPSVFAAPPCTAAVPVVVVAWGGRHRGRQVAAVLVRSFAAAEDRRSTVAAVDPISAVASSSSPPPSVGLPPTFWSSVSSLRRDLRLGALRLCRRAAVRRRACTVRAVRAAEPPPEVTSSLTSSSPSPLLSFRRFPKRGSQSSPKVRKAVLSEQGKSHHP

SEQ ID NO: 168559 - protein, 222 aa, Oryza sativa
  Clone ID: PAT_MRT4530_67062C.1.pep
MTEAAQRDNEPARRNDDDDDEHRRGSVKGEARPRATLPLRCRRWWWLSEPTSRGGGRGGRRDAGDEEDGEAGASDGGLRTNQRVGRGGGRRGDAEGGDGVAGPHLSGAAGVAGGSTVAATPLFCRRGRVSGDFPVKRRADRGEEAKTRERMEGVPFYRSGEGAGHGRGRNGDGKHGRRPWKAAGNGAAVPGDWGCHSRGKTGEIKEESMGINSPYLILESHD

SEQ ID NO: 168560 - protein, 507 aa, Oryza sativa
  Clone ID: PAT_MRT4530_67063C.1.pep
MASKTLREFAAPSTDNVAIGPQINIGDMDFDLKSSLITMAQASPFCGKPNVDANAHLQQFLEICSTYTIKGVSPDAIRLRLFPFSLLGRAKQWFYANRAAVNTWDKCSPGFLSKFFPMGKTNALRGRISNFQQTRDESIPEALERLQEYVAACPHHGMDDWLIVTPFPRFSVAAPPLPTSSFSFLGAGHPPAACAASPVRWLTSPPPSSASQWHRHHCTASSRPFTVPKALADAAAPSLGTVTSPSTSATPRFRRNFPGRPFLHPCAVGRATTASGIAAARSPSASPPLHPNPVGVRRRRLRPTSPSPPPVGRSSSPAHHLAVPPPSSDSQRRVPRRPRLRAAAAGCLVASSPAPVVVVVVLSSFPVVVASVPPSSRVRSSSAFRQVSCGSPVVVFVLSSASSSVAPAASRLRPRIVAEVVPSPFVSVVPEPSPLHPFAVVVPTPRRVVVRIRPLAAPVLVLSVSPVPVVRLSTPLLSFRRFSKRGSRSSPKVRKAVLSEQGKSHHP

SEQ ID NO: 168561 - protein, 553 aa, Oryza sativa
  Clone ID: PAT_MRT4530_67064C.1.pep
MPEGKMATSAGARARRRRLPKATSTRRKERPARATAFRRNRGAAGGEDNAATSTEEMATSIGVPAMYRSRPETGRYWTQTRRPPRRASGEEEVMPGKEAMPRCRRSRRRRRPTLRRGTAAGWREYSGTNATGCRRGRVSGDFPTNRRQRRRRGGGCDAGEGRDNSLDARCYSCCGRTSTSTLGGLSWTRMQTTDCERCTSPGLVTSTIVPLWNPCGHTLKWVSGTTRRVYTQFVADFDQLMPDRVRWTSYTQHDVNDHAPHCLADLCTRDQELWRTTCHLVLDVHIEPHNVHRVLKQLGMYQEFPPRVGRALADSLHRYSRKGLGLSYELVIVTTAEFVEHVQVESDTLLQRLETRPPVVSPDDVASVLRNFRARAAALLRRVSCRSAADVVQPSARRASPPLPRRSSVDHSAPSSSRRGYEAARRSHSRPSFQHTPAPEYTRGSAGSGVPPTSTAQPRPQAFQTLPYVHPTQGASGSGHFPYMPTGDNVLNTPAWRLHVTPHDEYGSASTHHGMPAYSPRTAFVEDFFSTEPPQGESGMDYWHAAPQVTQST

SEQ ID NO: 168562 - protein, 84 aa, Oryza sativa
  unsure (1)..(84): unsure at all Xaa locations
  Clone ID: PAT_MRT4530_67065C.1.pep
WCSRATRTRRGWWKAEEERGMAGTAATRAQFRRXEKVVVAAYPKVEGEGKGGKWNHLGKAELVAQGFGLRSFGRGGRFGEKESD

SEQ ID NO: 168563 - protein, 324 aa, Oryza sativa
  Clone ID: PAT_MRT4530_67066C.1.pep
MAGSGDIDGEVVFEVEHCIRIFKGGRVERYFGSDSVPASTDAATGVASKDRAISPDVSVRLYLPPVAGVSGEGEGKKLPLLIYFHGGGFCLHTAFNFVFHAYLTSLAARTRAIVVSVEYRLAPEHPLPAAYEDSWQAVLWAASHAPGAGEETWLTDHADFSRVYLAGESAGANIAHNMAMRAGAEGLPHGGRVNGVVLVHPYFLGRGKVPSEDWDPAMAENVVKMWSVVCPATTGVDDPWINPLADGAPGLEGLACGRVLVCLAEKDVIRDRGRAYCEGLKASGWAGEVEVVEVAGHGHCFHLMDFNGDEAVRQDDAIAEFVNR

SEQ ID NO: 168564 - protein, 179 aa, Oryza sativa
  unsure (1)..(179): unsure at all Xaa locations
  Clone ID: PAT_MRT4530_67067C.1.pep
LLVLVFSLLIIFTRPKLIADHHLTTRISPIYPSISTFQPSIPPFLPPSPSRRAQSPTVKPSLPFVPALFVFGDSSVDSGTNNFLGTLARADRLPYGRDFDTHQPTGRFCNGRIPVDYLGLPFVPSYLGQTXTVEDMFQGVNYASAGAGIILSSGSELGQRVSFAMQVEQFVDTFQQMIL

SEQ ID NO: 168565 - protein, 190 aa, Oryza sativa
  unsure (1)..(190): unsure at all Xaa locations
  Clone ID: PAT_MRT4530_67068C.1.pep
SRAGPQPSRLSPPPPSARVAHGARRRKLFSVVAKKSAPCSSSLRCRRRALVALLLXNRPPRPINRQRGRPSSSPQRSFPFFSLYSHVRPSLPSADLPHRSFASQTLAPPTPPRPGDSIFPLXPLPPPWDKPPPPPSLIAGTELLLPPFRPSLSLPPPSTTLSGCALLGNTISYRRSHLPTTGEPAPRSPS

SEQ ID NO: 168566 - protein, 106 aa, Oryza sativa
  unsure (1)..(106): unsure at all Xaa locations
  Clone ID: PAT_MRT4530_67069C.1.pep
AAQRKALRNRRNSREVARVVIEEVVDRTGSTFXLAVFPRRSASQIRGASTGSITRASKAHRTPIRIPIXSSCTLGCNPKTPFRSTRQQRLLAERIDSPGIHKDHIG

SEQ ID NO: 168567 - protein, 194 aa, Oryza sativa
  unsure (1)..(194): unsure at all Xaa locations
  Clone ID: PAT_MRT4530_6706C.1.pep
RSQDFKVRYSHLSAEPLAAPAPRGYRPPNRLDRLSLAECRVPXRRGNGLPLRGSTGQLPPPVAALPRRAXRLGFANRERREGAELWRDGSRRESERAPSGSLGASAPDHCRLPRGRPPCPLPADLAEGRARQLPPSPGRRQPREPAATAGQPRETFTSPPAGSGGGEGAATATFARHPPASIGSLPPAMEVASS

SEQ ID NO: 168568 - protein, 107 aa, Oryza sativa
  unsure (1)..(107): unsure at all Xaa locations
  Clone ID: PAT_MRT4530_67070C.1.pep
AQRKKALRSRRNSREVARVDVEEVVDRTGSTFXLLAVLPHRSAPQTSGASTGSITRASKARRTPIRIPIRNSCTLGCNLKTPFRSMRQQRPLAERIDPPGIHKDHIG

SEQ ID NO: 168569 - protein, 153 aa, Oryza sativa
  Clone ID: PAT_MRT4530_67071C.1.pep
MRIPATNPDGGRADGVEFVLANPTAASLAAASGGKGGGGSAPSPFLELLPFSVGSFWVGLRRQLVSGGSLGCQSNAIQSRVLLSSKAGEEASGWWNGGVLGQLSGKGPRRKPSPVVHRAGSGYVFGRRNLLGALSRESCLCGVAVGLAAFGHA

SEQ ID NO: 168570 - protein, 111 aa, Oryza sativa
  Clone ID: PAT_MRT4530_67072C.1.pep
VQRKKTLRSRRNSREVARIDVEEVVDRTGSTFSSSCVLLAVLPRRSAPQTSGASTGSIIRASKARRTPIRIPIRSSYILGCNPKTPFQSTRQQRSLAERIDPPGIHKNHIG

SEQ ID NO: 168571 - protein, 111 aa, Oryza sativa
  unsure (1)..(111): unsure at all Xaa locations
  Clone ID: PAT_MRT4530_67073C.1.pep
AQRKKALISRRNSCEVARGDVEKVVDRTGSTFSSSCVLLAVLPRRSAPQTSGASTGSITRASKARRNPIQIPIRSSCTLGXNPKTPFRSTRQRRPLAEHIDPPGIYKDHID

SEQ ID NO: 168572 - protein, 73 aa, Oryza sativa
  Clone ID: PAT_MRT4530_67074C.1.pep
PLSFPISQGTKIAYWPKFPVFLLPGFSYNTILGGSFLFMPMGFYGPGFFNPNPKPMGLGPPGKGSFWGGENFV

SEQ ID NO: 168573 - protein, 113 aa, Oryza sativa
  unsure (1)..(113): unsure at all Xaa locations
  Clone ID: PAT_MRT4530_67075C.1.pep
AQRKKALRGRRNPRDVARVDVKEVVDRTGSIFSSSFVLLAVLPRRSAPQTNGAAXSTGSITRASKARRTPIRIPIRSSCTLGCNPKTPFRSTCQQRPLAECIDPPVIHKDHIG

SEQ ID NO: 168574 - protein, 110 aa, Oryza sativa
  Clone ID: PAT_MRT4530_67076C.1.pep
RPAAFGVRPTRRGSALGGQEAPSGTTTWTAPTCLLLQSRLAGEQTGMDYAYTAPEVLVAPVPAAGTAMATAASSSLPPSSSPITCHSPTLRMEGLNKHHTPLLHAGTPRL

SEQ ID NO: 168575 - protein, 631 aa, Oryza sativa
  Clone ID: PAT_MRT4530_67077C.1.pep
MHVHAARPVLPATPPKLRRHHAAALRLTVTRAAAPGSDATGGGGGGNKAVIVGGGLAGLAAANHLASMSVPFTLLEASDRLGGRVATDEVDGYRLDRGFQIFLTAYPECRRLLDFPALRLRPFYPGALVFLGAGEPFYLLSDPFRLPLRSLSAVFSPVGTLADKLLVGLARLRAASTPDDVILSSPETTTAAHLEKLGFSPSIVERFLRPFLAGIFFDPALDTSSRLFELVFKRLALGDNALPEAGIGAIASQLADRLPAGSVRLNSRAAAIGQSSVTLDTGETVSGELGVIVAVEQPEAEKLLPQLPTIPAKPKKNSERSTVCLYFAADKAAVQDPILLLNGSGKGIVNNMFFATNVAPSYAPPGRSLVSVSLVGSFAGRSDADLAGEVVTELAGWFGAGEVASWTHLRTYRIGFAQPDQTPPTSPAGRDPRVGDGLYMCGDHWCYATFDGALNGEQRRAAQRGGDGAVRQQAAGGAARRAPAPAPQRRHVDVADVVRQRRLVRGGVAGLVQDVVVVVGIDLGVRLGEAVVEGEAVRLAYGVRAREDHQLLRGESLRREVGAVSLSKSALESGSIFWATSEDETMPSRRPTGTLNLTPPLLMYLDASWPVNATMSAQEMTPGHAASILAN

SEQ ID NO: 168576 - protein, 111 aa, Oryza sativa
  unsure (1)..(111): unsure at all Xaa locations
  Clone ID: PAT_MRT4530_67078C.1.pep
AQRKKALRSRRNSREVXRVDVEEVVDRTSSIFFSSCVLLAVFTCXSVPQTSGASTGSITWASKARRTPIRILIRSSCTLGCNPKTPFRFTRQQRPLAECIDPRGIHKDHIG

SEQ ID NO: 168577 - protein, 1517 aa, Oryza sativa
  unsure (1)..(1517): unsure at all Xaa locations
  Clone ID: PAT_MRT4530_67079C.1.pep
MAERAVAHSLSPNASGDDGEQNPRRRARTPPSPSRRNLGRGEALREVGGSATSPPAGDGGGRRDGARHRLVYGDGGTPQGALQAAGALLRHPPVVPDPETPARRWLDDVADLVMTAQQRLGAGGRSSATEASGAAAAGSNSSRWRARRAAAVTRRSSAIPSSTPPTQEDVHGGPDARLDIERRRDDRRAAHATEGASSSGAPLRSGHGGRPPVSPVGGAGCRAFVASLRNVRWPPRFRPTITEKYDGSVNPAEFLQSLHARGWRPAGGDDRVMANFFPMTLKGQARGWLMNLPPASVHSWEDLCQQFTTNFQGTYPRPGEEADLHAVQRRDDESLRSYIQRFCQVRNTIPCIPAHAVIYAFRGGVRHNRMLEKIASKEPQTTAQLFELADRVARKEEAWTWNSTGSGVAAPAAPGSAAQSGRRDRRRKKGSARSDDEGHVLAVEGASQAPRKGRPASDKKEVGAPSKEQPNQATFDAIKAPGMVLRPSQPIIGVTPGHTWPLGHIDLPVTFGGSANFRTERVDFDVADLSLPYNAVLGRPALVKFMAVVHYAYLQMKMPGPGGPITVHGDLKVALACMEQRADHLAVASKPVGGDERLSTSVPAAPRRRMVTCDEVPEDALVSFLRANADVFAWRPADMPGVPRVVIEHRLAVRPGARPVRQKVRRQGPERQAFIREEVARLLEAGFIREVIHPEWLANPVVVPKANGKLRMCIDYTDLNKACPKDPYPLPRIDRIVDSTAGCDLLCFLDAYSGYHQIRMARDDEEKTAFITPIGTYCYTTMPFGLKNAGPTFQRTTRISLGSQIGRNVEAYVDDLVVKTRNQETLLSDLAETFESLRSARIKLNPDKCVFGVPAGKLLGFLVSARGIEANPEKIRAIERMRPPSKLRDVQCVTGCMAALSRFISRLGEKALPLFKLLKRSGLFTWTEEAERAFTQLKAYLSSPPVLVAPEPDEPLLLYLAATPQVDGPGATAGRPRLSPSDPEVIGTEAECAPRGLSNEERPGDATPGKGDRPCRKVQRPVYFVSKALRDAKTRYPQAQKMLYAILMASRKLRHYFQAHRVTVVTSYPLGQILHNREGTGRVVRWAIELSEFDLRFEPRHAIKSQALADFVAEWTPAPEPVSAPEVSSGPSQLPHTAYWVMQFDGSLSLQGAGAGVTLTSPSGDILRYLVRLDFRATNNMAEYEGLLAGLRVAAGLGIRRLLVLGDSQLVVNQVCKEYRCSDPQMDAYVRQAYLADKTLPEDREGSERVRRISKRYVLVEGTLYRRAANGVLLKCIPREQGVELLADVHEGECGAHSASRTLVGKAFRQGFYWPMALNDAVDLVRRCRACQFHARQTHQPAQALQTIPLSWPFAVWGLDILGPFRRAPGGFEYLYVAVDKFTKWPEAYPVIKIDNHSALKFIRGITARFGVPNRIITDNGTQFTSELFGDYCEDMGIKLCFASPAHPRSNGQVERANAEILKGLKTKTFNILKKHGDSWIEELPAVLWANRTTPSRATXGETPFFLVYGAEAVLPS

SEQ ID NO: 168578 - protein, 517 aa, Oryza sativa
  Clone ID: PAT_MRT4530_6707C.1.pep
MNPTKCAFGVSAGQFLGFLVHERGIEVTQRSINAIQRIKPPENKTELKEMIGNINFVRRFISNLSGKLEPFMPLLRLRADQQFTWGVEQQKALDNIKDYLSSPPVLIPPQRGIPFRLYLSAGEKSIGSVLVQELEGKERVVFYLSRRLLDAETRYSPVESYACAFIFRVQAEYEAVLKRLQLLKEVEADTIEIMGDSLLVISQLVGEYECKNDTLLVYNEKCLELMKEFRLVTLKHVSRDQNLDANDLTQGASGYKPMIKDVKVEIAAISANDWRYDVHQYLSNPSQSASRKLRYKALKYTLLDDELYYRTIDGVLLKCLSADQAKVAIGEVHEGICDQGSIFVSDEFVQFADSVGIKLLNFSPYYAQANGQAEASNKSLIKLIKRKISDYPRQWHTRLAEALWSYRMACHGLIQVPPYKLVYGHEAILPWEVRIGSRRTELQNDLTANEYYNLMADEREDLVQSCLRALAKVTKDKQRVARHYNKKVVPKDFSEGELVWKLILPIDTRDSKFDKWS

SEQ ID NO: 168579 - protein, 111 aa, Oryza sativa
  unsure (1)..(111): unsure at all Xaa locations
  Clone ID: PAT_MRT4530_67080C.1.pep
AQRKKTLRSRRNSREVARVDVENVVDRIGSTFSSSYVLLAVLPRXSAPQTSDASTGSITWASKARRNPIRIPIQSSYILGCKPKTPFRSTRQQRPLAERIDPPGIHKDHIG

SEQ ID NO: 168580 - protein, 1631 aa, Oryza sativa
  unsure (1)..(1631): unsure at all Xaa locations
  Clone ID: PAT_MRT4530_67081C.1.pep
AGDGEERRDGERRLLVYGDGSTPQGALQXVMTARQRLGAGGRSSATKTSGAATTGSMSSRRRARRAAAVARHSAATPSSAPPTREDQRGGPDAHRGSERRRNGRHAPHVTEGASSSGVSPQHGRGDQPSVPPVGGVGCRAFVASLRNVRWPPRFRPTITEKYDGSVNPAEFLQVYTTGIEAAGGDDRVMANFFPMALKGQARGWLMNLSPASVHSWEDLCQQFTMNFQGTYPLPGEEADLHAVQRRDDESLRSYIQRFCQVRNTIPCIPAHAVIYAFRGGVRHNRMLEKIASKEPQTTAELFQLVDRVARKEEAWTWNPSGSGVAASAAPGSAARTGRRDRRKKKRSVHSDDEGHVLAVEGASRATRKGRPASDKKKEAGAPSXSAQPASGAPSTTPPSTTSWTAAXAKSLAERTRKWEEERRQERREGKSPAVPSGNQRSEAKQKAPAEDIDDGDDDLGFQEPGATIATVDGGACAHVSRQSLKAMKRELLATAPTHEATRRARWSEIALTFDQTDHPPCVAREGQIAMVVSPTVCNVKLGRVLIDGGAALNILSPAAFDAIKAPGMVLQPSQPIIGVTPGHTWPLGHIDFPVTFGGSANFRTERVNFDVADLSLPYNAVLGRPALVKFMVAVHYAYLQMKMPGPGGPISVHDDLKVALACMEQRADHLAAASKPEGGDERLGTSVPAAPRQRMITCDEVPVKEVALGDGPSKTTRIGGPTFQRTTRISLGSQIGRNVEAYVDDLVVKTRNQETLLSDLAETFESLRSARIKLNPDKCVFGVPAGKLLGFLVSARGIEANPEKIRAIERMRPPSKLRDVQCVTGCMAALSRFISRLGEKALPLFKLLKRSGPFTWTEEAERALTQLKAYLSSPPVLVAPEPDEPLLLYLAATPQVVSAALVVERDEDNPHSAYPHPVPTQPGREQGGEAPEPNGGPRPPTTGVGPLPACQTVPGAPNPQDGPRATVGRPHLSPSDPEVNPVPTRPRREQGGEAPEPNGGPRPPTTGAGPLPACPTTPGLPDTQDGPEATVGRPRLSSSDPEVIGTEDECTPHGLLDEECPRDAAPGEEDRPRRKVQRPVYFVSEALRDAKTRYPQAQKMLYAILMASRKLRHYFQAHRVTVVTSYPLGQILHNREGTGRVVKWAIELSEFDLHFEPRHAIKSQALADFVAEWTPALEPVSDPEASSSPSQPPHTTHWVMQFDGSLSLQGAGAGVTLTSPSGDILRYLVRLDFRATNIMAEYEGLLAGLRVAAGLGIRRLLVLGDSQLVVNQVCKEYRCSDPQMDAYVRQVRRMERHFDGIELRHVPKRDNTIADELSRLASSRAQTPPGAFEERLAQPSARPDPLGETDAPDRPPRPVGVQASGPEGSVPSSLRLIAWIAEIQAYLTDKTLPEDREGSERVQRISKRYVLVEGTLYRRAANGILLKCIPREQGVELLADIHEGECGAHFASRTLVGKAFRQGFYWPTALNDVVDLVRRCRACQFHAKQIHQPAQALQIIPLSWPFAVWGLDILGPFRRAPGGFEYLYVAIDKFTKWPEAYPVIKIDKHSALKFIKGITARFGVPNRIITDNGTQFTSELFGDYCEDMGIKLCFASPAHPRSNGQVERANAEILRGLKTKTFNILKKHGDS

SEQ ID NO: 168581 - protein, 111 aa, Oryza sativa
  unsure (1)..(111): unsure at all Xaa locations
  Clone ID: PAT_MRT4530_67082C.1.pep
AQREKALRSRRNSREVACVDVEEVVDRTGSTFSSSCVLLAVLPRRSAPQTSGTSTGSITRASKARKTPVRIPIXSSCTLGCNPKIPFQSTRQQRPLAERIDPPGIHKDHIG

SEQ ID NO: 168582 - protein, 331 aa, Oryza sativa
  Clone ID: PAT_MRT4530_67083C.1.pep
WTPAPEPVSVPEASSGPSQLPHTAHWVMQFDGSLSLQGAGAGVTLTSPNGDVLRYLVRLDFRATNNMAEYEGLLAGLKVAAGLGIRRLLVLGDSQLVVNQVCKEYRCSDPQMDAYVRQTPPGAFEERLAQPSARPDPLGETDAPDRPPMPVGVQASGPEGSAPSSLRLIAWIAEIQAYLTDKTLPEDREESERVQRISKRYVLVEGTLYRRAANGILLKCIPREQGVELLADIHEGECGAHSASRTLVGKAFRQGFYWPTALNDAVDLVRRCRACQFHAKQIHQPAQALQIIPLSWPFAVWGLDILGPFRRAPGGFEYLYVAIDKFTKGIL

SEQ ID NO: 168583 - protein, 451 aa, Oryza sativa
  Clone ID: PAT_MRT4530_67084C.1.pep
MVLRRFAWPYGGQRASFCGSFTGWRECPMGLVGAEFQVVFDLPPGVYQYRFLVDGVWRCDETKPCVRDEYGLISNEVLVDNTHPVVQPETSIRVVSMDEGTILTTMPPDQLSQNSGVQIAIFRHRVSEILLHNTIYDVVPVSSKIAVLDARLPVKQAFKIMHDEGLSLVPLWDDQQQTVTGMLTASDFVLILRKLQRNIRTLGHEELEMHSVSAWKEAKLQFYGGPDVAAIQRRPLIHVKDSDNLRDVALAIIRNEISSVPIFKPSTDSSGMPLLGLATLPGIVKFICSKLQEQPEGYSFLQNQIVSMPIGTWSPHTGKASNRQLRTSRPSTPLNSCLDLLLEDRVSSIPIVDDNGALLDVYSLSDIMALGKNDVYTRIELEQVTVEHALELQYQVNGRRHCHTCLSTSTFLEVLEQLSAPGVRRVVVIEPRSRFVQGIISLRDAFTFLIG

SEQ ID NO: 168584 - protein, 78 aa, Oryza sativa
  unsure (1)..(78): unsure at all Xaa locations
  Clone ID: PAT_MRT4530_67085C.1.pep
QTGCQAGRTAGTPPVRPTHEERSDWPGSSGSGTVDAVRDGPPEITTSTSTPXRRYPPPPSPSPLVAGRALAPCSLAPP

SEQ ID NO: 168585 - protein, 111 aa, Oryza sativa
  Clone ID: PAT_MRT4530_67086C.1.pep
VQRKKTLRSQRNYREVARVDVEEVVDRTGSTLSSSCVLLAVLPRQSAPQNSGASTGSITRASKARRTPIRIPIRSSYILRCNPKTPFWSTHQQRPLAERIDPPGLHKDHIG

SEQ ID NO: 168586 - protein, 672 aa, Oryza sativa
  unsure (1)..(672): unsure at all Xaa locations
  Clone ID: PAT_MRT4530_67087C.1.pep
HNRPRGLAPSGGVGPEGDVFALLFVSPRGSDRSRLGPEGRGAPTPYRSDCGLGGDRRSDARLAPSRQDESLQALVPSRSRRVSSWRWHVGSDSHVPTSRLLPAEVEXPSAEPAKGGLRGLPVRSPTLRHLARQLFLFSPMAEQAKAHNLSPSVSGDDGEPNPRRRARTPPPPPRQSPRREEALERVEGSATSTSTGDGEVRRDGERRLLVYGDGSTPQGALQAAGALLRHPPIVPDPESPAQRWLDDVANLVMTARQRLGAGGRSSATKTSGAATTGSVSSRRRARRAAAVARHSAATPSSAPPTQEDLRGGPDARISIERRRNGRRAAHATEGASSSGVSHQHGRGDQPSVPPVGGVGCRAFVASLRNVRWPPRFRPTIAEKYDGSVNPAEFLQVYTTGIEAAGGDDRAHIRAQVKKRTYMQSSEGMMSHFAHTFSGSVXVRNTIPCIPAHALADRVARKEEAWTWNPSGSGGGRRGRPIPTTRVMSSPSKAFRWPPERGGLRATKRRKPTLPDLGYLEERRWRAALXAXRYQQSLRRYHQRHVRARSLCVDDLVLRRVQTRAGLSKLSPMWEGPYRVIGVPRPGFVWLATGDGTELPNPWNIEHLRRFYPYLDMWISPGTSLDPRRLRLGPGHEPLFKPRHRRTVAQTILVSYTEQMKLTQKFPLYLIAD

SEQ ID NO: 168587 - protein, 48 aa, Oryza sativa
  Clone ID: PAT_MRT4530_67088C.1.pep
NKSQPVFGRNCLVHVKNHKGIIPSYVTLTCGTGPHIGFPYTNALEHFF

SEQ ID NO: 168588 - protein, 111 aa, Oryza sativa
  Clone ID: PAT_MRT4530_67089C.1.pep
AQRKNALRSRRNSREVAHVDVEEVVDRTGSTFSSSCVPLAVFPRRSAPQSSGASTGSMTRASKAHRTPIRIPIRSSCTLGCNPKTHFRSTCQQRPLAERIDPPSIHKDHIG

SEQ ID NO: 168589 - protein, 120 aa, Oryza sativa
  Clone ID: PAT_MRT4530_6708C.1.pep
MGATTCIIVVAIVVVFQAHVHAPRAGRPAPACLSSALTKRKESRPRCPLWESRKRATKAVVHRIRMHHTLSPTPTPRLADHGAAPARSGDWTRPPPRPGRTPHRRAGANDAMRQLRGIVF

SEQ ID NO: 168590 - protein, 740 aa, Oryza sativa
  Clone ID: PAT_MRT4530_67090C.1.pep
MAAVHYAYLQMKMPGPGGPIFVHGDLKVALACMEQRADHLTAASKPEGGDERLGTSASAAPRQRIVTCDEVPEDALVSFLRANADVFAWRPADMPGVPREVIEHRLAVRSGARPVRQKVRRQAPERQAFIREEVARLLEAGFIREVIHPEWLANPVVVPKANGKLRMCIDYTDLNKACPKDPYPLPRIDQIVDSTAGCDLLCFLDAYSGYHQIRMAREDEEKTAFITPIGTYCYTTMPFGLKNAGPTFQRTTRISLGSQIGRNVEAHVDDLVVKTRNQETLLSDLAETFESLRSARIKLNPDKCVFGVPAGKLLGILVFARGIKANPEKIRAIERMRPPSKLRDVQCVTGCMAALSRFISRLGEKALPLFKLLKRSGPFTWTEEAERALTQLKAYLSSPHSASRTLVGKAFRQGFYWPTALNDAVDLVWRCRACQFHAKQIHQPAQALQIIPLSWPFAVWGLDILGPFRRAPGGFEYLYVTIDKFTKWPEAYPVVKIDKHSALKFIKGITARFGVPNRIITDNGTQFTSELFGDYCEDMGIKLCFASPAHPRSNGQVERANAEILRGLKTKTFNILKKHGDSWIEELPAVLWANRTTPSRATGETPFFLVYGAEAVLPSELTLRSPRATMYCEADQDQLRRDDLDYLEERRRRAALRAARYQQSLWRYHQRHVRARSLCVDDLVLRRVQTRAGLSKLSPMWEGPYRVIGVPRPGSVRLATGDGTELPNPWNIEHLRRFYP

SEQ ID NO: 168591 - protein, 475 aa, Oryza sativa
  Clone ID: PAT_MRT4530_67091C.1.pep
NNMIAAKALLDNMPVPVDPAVNTTIAQVKAMVEATAVQHADALPTTSTAGGSSGKRQSRQPAFELKRVKASQAGSSHPSLRTSDLRDKIEAGRRLNADLRNVMNEHCRLRDAERLRIHEDDFDASRRHTDVQPDGRIVVHRPYQYYHDHSPDHIPHRDDGAEGIPAFTDNLCRVRWLANFKPIGIDKYDGKTDPNAWLAVYSIAIQATGGDQVVIANYLPVMLTTVARAWLTGLPRYTINSWAELKGQFIANFQGTFPHPGTQWDLYRIVQGHNECFSDYIRCFTERCNTIPHVTDTEVMAAFQQGCKNEDFIKWWACKTSLGGCAALTVRQMFDHANKDANSELAVYAQIKRRPSYQPRRESNSSRSRPPKCKSDDKVNTIGRSNAQRKFRQPKKDDFDRMMDGPCLYHPELKHSAKQCWLLKQYAQQLADKSGSGGRTHDPSQDGDKTKFEEEDYPVVDYESALQTAKSTTVR

SEQ ID NO: 168592 - protein, 419 aa, Oryza sativa
  Clone ID: PAT_MRT4530_67092C.1.pep
MANFFPMALKGQARGWIMNLPPASFHSWEDLCQQFTMNFQGTYPRPGEEADLHAVQRRDDESLRSYIQRFCQVRNTIPCIPAHAVIYAFRGGVRHNRMLEKIASKEPQTTAELFQLADRVARKEEAWTWNLSGSGVAASAAPGSAARSGRRDRRRKKRSAHSDDEGHVLAVEGVSLATRKGRPERRWRAALRAARYQQSLRRYHQRHVRARSLCVDDLVLRRVQTRAGLSKLSPMWEGAPDPQDGPEATAGRPRLSSSDPEVVGTEDECTPRGRLDKERPRDVAPSEEDRPHRKVQRPVYFVSEALRDAKTRYPQAQKMLYAILMASRKLRHYFQAHRVTVVTSYPLGQILYNREGTGRMVKWAIELSEFDLRFEPRHAIKSQALADFVAEWTPAPELVSAPEASSGPSQLPHTALWVM

SEQ ID NO: 168593 - protein, 104 aa, Oryza sativa
  unsure (1)..(104): unsure at all Xaa locations
  Clone ID: PAT_MRT4530_67093C.1.pep
HXXPPXXSEXKELXXXXPHQMLPYDNSNITKRYSXPNCXFTFXXLGLXILFHLXLPLSPVXPGLXXKFXRXKXXCAAKGIXXKLPSXXXXLTXWXTLQFWXXXL

SEQ ID NO: 168594 - protein, 1576 aa, Oryza sativa
  unsure (1)..(1576): unsure at all Xaa locations
  Clone ID: PAT_MRT4530_67094C.1.pep
MAEQAKAHNLSPRVSGDDGQPNPRRRARTPPPPPRQSPRREEALERVEGSATSTSTGDGEGRRDGERRLLVYGDGSTPQGALQAAGALLRHPPIVPDPESPAQRWLDDVANLVMTARQRLGAGGRSSATKTSGAATTGSVSSRQRARRAAAVARHSAATPSSAPPTQEDLRGGPDARISIERRRNGRRAAHATEGAFSSGVSHQHGRGDQPSVPPVGGVGCRAFVASLRNVRWPPRFRPTIAEKYDGSVNPAEFLQVYTTGIEAAGGDDRVMANFFPMALKGQARGWLMNLPPASVHSWKDLCQQFTMNFQGTYPRPGEEADLHAVQRRDDESLRSYIQRFCQVRNTIPCIPAHAVIYAFRGGVRHNRMLEKIASKEPQTTAELFQLADRVARKEEAWTWNPSGSGVAASAAPGSAARTGRRDRRRKKRSAHSDDEGHVLAVEGASRATRKGRPASDKKKEAGAPSRERPTGKWCIVHNTSLHDLADCRAVKSLAERTRKWEEERRQERREGKSPAVPSGNRRSEAKQKAPTEDIDDGDDDLGHIDLPVTFGGSANFRTERVNFDVADLSLPYNAVLGRPALVKFMAAVHYAYLQMKMPGPGGPISVHGDLKEDALVSFLRANADVFAWRPADMPGVPRELIEHRLAVRSGARPVRQKVRRQAPERQAFIREEVARLLEAGFIREVIHPEWLANPVVVPKANGKLRMCIDYTDLNKTRNQETLLSDLAETFESLRSARIKLNPDKCVFGVPAGKLLGFLVSARGIEANPEKIRAIEWMRPPSKLRDVQCVTGCMAALSRFISRLGEKALPLFKLLKRSGPFTWTEEAERALTQLKAYLSSPPVLVAPEPNEPLLLYLAATPQVVSAALVVERDEDNPHSAHPHPVPAWPGREQGGEAPEPNGGPRPPTTGAGPLPACQTVPGDPDPQDGPRATAGRPHLSPSDPEANPVPTRPGREQGEEAPEPNGAPDPQDGPEATVGRPPLSSSDPEVVGTEDECTPRGHLDKERPRDVAPSEEDRPHRKVQRPVYFVSEALRDAKTRYPQAQKMLYAILMASRKLRHYFQAHRVTVVTSYPLGQILHNREGTGRVVKWAIELSEFDLHFEPRHAIKSQALADFVAEWTPAPEPVSVPEASSGPSQLPHTAHWVMQFDGSLSLQGAGAGVTLTSPNGDVLRYLVRLDFRATNNMAEYEGLLAGLRVAAGLGIRRLLVLGDSQLVVNQRAQTPPGAFEERLAQPSARPDPLGETDAPDRPPMPVGVQASGPEGSAPSSLRLIAWIAEIQAYLTDKTLPEDREESERVQRISKRYVLVEGTLYRRAANGILLKCIPREQGVELLADIHEGECGAHSASRTLSVSIPRQANPSAGPGPADHTTFMAICCLGXLDILGPFRRAPGGFEYLYVAIDKFTKWPEAYPVVKIDKHSALKFIKGITARYGVPNRIITDNGTQFTSELFGDYCEDMGIKLYFASPAHPRSNGQVERANAEILRDLKTKTFNILKKHGDSWIEELPAVLWANRTTPSRATGETPFFLVYGAEAVLPSELTLRSPRATMYCEADQDQLRIDDLDYLEERRRRAAL

SEQ ID NO: 168595 - protein, 332 aa, Oryza sativa
  unsure (1)..(332): unsure at all Xaa locations
  Clone ID: PAT_MRT4530_67095C.1.pep
HKPFSSTARRGGRQRRDGGQRPGGEGEGGDGGATLFDVFPALDIVGRRVMSSGGFTFSARLRWXHHWRRTPPSSPRRRTSSPASPRQPPFPLAGRPFLFXPSPPGWPNPAALVVELASGAGKPPNRAGHHPGLFPSSIPELGSHRLPDAAGEHASGVHPFHRALKSSEIAQPRLXPSPRAAAATHPGTAERPMVTSLPRARSTLPASASDKRGSARTATASASALGFSSMSTRATSSSHPPRHPFLRASNTWWAHGATPNREPQTYSEDEPRPRRTSTDWNLNDRRFATIATTVSRFPAXRAAEYAPSRRRRSRATATARDTKPPTATPLES

SEQ ID NO: 168596 - protein, 46 aa, Oryza sativa
  Clone ID: PAT_MRT4530_67096C.1.pep
MTTSPRHGGRDNMSDGGAAMKPAVGRGDTASTTGGRGKFSPRLRLP

SEQ ID NO: 168597 - protein, 523 aa, Oryza sativa
  Clone ID: PAT_MRT4530_67097C.1.pep
MVMSSVDSHVPTSRLLPAEVEVETKSLESHPESPAEPAKGGQRGLPVRSPTLRHLARQLFLFSPMAEQAKAYDLSPSMSGDDGEPNPRRRARTPPPPPRQSPRREEVLERVEGSATSTSTGDGERRLLVYGDGSTPQGALQAAGALLRHPPVVPDPESPAQRWLDDVANLVMTTRQRLGAGGRSSATKTSGAATTGSVSSRRRARRAAAVARHSAATPSSAPPTQEDLRGGPDARISIERRRNGRRAAHATEGASSSGVSHQHGRGDQPSVPPVGGVGCRAFVASLRNVRWPPRFRPTIAEKYDGSVNPAEFLQVYTTGIEAAGGDDRVMANFFPMALKGQARGWLMNLPPASVHSWEDLCQQFTMNFQGTYPRPGEEADLHAVQRRDDESLRSYIQRFCQVRNTIPCILAHAVIYAFRGGVRHNRILEKIASKEPQTTAELFQLADRVARKEEAWTWNPSGSGVAASAAPGSAARSGRRDRRRKKRSAHSDDEGHVLAVEGASLATRKGRPASDKKKEADAP

SEQ ID NO: 168598 - protein, 590 aa, Oryza sativa
  Clone ID: PAT_MRT4530_67098C.1.pep
MCTNKLAAVGRDRADAAAQRVSEVQRAANAYTCMRPQRNKQRTKEMTVSRRVGDSGGHTQQRKRRGGRQRRDGGQRPGGEGEGGDGGATLFDVFPALDIVGRRVMSSGGFTFSARLRWGGGGGDSLAAAPPCRPAPPPPSLLAPPPPSSPRRRTSSPASPRQPPFPLAGRLPREEKPSPPGWPNPAALVVELASGAGKPPNRAGHHPGLFPSSIPELGSHRLPDAAGEHASAHELRRQAIVAAPASPVHCAPHGARERRCRDETDANIPRIASLCAAPRNTAPKLLRGAYGSDVRALAVPPHWAALAVDPQRHGRRPSNPLRPRTLGRPSDRCDKRGSARTATASASALGFSSMSTRATSAAYKTQGSQPFAPFLSCSRWPSCPCRTPSSHPPRHPFLRASNTWWAHGATPNREPQTYSEDEPRPRRTSTDWNLNDRRFATIATTVSRFPAAARPWNPIAYPNPRAAEYAPSRRRRSRATATARDTKPPTATPLESSPIATVTLIEPRRGQFRLVPATIGFGIAVRQSLRRRAPQFGTEGRYRPPQPTAVASTHHCCRYAASHMWLGSPVPVALPSLATPASGPASRRTG

SEQ ID NO: 168599 - protein, 329 aa, Oryza sativa
  unsure (1)..(329): unsure at all Xaa locations
  Clone ID: PAT_MRT4530_67099C.1.pep
CIPREQGVELLADIHEGECGAHSASRTLVGKAFRQGXQIIPLSWPFAVWGLDILGPFRRAPGGFEYLYVAIDKFTKWPEAYPVVKIDKHSALKFIKGITARFGVPNRIITDNGTQFTSELFGDYCEDMGIKLCFASPAHPRSNGQVERANAEILRGLKTKTFNILKKHGDSWIEELPAVLWANRTTPSRATGETPFFLVYGAEAVLPSELTLRSPRATMYCEADQDQLRRDDLDYLEERRWRAALRAARYQQSLRRYHQRHVRARSLCVDDLVLRRVQTRAGLSKLSPMWEGPYRVIGVPRPGSVRLATGDGTELPNPWNIXHLRRFYP

SEQ ID NO: 168600 - protein, 460 aa, Oryza sativa
  unsure (1)..(460): unsure at all Xaa locations
  Clone ID: PAT_MRT4530_6709C.1.pep
MAPGQPVNPRLLMREQPQHGGQVANRLTQDHVAATFLPPQPIVDPIQQQPIQQTPQFSRLCNQSSNSLLPRKPNISQGDWLNLSLRLSMKVTLHEHRSAEVRKNSKKVNHVYPYMYGSDDDEDFSKIAAAEWVRSKKVIPCQWVKSSGKEKYDFDITKPDKIFDLLLREKQIQLLAGHTIPSAEELGRKRFLDSRFRWPLREARLAGQTADRARAMGFQVNSAKIINKYQKKYDKQQEKDHEKYDDGFDPHWCCEFFRFCWNEADEAKRLAKGKSVVTAPVNMVFTLPAEFGIDQADVDEVEEELAKLVLSPEQAVFEKPEGTENRHLKPLYINGYVNGKPMSKLMVDGGAAVNLMPYATFRKLGKNAEDLVKTNLLNDFGGNPSETKGVLNVELTVGSKTIPTTFFVINGKGSYSLXLEGIGFTPIVAFLQLCMNVYNEKCQELMKEFRLVTLKHVTRE

SEQ ID NO: 168601 - protein, 161 aa, Oryza sativa
  Clone ID: PAT_MRT4530_670C.1.pep
MVETLAPQENVIITAATDIVVAPMPDPPSLRSSTPPDPSCHCGPSAGSTAAEVPHAGYATPPSSSHGEEEAARRRRRGRGEEADGVDPVRAVTTKRQRRGGRRCRPKRAATMKRQRRGGARSNSLEVAQAGADPPMSTGVKKGDRGSLSAARCLMGVGLAS

SEQ ID NO: 168602 - protein, 81 aa, Oryza sativa
  Clone ID: PAT_MRT4530_67100C.1.pep
MIRRVCNPDPRDEEELVILTAAVAPLIGGEGSLSSLPSWSPLVGGKGNGAHSGSAELAVNQRRGISSRRRRGRTTEVSVAA

SEQ ID NO: 168603 - protein, 207 aa, Oryza sativa
  unsure (1)..(207): unsure at all Xaa locations
  Clone ID: PAT_MRT4530_67101C.1.pep
RRISALPQFWSPPVLAWPGREQGGEAPEPNGGPRPPTTGAGSLPACQTVPGAPDPQDGPAATAGRPHLSSSXDSPEATVGRPPLSSSDPEVVGTEDKCAPRGHLDEERPWDAAPGEEDRPHRKVQRPVYFVSEALRDAKTRYPQAQKMLYAILMASRKLRHYFQAHRVTVVTSYPLGQILHNREGTGRVVKWAIELSEFDLHFEPRH

SEQ ID NO: 168604 - protein, 67 aa, Oryza sativa
  Clone ID: PAT_MRT4530_67102C.1.pep
ISSYVYVIKCFITSFYVFYIIYLFFFYLRLFFYFFKYLIYFYIYYLFIFCNKFLFLYFIILFVHFFY

SEQ ID NO: 168605 - protein, 67 aa, Oryza sativa
  Clone ID: PAT_MRT4530_67103C.1.pep
MVVEEHPRQWRYGKRKSSMSIWSLGSNLNPDESACDLTIASSFPIVRCALPLLPTGDCPSPYRSSHR

SEQ ID NO: 168606 - protein, 117 aa, Oryza sativa
  Clone ID: PAT_MRT4530_67104C.1.pep
APSMASIFFPSVVASIFHAGCNRGSKQSWILGLHTCEQAKQSWKRSFHDRQDEDCCWCKRISEEVQMSSITVRLLPLLRRVVEGNEAWSETVHVYPPLWYDLRPDDIPLNKMIEGKN

SEQ ID NO: 168607 - protein, 54 aa, Oryza sativa
  Clone ID: PAT_MRT4530_67105C.1.pep
AWKQHSFGPAKTCSSHHEKRGFGNLYLLLPKNLKLGTVSPNQLVQIMGGTKNTP

SEQ ID NO: 168608 - protein, 103 aa, Oryza sativa
  Clone ID: PAT_MRT4530_67106C.1.pep
MGSAGVEDAAAVAAFLERCAPSGDAAYGELKAVLGRLHEPTTRRAARAFLTALRPFCSSGDSLARYGFRIHDLSLLHCAHDHQFSASMEQVFEKIQYTSHSSE

SEQ ID NO: 168609 - protein, 131 aa, Oryza sativa
  Clone ID: PAT_MRT4530_67107C.1.pep
MTIIDGSRLIPPAPRIRAGNQIITWELDAYMDMGHGDMRVRSRRRTGTARRCVDDLAKRGDMRAISWRQRYLLVVAALRVLHGEGRGTALGWGTGERKCAPWVCVAAAPKRTAKTVIWRRMIGRQHDCGGA

SEQ ID NO: 168610 - protein, 50 aa, Oryza sativa
  Clone ID: PAT_MRT4530_67108C.1.pep
GCQADAASPPTRSGGGEGAAPARHRGGGGGAASPPVGEGEGNSVAGAVVL

SEQ ID NO: 168611 - protein, 401 aa, Oryza sativa
  Clone ID: PAT_MRT4530_67109C.1.pep
MAHREDWDRQGNRGWGRRDDSHWEDEGNFFQERGQEGLEVLGPEEEALLEGQVAAEHIMPGGRICPVMAKGFKEGFGRKEGSMAKQGWGFRSIGGWKGRKRENVVGEVVSEGDAKDQEFDRPLFEDRNNKGEGVKGAAKKGKDSFVVLFPSKGELQRAINFGGAEMVDMKTTRKNDFGRIFIAILDPKIIPRNIDVVIGDHYFELRFEVEKKGFDDNGDEVEFHFEKEDGDGDDDGQDGGSKENGDKMTEQEARVEEEEEELKKMADQIIDGQAMGDGLQEKVVLMANVEEVIVTPEGELDRMGRLEENFLGDPFTDEEECSISGVQSFEKEYPNLYNLVRNKNEVVAKVIFMGTHWARTWSLLLKGTDEEIVKNYCKVLEKRVVEFFSVYGWNLRRRLEA

SEQ ID NO: 168612 - protein, 290 aa, Oryza sativa
  Clone ID: PAT_MRT4530_6710C.1.pep
MDISRANEGYTSCGSVVEMSCHRAGVLLLGAQPWLPFSGIPAVARVGSVLLFMARMGWELCHVLRPYAVVWVSSIVPVIKKNSKVRVCIDFRDLHKATPKDEYPMPVADQLVDAASGHKILSFIDEIEDHIADLRKVFERTRKYGLKMNPTKCAFGVSAGQFLRFLVHERGIEVTQRSVNAIKKIQPPENKTELQEMIGKINFVRRFISNLSGRLRHYLLSNECTVICKADVVKYMLSAPILKGRVGKWIFSLTEFDLRYESLKAVKGQAIADFIVEHRDDSIGSVEIVP

SEQ ID NO: 168613 - protein, 100 aa, Oryza sativa
  unsure (1)..(100): unsure at all Xaa locations
  Clone ID: PAT_MRT4530_67110C.1.pep
GVSLLLPSDVIIADKFAPDANXXXVPASAIPDXWMGLXDLVHXSVXSFSSTLETXXTVXWNGPXGCLXNXXVWQSGTXXYCKQNWXXLSRQGVFTTHERR

SEQ ID NO: 168614 - protein, 854 aa, Oryza sativa
  Clone ID: PAT_MRT4530_67111C.1.pep
MKVDGTIQNISDIVPVPSELATRARKIMDMFNEIKDYASKFSLSENDGVRRSIPDMHQVRQTSSMVFEQSIIGRGSIKDTVIEKMLSQNKSSTPESHVSVLGIVGMPGVGKTTLAQLVYNNTEVCKSFDVRVWVCVSENFDVKEIQDKRFLLVLDDVWNERRDYWEMFRLPMLTTKLCKIIVTTRTGHCSNKLPFWMKNMQYNPSLQEIGKDIVSRCKGLPLAIKTIGSMLRYEPDETKWKDILESDLWDLEQSQNEVLPALELSYKQMPMYLKRCFIALSLFPKDYILHEENVVLLWEPLELLQHGDGANKAKLAVSYLHELAQRSMIEISTHSAYKMHDLIHDLACFLAGDEFVRTEDSSDSLKAIIVIGHGLDEIVIPDDIFLKFKRLRVFSLNGAAPTNLLPDSAGNLKLLRFLRLRCSIDCQIMQLPKSVFQLFNLHTLELMKPAFDLYTPIVSGIGRLIKLETLPPLEILSGYDSNLSELRNIRKVRSLSLKGLDYVCSVEDAMEADIPSKIHLQSLNLDFTSSHHQQLQQHKPGAVSHKELLESLQPCHTLRDLSIYGYRGLTFPCWVGNTSFSKLTKVVLSKCEWECLPALGELPSLESLEISRMYNLRFIGREFCCLNQSVKVFRSLVNLSFSWMYELSEWSGVKDGDFACLETLLLCQDNKLRFLPLVPFSSLVTCRLSNCGNLVTVPVSYALCDLYINDCASLIELPSLPSLIKLKISNCSSLGATIPMFPALQYLSIKDCASLLELPTLPSLMELNISNCSGLGATIPMFPALQYLSIKDCASLLELPTLPSLMELNISDCSGLGATIPMFPSLQYLSIKNCASLLELPTLLSLMELNISNC

SEQ ID NO: 168615 - protein, 170 aa, Oryza sativa
  unsure (1)..(170): unsure at all Xaa locations
  Clone ID: PAT_MRT4530_67112C.1.pep
MYLGKAMLTHQDKNALMVPSTLPDHYILFLVYPWDHLVVVLDPAHYAEKTFTEFLVLLNLAHKYYKDQSGRVKDASKSKLLVKTRWPNFQHXCCKQPPGTNLCGYYMCEMLQINGRXMSIPWVANLFDXKTILNLCADICRYIRHDVCNHLGEFYDPESDLAKNDAFKRL

SEQ ID NO: 168616 - protein, 105 aa, Oryza sativa
  Clone ID: PAT_MRT4530_67113C.1.pep
VQRKKTLRSRRNSREVARVDRTGSTFSSSCVLLAVLSHRSAPQTSGASTGSITRASKARRTPIRILIRSSYILGCNPKTPFRSTRQQRPLAERIDPPDIHKDHIG

SEQ ID NO: 168617 - protein, 510 aa, Oryza sativa
  Clone ID: PAT_MRT4530_67114C.1.pep
MARRRGMAGGDGGEPASNTGRTVMLRLCRQPSSACASSSAIERMRAREEGTETEAKAEETGPAGVATTVLAVANARDAIKEETREMLGWSRHRRLKLGQASEDKEEVSAEVELADKALREAPHVLHDRSKIANAIAVADVFSSISYICAATRGRIHPVPGQSTVPRHRPRHDPTIGPGQHRPDTSRAMPCLSRAKWPCHGVEMRGQRRRCAAARAAAAVAAWSYKGGGCSVGIELRGRRQRRGDARAAVATAAWSYEGGDCGVGIELRVRWLRLWCGAARAAALGAACAVFGLAAACGRLGDGRAWSSGRWGGGGGSTNELADNYGIGVRELVVARMGAPLPPPDLECGCCPRALPSPDCPARAPPPPLSSSTATSPQRHTGGRDVIVDDDDAGAVPAVQEVGEGEERQDMLPEHLVVPDRAFAVTDQPACVLESHQDDVLDLTVTGNFVWNFVLLHTPLKCLVSVRVSVTHAFEESDPSSSSRTVFTIAATSLVVGGGEEASMHLMVTC

SEQ ID NO: 168618 - protein, 111 aa, Oryza sativa
  Clone ID: PAT_MRT4530_67115C.1.pep
VQRKKTLRSRRNSREVPRVNVEEVIDRTGSTFSSSCVLLTVLPRRSAPQTSGASTRSITRASKARRTPIRIPIQSSYILGCNPKTPFRSTRQQRLLAERIDPPSIHKDHIG

SEQ ID NO: 168619 - protein, 151 aa, Oryza sativa
  Clone ID: PAT_MRT4530_67116C.1.pep
MGEDARMVLALALTAGVIVALLSLLVAVLVRRWWRRRESVASSRGFVLFGICFNDKESQQLRMARPSLERNRRWPSRERQPGEAEDDDQEPDQCELERWKKMFGGPARSLSTIDEGTEKGTTPITTPAFCSPAASPDRRDARSLQTMSIAV

SEQ ID NO: 168620 - protein, 86 aa, Oryza sativa
  unsure (1)..(86): unsure at all Xaa locations
  Clone ID: PAT_MRT4530_67117C.1.pep
TPTATXSPPPXXPXPPPTATSPPRAPSALRPTATGGSRSTPRRRPRRCPLRRASAPAAARERDGYLGGGGXWGXGGGGGSGWHVVL

SEQ ID NO: 168621 - protein, 108 aa, Oryza sativa
  unsure (1)..(108): unsure at all Xaa locations
  Clone ID: PAT_MRT4530_67118C.1.pep
RKKTLRSRRNSREVAXLDVEEVVDRTGSTFSSSCILLAVIPRRSAPQTSGASTGSITQASKACRTPIRIPIRSSYILGCNXTPFRSMRQQWPLAERIDPPGIHKDHIG

SEQ ID NO: 168622 - protein, 111 aa, Oryza sativa
  Clone ID: PAT_MRT4530_67119C.1.pep
AQRKKALRRRRNPRDVARVDVEEVVDRTSLTFSSSCVLLAILPRRSAPQSSGASIGTMTRASKARRTPIRISIRSSCTLGCNPKTPFRSTCQQRSLAERIDPPGIHKDHIG

SEQ ID NO: 168623 - protein, 1666 aa, Oryza sativa
  Clone ID: PAT_MRT4530_6711C.1.pep
MSSSAARPYQGASASAHAAADASPTWGALGAAACTSDCLPDSTPRISSAACSTGGGEGKAWTSTSLSDLRRPTSAAAAATDSAGDGSPGIGGGRRRCRVGFFAAHGYYRQGGGSYDRSYPDESLGYTPSRSDRYWLDDDGGGGGYKGFSRYGGGGGGGSRRDGRDMRGSYRRSPFRGYGSDFSRNHQEHPPPPLRRSPLRSVAVPMSYDPPGDRADRGDRDHHHRVTPWRPLRRRESRSDAADAAGAGPVPVGQAAAAAASEKDVSARSSAVAAPQVSEEEAPRKKPRLGWGQGLAKYEKQKVQGPAESAEAVAEGSPTATEQKGITHTPAPAPCVSPVAAPSPTPCASPVAAPSPAPCVSPVAAPSPAPPCKSPVPEDKSCELTANTVTESNKNIPGPDVQACNNEVPTKLDQLEGDPIDSLAKVLSELVQHEDSCSGDSKRLSNVSKLLLLKESISKELEKTELEIDSLEGELKSVNVEARNRTLKDPPTAVTYAQNPSPSPVKEQGELTPSPKISMEQDADVKGSELMEIETAQAHNAKAVSSEESVACPGVALGQVPAAADVIPSDPCGKTGSGIDVDIEQREENPCQETFNAMKADGSSDLATRPCSYREVKYNLMDQIIAANRSEAKKNSQLLFKPVPADRSNLDLLASSYLSSQMKNDVIIKKKHAILKNRQRFKEQILTFKFRVLRHLWKEDVRLLSVRKQRSKSHKRTDQSNRSSQSGSQRQRSSNRSRLAVPAGNLSTFPITEMSGVARKLFSEFQLKRCRNYLKMPALIVDEKEKAGAKFVSKNGLVEDPVSVEKERALINPWIQEEKEIFMEKLATFGKDFSKISSFLQHKTTADCIEFYYKHHKSDSFREVKKLLDLRQQQQPANNYLGAVSGKKWNPEANAASLDMLGVATEVAAQGLEYVNEVKKNSAKSILRTVCGVDNSTKGSEKDCVGDVSLHERESVAADVLAGICGTLSPEGMGSCITSSADPGQKIGIISRMEHLLTPEADKNFDDDGTLSDQECEVDIVDWNDDEKSSFIEAMNRYGKDFARISSYVKSKSFEQCKVFFSKARKSLGLDLIHQGAADAGFPTGDANGGRSGTDGACIAEMDSAICSAQSCPKVEIDACPVSDGEIQGHNPLSDIASRQPEADKSNMPDVVDINVEEGESKAEKDCSILVDHKQLREDINQTSCARIDINCPESTDKLQDIEDVTPVNMHGDDLMATSVEQVAAAHVESRSSLHSEGIGIDVSRIEGCSHESTIGKGGKSTPSVCLPAENGVSKENIIHFSNMDGASSISPAFTSNYQQSKLADPIQSKPKPLTPKDLMPVQFSSSLPDPTSICFEGIAAITTPNFEDHGNRASIASGAKDVNMFPTFKDQSSNRHDALFSNVDGYMQQRRNNHFGTEVCGLSESTGISQSDQFTVSKFQNGRPSSLGLSNGNLGVLSTGRREEAREGLFRPCSVKTSAGNEEQQKRPGDVKLFGQILSHQSSLQSSGSSVHGSKSKPPSPKVDKPASSRLLSNPRERLVYSSRPPIIANLGLEERAMRSFDHMDGRTIQPEPMVMVAKCQRPSAGVPVYSTKNGALSVFAEFQQPSMPPHTSDHKLLENFADLHKRNGIELLSGFQQPGRLGGAGVLVSGVSDPVAALKAQYGSGSKMLSSSNDVDTWKDIGSR

SEQ ID NO: 168624 - protein, 185 aa, Oryza sativa
  Clone ID: PAT_MRT4530_67120C.1.pep
MAVSTSASSTPPLLSLHRAAGNPNPAALSFPPPLRAPPLRSRAAAAAASAAAPPAETIPDMPEETEGTGIPMPSSIGDDGEQLAPKQKIRIKLRSYWVPLIKDSCKKIIEAAKTTNAKTMGPVPLPTKRRVYCVLNSPHVHKDSRFHFEIRTHQRLIDIMYPTAQTIDSLMQLQLPAGVDVEGKL

SEQ ID NO: 168625 - protein, 111 aa, Oryza sativa
  Clone ID: PAT_MRT4530_67121C.1.pep
ALRKKTLRSRRNSREVARVDVEEVVDCTGSTFSSPCVLLAVLPRRSALQTSGASTGSITRASKARRTPIRIPIRSSCTLGCNPKTPFLSTCQQRPLAERIYPLGIHKDHIG

SEQ ID NO: 168626 - protein, 134 aa, Oryza sativa
  unsure (1)..(134): unsure at all Xaa locations
  Clone ID: PAT_MRT4530_67122C.1.pep
STHGVRSDGMSAMTHADMMNCIGNGMMIENGTRKRPHREDGCAEKTVERRQRRMIKNRESAARSRARKQAYTVELEAELNYLKQENARLKEAEKTVLLTKKQMLVEKMMEQSKEKMNANRGGSXQLRRSGSCMW

SEQ ID NO: 168627 - protein, 111 aa, Oryza sativa
  unsure (1)..(111): unsure at all Xaa locations
  Clone ID: PAT_MRT4530_67123C.1.pep
AQRKKTLRSRKNSREVERVDVEEVVDRTGSTFSSSCVLLAVLPRXLAPQTSGASTGSITRATKARRTPIRIPIRSSCTLSCNPKTPFRSTRQQRPLAERFDLPGIHKDHIG

SEQ ID NO: 168628 - protein, 610 aa, Oryza sativa
  unsure (1)..(610): unsure at all Xaa locations
  Clone ID: PAT_MRT4530_67124C.1.pep
RIGLPRSPTWPDPLGGVGPEGDVAAPLFVSPRGRTAPVSPPRGEAPRPRRSDARLAPSRQDESLQALVPSRSRRVSSWRWHVGPDSHVPTSRLLPAEVEGALRXFSKLSHSFVCAKLFLFSPMAEQAKAHNLSPSVSGDDGEPNPRRRARTPPPPPRQSPRREEALERVEGSATSTSTGDEEGRRDGERRLLVYGDGSTPQGALQAAGALLRHPPIVPDPESPAQRWLDDVANLVMTARQHLGAGGRSSATKTSGAATTGSVSSRRRARRATAIARHSAATPSSAPPTQEDLRGGPDARISIERRRNGRRAAHATEGASSSGVSHQHGRGDQPSVPPVGGVGCRAFVASLRNVRWPPRFRPTIAEKYDGSVNPAEFLQVYTTGIEAAGGDDRVMANFFPMALKGQARVQRRDDESLRSYIQRFCQVRNTIPCIPAHAVIYAFRGGVRHNRVLEKIASKEPQTTAELFQLADRVARKEEAWTWNPSGSGVAASAAPGSAARSGRRDRRRKKRSAHSDDEERRWCAALRAARYQQSLRRYHQRHVRARSLCVDDLVLRRVQTRAGLSKLSPMWEGPYRVIGVPRPGSVRLATGDGTELPNPWNIEHLRRFYP

SEQ ID NO: 168629 - protein, 333 aa, Oryza sativa
  Clone ID: PAT_MRT4530_67125C.1.pep
NHSDALTSENNSKFRFDFTGTGESEGTFQYGNYYKEVDDLRDVILHFKKHKRDTRGIAGHSKGGNVVILYSSIHRDVASIINMSGRFDLRRGIADRLGSDYMEKIDRYGFIDVGVKTGRSIYRVTKESLMDRLKIDMKSACMSIDPKCRVLTIHGSDDDIVPSEDALEFDKYISNHELSIIEGADHRYSLHHLELATIVLKFINVSSVYLWKLLFSGTLMPFRVNVFCFQLAPKQKIRIKLRSYWVPLIEDSCKKIIEAAKTTNAKTMGPVPLPTKRRVYCVLNSPHVHKDSRFHFEIRTHQRLIDIMYPTAQTIDSLMQLQLPAGVDVEVKL

SEQ ID NO: 168630 - protein, 111 aa, Oryza sativa
  unsure (1)..(111): unsure at all Xaa locations
  Clone ID: PAT_MRT4530_67126C.1.pep
VQRKKTLRSRRNSREVARVDVEEVVDRTGSTFSSSCVLLAVLPRRSALQTSGASTGSITRASKARRTPIQIPIQSSYILGCNPKTPFRSTRQXRPLAERIDPPGIHKDHIR

SEQ ID NO: 168631 - protein, 770 aa, Oryza sativa
  unsure (1)..(770): unsure at all Xaa locations
  Clone ID: PAT_MRT4530_67127C.1.pep
MAEQAKAHNLSPSISGDDGEPNPCRRARTPPPPPRQSPRREEVLERVEGSATSTSTGDGEGRRDGERRLLVYGDGSTPQGALQAAGALLRHPPVVPDPESPAQRWLDDVANLVMTARQRLGAGGRSSATKTSGATTTGSVSSRRRARRAAAVARHSAATPSSAPPTQEDLRGGPDARISIERRRNGRRAAHATEGASSSGVSHQHGRGDQPSVPPVGGVGCRAFVASLRNVRWPPRFRPTIAEKYDGSVNPAEFLQVYTTGIEAAGGDDRVMANFFPMALKGQARGWLMNLPPASVHSWEDLCQQFTMNFQGTYPCPGEEADLHAVQRRDDESLRSYIQRFCQVRNTIPSIPAHAVIYAFRGXCGTTACSKRSPPKSPRLPRSFFSSWTEWLARRRPGLGTPPVPVWQLRPPPGPPLGQGGGTGGGRRGXGLRATKRRKPTLPDLGYLEERRRRAALRAARYQQSLRRYHQRHVRARSLCVDDLVLRRVQTRAGLSKLSPMWEGCICAVVAVVRTVVTALLVGVEGKREPRGRSLLSVGFPLLMRAICDRRDSARREREQGGEAPEPNGGLRPPTTGAGPPPACPTVPGAPDPQDGPEATAGRPRLSPSDPEVVGTEAECAPRGLSDGERPGDVAPDEEDRPRRKVQRPVYFVSEALRDAETRYLQAQKMLYAILITSRKLRHYFQAHRVTVVTSYPLGQILYNREGTGRVVKWAIELSEFDLRLKPSHAIKSQALADFVVEWTPAPELVSAPEASSSPSQLPHTALWVM

SEQ ID NO: 168632 - protein, 59 aa, Oryza sativa
  Clone ID: PAT_MRT4530_67128C.1.pep
MGEIWRIFRMGFGLELMATTKKRDESAISDLAGHRFEEEDYPVIDYESELQTAISTTVR

SEQ ID NO: 168633 - protein, 111 aa, Oryza sativa
  Clone ID: PAT_MRT4530_67129C.1.pep
VQRKKTLRSRRNSREVARVDVEEVVDRTGSAFSSSCVLFAVLPRQSAPQTSGASTRSITRASKARRTTIWIPIRSSCILDCNPKTPFRSTRQQQLLAERIDPSGIHKDHIG

SEQ ID NO: 168634 - protein, 1119 aa, Oryza sativa
  unsure (1)..(1119): unsure at all Xaa locations
  Clone ID: PAT_MRT4530_6712C.1.pep
MKNFFRKLHIGEGSGDGASSSPPPPPSSRKGSGGVGGNHHLHAEQRQPSASAVSSWLDSVPGRPQPPTPSTPSEAEGSPFSSSVGSGAEERRQSVAAERRRSQEEEWERRRSQEEEAVREMRRSQEEDEVEERVIRESSEAEERKRVREKEDDDLEEFQLQLVLEMSARDNPEEMEIEVAKQISLGFCPPQSSTAEALAARYWNFNALGYDDRISDGFYDLYVTGNGPASITMPSLKDLRAQSLSHRVNWEAVLVHRGEDPELMKLDQTALIMSLELRESKPSEFVGNDLVQKLAGLVARHMGGTFFDSEGMLVKYQKMMRYLRTSIGSVVVPLGQLKIGLARHRALLFKVLADNIGIPCRLLKGRQYTGSDDGALNIVKFDDGREFIVDLVADPGTLIPSDGAVLSTEFEESSFSNNHHFNKDNDIRQLGSSNSLSNSACSSFECELLDRRSTWINVGPSDSDGATTSQTSKNNQQNTLSDSFGILSVSTFTSENRPITNESRSTDDIAAAKNKERSSVTINSSSTSPSPSSPEVGSTPAVRRMKVKDISEYMINAAKENPQLAQKIHEVLLENGVVAPPDLFSEDSMEEPKDLIVYDTTLFQSKDEMKKRMNELGSREYADRGHGPLLPHHPGHELPSKVPHRAPLDSLKPVEGLGIDHPPDIQDNTSFISQYEPSAPPQEASSQLTKQLPVTAAAVATAAVVASSMVVAAAKSNNDVNFDVPVAAAATVTAAAVVATTAAVSKQYEHLEPGNQLHSLPSPSEGNESIEKSADEFWDKQNFEIDHGQDNTLDQEKDSAEVRQDAERTSDKSSGTESAKSEITLDDVAEFEIQWEEITIGERIGLGSFGEVYRGEWHGTCIKIALFXEVAVKKFLQQDISSDALEEFRTEVRIIKRLRHPNVVLFMGAITRVPNLSIVTEFLPRGSLFRLIHRPNNQLDERKRLRMALDVARGMNYLHNCTPVIVHRDLKSPNLLVDKNWVVKVCDFGLSKMKNKTFLSSRSTAGTAEWMAPEVLRNEPSDEKCDVFSYGVILWELCTLLQPWEGMNAMQVVGAVGFQNRRLDIPDNTDPAIAEIIAKCWQTDPKLRPSFADIMASLKPLLKNMTAQAPRQRVQQTDE

SEQ ID NO: 168635 - protein, 1939 aa, Oryza sativa
  Clone ID: PAT_MRT4530_67130C.1.pep
MAEQAKAHNLSPSVSGDDGEPNPRRRARTPPPPPRQSPRREEALERVEGSATSTSTGDGEGRRDGERRLLVYGDGSTPQGALQAAGALLRHPPIVPDPESPAQRWLDDVANLVMTARQRLGAGGRSSATKTSGAATTGSVLSRRRARRAAAVARHSAATPSSAPPTQEDLRGGPDPRISIERRRNGRRAAHATEGASSSGVSYQHGRGDQPSVPPVGGVGCRAFVASLRNVRWPPRFRPTIAEKYDGSVNPAEFLQVYTTGIEAAGGDDRVMANFFPMALKGQARGWLMNLPPASVHSWEDLCQQFTMNFQGTYPRPGEEADLHAVQRRDDESLRSYIQRFCQVRNTIPCIPAHAVIYAFRGGVRHNRMLEKIASKEPQTTAELFQLADRVARKEEAWTWNPSGSGVAASAAPESAARTGRRDRRRKKRSAHSDDEGHVLAVEGASRATRKGRPASDKKKEAGAPSRERSTGKWCIVQNTSLHDLADCRAVKSLAERTRKWEEERRQERREGKSPAVPSGNRRSEAKQKAPAEDIDDGDDDLGFQEPGATIATVDGGACAHVSRRSLKAMKRELLAAAPTHEATRRARWSEVALTYDQTDHPPCVARGGQIAMVVSPTVCNVKLGRVLIDGGAALNILSPAAFDAIKAPGMVLRPSQPIIGVTPGHTWPLGHIDLPVTFGGSANFRTERVNFDVADLSLPYNAVLGRPALVKFMAAVHYAYLQMKMPGPGGPISVHGDLKVALACMEQRADHLTAASKPEGGDERLGTSAPAAPRQRIVTCDEVPEDALVSFLRANADVFAWRPADMPGVPREVIEHRLAVRSGARPVRQKVRRQVPERQAFIREEVARLLEAGFIREVIHPEWLANPVVVPKANGKLRMCIDYTDLNKACPKDPYPLPRIDQIVDSTAGCDLLCFLDAYSGYHQIRMAREDEEKTAFITPIGTYCYTTMPFGLKNAGPTFQRTTRISLGSQIGRNVEAYVDDLVVKTRNQETLLSDLAETFKSLRSARIKLNPDKCVFDVPAGKLLGFLVSARGIEANPEKIRAIERMRPPASLGMCNASPLLYLAATPQVVSAALIVERDEDNPHSAHPHPVLAWPGREQGGEAPEPNGGPRPPTTGAGPLPACQMVPGAPDPQDGPRATAGRPHLSPSDPEANPVPTRPGREQGEEAPEPNGGLRPLTTGVGPLPACPTTPRAPDPLDGPEATVGRPPLSSSDPEVVGTEDECTPRGRLDKEHPRDVAPSEEDRPHRKVQRPVYFVSEALRDAKTRYPQAQKMLYAILMASRKLRHYFQAHRVTGTGRVVKWAIELSEFDLHFEPHHAIKSQALADFVAEWTPAPEPVSVPEASSGPSQLPHTAHWVMQFDGSLSLQGTGAGVTLTSPSGDVLRYLVRLDFRATNNMAEYEGLLAGLRVAAGLGIRRLLVCKEYRCSDPQMDAYVRQVRRMERHFDGIELRHVPRRDNTVADELSRLTSSRAQTPPGAFEERLAQPSARPDPLGETDAPDRPPKPVGVQASGPEGSAPSSLRLIAWIAEIQAYLTDKTLPEDREGSERVQRISKRYVLVEGTHYRRAANGILLKCILREQGVELLADIHEGECGSHSTSRTLVGKAFRQGFYWPTALNDAVDLVRRCRACQFHAKQIHQPAQALQIIPLSWPFAVWGLDILGPFRRAPGGFEYLYVAIDKFTKWPEAYPVVKIDKHSALKFIKGITTRFGVPNRIITDNGTQFTSELFGDYCEDMGIKLCFASPAHPRSNGQVERANAEILRGLKTKTFNILKKHGDSWIEELPAVLWANRTTPSRATGETPFFLVYGTEAVLPSELTLRSPRATMYCEADQDQLRRDDLDYLEERRRRAALRAARYQQSLRRYHQRHVRARSLCVDNLVLRRVQTRAGLSKLSPMWEGPYRVIGVPRPGSVRLATGDGTELPNPWNIEHLRRFYP

SEQ ID NO: 168636 - protein, 242 aa, Oryza sativa
  Clone ID: PAT_MRT4530_67131C.1.pep
MPAASPSSSSSDYSCGSNKSVAFLVATVVTVPLCALLLGGGGVAVVRDNNNNAGGGEAEVYRSELTPLQKHVAFFDRNKDGIIYPSETYQGFRAIGAGVVLSAVGAVFINGGLGPKTIPENTKTGLKLPIYVKNIHKGKHGSDSGVYDANGRFVPEKFEEIFKKHAHTRPDALTDKELKELLQSNREPKDFKGWLGGFTEWKVLYYLCKDKDGFLHKDTVRAVYDGSLFAKMEQEKQSAKKK

SEQ ID NO: 168637 - protein, 111 aa, Oryza sativa
  unsure (1)..(111): unsure at all Xaa locations
  Clone ID: PAT_MRT4530_67132C.1.pep
AQRKKALRSRRNSREVARVDVEEVVDRTDSTFSSSCVLLXVFPRRSTPQTSGASTGSITRASKARRTPIQIPIRSSCTLSCNLKTPFRSTHQQRPLAERIDPPGIHKDHIG

SEQ ID NO: 168638 - protein, 1684 aa, Oryza sativa
  unsure (1)..(1684): unsure at all Xaa locations
  Clone ID: PAT_MRT4530_67133C.1.pep
MAEQAKAHNLSPSVSGDDGEPNPRRRARTPPPPPRQSPRQEEALERVEGSATSTSTGDGEGRRDGERRLLVYGDGSTPQGALQAAGALLRHPPVVPDLESPAQRWLDDVANLVMTARQRLGAGGRSSATKTSGAATTGSVSSRRRARRAAAVARHSAATPSSAPPTQEDLRGGSDARISIERRRNGRRAAHATEGASSSGVSHQHGRGDQPSVPPVGGVGCRAFVASLRNVRWPPRFRPTIAEKYDGSVNPAEFLQVYMTGIEAAGGDDRVMANFFPMALKGQARGWLMNLPPASVHSWEDLCQQFTMNFQGTYPRPGEEADLHAVQRRDDESLRSYIQRFCQVRNTIPCIPAHAVIYAFRGGVRHNRMLEKIASKEPQTTAELFQLADRVARRRDKRKKKRSAHSDDEGHVLAVEGASRATRKGRPASDKKKEAGAPSRERPTGKCKAKQKAPAEDIDDGDDDLGFQEPGATIATLDGGACAHVSRRSLKAMKRELLAAAPTHEATRRARWSEVVLTFDQTDHPPCVARGGQIAMVVSPTVCNVKLGRVLIDGGAALNILSPAAFDAIKAPGMVLRPSQPIIGVTPGHTWPLGHIDLPVTFGGSANFRTERVNFDVADLSLPYNAVLGRPALVKFMAAVHYAYLQIKMPGPGGPISVHGDLKVALACMEQRADHLTAASKPEGGDERLGTSAPAAPRQRIVTCDEVPEDALVFFLRVNADVFAWRPADMPGVPREVIEHRLAVRSGARPVRQKVRRQAPERQAFIREEVARLLEAGFIREVIHPEWLANPVVVPKANGKLRMCIDYTDLNKACPKDPYPLPRIDQIVDSTAGCDLLCFLDAYSGYHQIRMAREDEEKTAFITPIGTYCYTTMPFGLKNAGPTFQRTTRNSLGSRIGRNVEAYVDDLVVKTRNQETLLSDLAETFESLRSARIKLNPDKCVFGVPAGKLLGFLVSARGIEANPEKIRAIERMRPPSKLRDVQCVTGCMAALSRFISRLGEKALPLFKLLKRSGPFTWTEEAERALTQLKAYLSSPPVLVAPEPNEPLLLYLAATPQVTVPGAPDPQDGPRATAGRPHLSPSDPEANPVPTRPGREQGEEAPEPNGGLRPLTTGVGPLPACPTTPGAPDPQDGPEATVGRPPLSSSDPEVVGTEDECTPRGRLDKERPRDVAPSEEDRPHRKVQRPVYFVSEALRDAKTRYPQAQKMLYAILMASRKLRHYFQAHRVTVVTSYPLGQILHNREGTGRVVKWAIELSEFDLHFEPRHAIKSQALADFVAEWTPAPEPVSVPEASSGPSQLPHTAHWVMQFDGSLSLQGAGAGVTLTSPSGDVLRYLVRLDFRVTNNMAEYEGLLAGLRVAAGLGIRRLLVLGDSQLVVNQVCKEYRCSDPQMDAYVRQVRRMERHFDGIELRHVPRRDNTVADELSRLASSRAQTPLGAFEERLAQPSARPDPLGETDAPDRPPMPVGVQASGPEGSAPSSLRLIAWIAEXQAYLTDKTLLEDREGSERVQRISKRYVLXRAPGGFEYLYVAIDKFTKWPEAYPVVKIDKHSALKFIKGITARFGVPNRIITDNGTQFTSELFGDYCEDMGIKLCFASPAHPRSNGQVERANAEILRGLKTKTFNILKKHGDSWIEELPAVLWANRTTPSRAXTGETPFFLVYGAEAVLPSELTLRSPRATMYCEA

SEQ ID NO: 168639 - protein, 215 aa, Oryza sativa
  unsure (1)..(215): unsure at all Xaa locations
  Clone ID: PAT_MRT4530_67134C.1.pep
MASKPADVTATGGGGVAVVRDNNNNAGGGEAEVYRSELTPLQKHVAFFDRNKDGIIYPSETYQGFRAIGAGVVLSAVGAVFINGGLGPKTIPENTKTGLKLPIYVKNIHKGKHGSDSGVYDANGRFVPEKFEEIFKKHAHTRPDALTDKELKELLQSNREPKDFKGWVGGFTEWKVLYYLCKDKDGFLHKDTGRAVYDGSLFAKMGAXKQSAKKK

SEQ ID NO: 168640 - protein, 111 aa, Oryza sativa
  Clone ID: PAT_MRT4530_67135C.1.pep
AQRKKTLRSRRNSREVARVDAEEVVDRTGSTFSFSCVHLVVLPRRSAPQTSGAFTEFITRASKARRTSIPIPIRSSYILGCNPKTPFRSTHQQRPLAERIDPPNIHKDHIG

SEQ ID NO: 168641 - protein, 1828 aa, Oryza sativa
  unsure (1)..(1828): unsure at all Xaa locations
  Clone ID: PAT_MRT4530_67136C.1.pep
MAEQAKAHNLSPRVSGDDGQPNPRRRARTPPPPPRQSPRREEALERVEGSATSTSTGDGEGRRDGERRLLVYGXDGSTPQGALQAAGALLRHPPIVPDPESPAQRWLDDVANLVMTARQRLGAGGRSSATKTSGAATTGSVSSRQRARRAAAVARHSAATPSSAPPTQEDLRGGPDARISIERRRNGRRAAHATEGAFSSGVSHQHGRGDQPSVPPVGGVGCRAFVASLRNVRWPPRFRPTIAEKYDGSVNPAEFLQVYTTGIEAAGGDDRVMANFFPMALKGQARGWLMNLPPASVHSWKDLCQQFTMNFQGTYPRPGEEADLHAVQRRDDESLRSYIQRFCQVRNTIPCIPAHAVIYAFRGGVRHNRMLEKIASKEPQTTAELFQLADRVARKEEAWTWNPSGSGVAASAAPGSAARTGRRDRRRKKRSAHSDDEGHVLAVEGASRATRKGRPASDKKKEAGAPSRERPTGKWCIVHNTSLHDLADCRAVKSLAERTRKWEEERRQERREGKSPAVPSGNRRSEAKQKAPTEDIDDGDDDLGFQEPGATIATVDGGACAHVSRQSLKAMKRELLAAAPTHEATRRARWSEVALTFDQTDHPPCVARGGQIAMVVSPTVCNVKLGRVLIDGGAALNILSPAAFDAIKAPGMVLRPSQPIIGVTPGHTWPLGHIDLPVTFGGSANFRTERVNFDVADLSLPYNAVLGRPALVKFMAAVHYAYLQMKMPGPGGPISVHGDLKEDALVSFLRANADVFAWRPADMPGVPRELIEHRLAVRSGARPVRQKVRRQAPERQAFIREEVARLLEAGFIREVIHPEWLANPVVVPKANGKLRMCIDYTDLNKVCPKDPYPLPRIDQIVDSTAGCDLLCFLDAYSGYHQIRMAREDEEKTAFITPIGTYCYTTMPFGLKNAGPTFQRTTRISLGSQIGRNVEAYVDDLVVKTRNQETLLSDLAETFESLRSARIKLNPDKCVFGVPAGKLLGFLVSARGIEANPEKIRAIEWMRPPSKLRDVQCVTGCMAALSRFISRLGEKALPLFKLLKRSGPFTWTEEAERALTQLKAYLSSPPVLVAPEPNEPLLLYLAATPQVVSAALVVERDEDNPHSAHPHPVPAWPGREQGGEAPEPNGGPRPPTTGAGPLPACQTVPGDPDPQDGPRATAGRPHLSPSDPEANPVPTRPGREQGEEAPEPNGAPDPQDGPEATVGRPPLSSSDPEVVGTEDECTPRGHLDKERPRDVAPSEEDRPHRKVQRPVYFVSEALRDAKTRYPQAQKMLYAILMASRKLRHYFQAHRVTVVTSYPLGQILHNREGTGRVVKWAIELSEFDLHFEPRHAIKSQALADFVAEWTPAPEPVSVPEASSGPSQLPHTAHWVMQFDGSLSLQGAGAGVTLTSPNGDVLRYLVRLDFRATNNMAEYEGLLAGLRVAAGLGIRRLLVLGDSQLVVNQRAQTPPGAFEERLAQPSARPDPLGETDAPDRPPMPVGVQASGPEGSAPSSLRLIAWIAEIQAYLTDKTLPEDREESERVQRISKRYVLVEGTLYRRAANGILLKCIPREQGVELLADIHEGECGAHSASRTLVGKAFRQGFYWPTALNDAVDLVRRCRACQFHAKQIHQPAQALQIIPLSWPFAVWGLDILGPFRRAPGGFEYLYVAIDKFTKWPEAYPVVKIDKHSALKFIKGITARYGVPNRIITDNGTQFTSELFGDYCEDMGIKLYFASPAHPRSNGQVERANAEILRDLKTKTFNILKKHGDSWIEELPAVLWANRTTPSRATGETPFFLVYGAEAVLPSELTLRSPRATMYCEADQDQLRIDDLDYLEERRRRAAL

SEQ ID NO: 168642 - protein, 1872 aa, Oryza sativa
  Clone ID: PAT_MRT4530_67137C.1.pep
MAEQAKAHNLSPSVSGDDGEPNPRRRARTPPPPPRQSPRREETLERVEGSATSTSTGDGEGRRDGERRLLVYGDGSTPQGALQATGALLRHPPIVPDPESPAQRWLDDVANLVMTARQRLGAGGRSSATKTSGAATTGFVSSRRRARRAAAVARHSAATPSSAPPTQEELRGGPDARISIERRRNGRRAAHATEGASSSGVSHQHGRGDQPSVPPVGGVGCRAFVASLRNVRWPPGEEADLHAVQRRDDESLRSYIQRFCQVRNTIPCIPAHAVIYAFRGGVRHNRMLEKIASKEPQTTAELFQLADRVARKEEAWTWNPSGSGVAASAAPGSAARTGRRDRRRKKRSAHSDDEGHVLAVEGASRATRKGRPASNKKKEAGAPSRERPTGKWFIVHNTSLHDLADCRAVKSLAERTRKWEEERRQERREGKSSAVPSGNRRSEAKQKAPAEDIDDGDDDLGFQEPGATISTVDGGACAHVSRRSLKAMKRELLAAAPTHEATRRARWSEVALTFDQTDHPPCVAQGGQIAMVVSPTVCNVKLGRVLIDGGAALNILSPAAFDAIKAPGMVLRPFQPIIGVTPGHTWPLGHIDLPVTFGGSANFRTERVNFDVADLSLPYNAVLGRPALVKFMAAVHYAYLQMKMPGPGGPISVHGDLKVALACMEQRADHLTAASKPEGGDERLGTSAPAAPRQRIVTCDEVPEDALVSFLRANADVFAWRPADMPGVPREVIEHRLAVRSGARPVRQKVRRQAPERQAFIREEVARLLEAGFIREVIHPEWLANPVVVPKANGKLRMCIDYTDLNKACPKDPYPLPRIDQIVDSTAGCDLLCFLDAYSGYHQIRMAREDEEKTAFITPIGTYCYTTMPFGLKNAGPTFQRTTRISLGSQIGRNVEAYVDDLVVKTRNQETLLSDLAETFESLRSARIKLNPDKCVFGVPAGKLLGFLVSARGIEANPEKIRAIERMRPPSKLRDVQCVTGCMAALSRFISRLGEKALPLFKLLKRSGPFTWTEEAERALTQLKAYLSSPPVLVAPEPNEPLLLYLAATPQVVSAALVVERDEDNPHSAHPHPVLAWPGREQGGEAPEPNGGPRPPTTGAGTLPACQTVPGAPDPQYGPRATAGRPHLSPSDPEANSVTTRPGREQGEEAPEPNGGLRPLTTGVGPLPACPTTPGAPDPQDGPEATVGRPPLSSSDPEVVGTEDECTPRGRLDKEHPRDVAPSEEDRPHRKVQRPVYFVSEALRDAKTRYPQAQKMLYAILMASRKLCHYFQAHRVTVITSYPLGQILHNREGTGRVVKWAIELSEFDLHFEPRHAIKSQALVDFVAEWTPAPEPVSVPEASSGPSQLPHTAHWVMQFDGSLSLQGAGAGVTLTSPSGDVLRYLVRLDFRATNNMAEYEGLLAGLRVAAGLGIRRLLVLGDSQLVVNQVWETDAPDRPSMPVGVQASGPEGSAPSSLRLIAWIAEIQAYLTDKTLPEDREGSERVQRISKCYVLVEGTLYRRAANGILLKCIPREQGVELLADIHEGECGSHSASRTLVGKAFRQGFYWPTALNDAVDLVRRCRACQFHAKQIHQPAQALQIIPLSWPFAVWGLDILGPFRRAPGGFEYLYVAIDKFTKWPEAYPVVKIDKHSALKFIKGITARFGVPNRIITDNGTQFTSELFGDYCEDMGIKLCFASPAHPRSNGQVERANAEILRGLKTKTFNILKKHGDSWIEELPAVLWANRTTPSRATGETPFFLVYGAEAVLPSELTLSSPRATMYCEADEDQLRRDDLDYLEERRRRAALRAARYQQSLRRYHQRHVRARSLCVDDLVLRRVQTRAGLSKLSPMWEGPYRVIGVPRPGSVRLATGDGTELPNPWNIEHLRRFYP

SEQ ID NO: 168643 - protein, 2027 aa, Oryza sativa
  Clone ID: PAT_MRT4530_67138C.1.pep
MAEQAKAHNLSPSVSGDDGEPNPRRRARTPPPPPRQSPSREEALERVEGSVTSTSTGDGEGQRDGERRLLVYGDGSTPQGALQAAGALLRHPPIVPDLESPAQRWLDDVANLVMTARQRLGAGERSTATKTSGAATTGSVSSRRRARRAAAVARHSAATPSSAPPTREDLRRGPDARISIEHRRNGRRAAHATEGASSSGVSPRHGHGDQPSVPPVGGVGCRAFVASLRNVRWPPRFRPTIAEKYDGSVNPAEFLQVYTTGIEAAGGDDRVMANFFPMALKGQARGWLMNLPPASVHSWEDLCQQFTMNFQGTYPRPGEEADLHAVQRRDDESLRSYIQRFCQVRNTIPCIPAHEVIYAFRGGVRHNRMLEKIASKEPQTTAELFQLADRVARKEEAWTWNPSGSGVAASAAPGSAARTGRRDRRRKKRSAHSDDEGHVLAVEGAPRATRKGRPASDKKKEASAPSRECPTGKWCTVHNTSLHDLADCRAVKSLAERTRKWEEERRQERREGKSPAVPSGNRRSEAKQKAPAEDIDDGDDDLGFQEPGATIATLDGGACAHFSRRSLKAMKRELLAAAPTHEATRRARWSEVALTFDQTDHPPCVAQGGQIAMVVSPTVCNVKLGRVLIDGGAALNILSPAAFDAIKAPGMVLRPSQPIIGVTPPHTWPLGHIDLPVTLGGSANFRTERVNFDVADLSLPYNAVLGRPALVKFMAAVHYAYLQMKMPGPGGPISVHGDLKVALACMERRADHLTAASKPEGGDERLGTSAPAAPRQRIVTCDEVPEDALVSFLRANADVFAWRPADMPGVPREVIEHRLAVRSGARPVRQKVRRQAPERQAFIREEVARLLEAGFIREVIHPEWLANPVVVPKANGKLRMCIDYTDLNKACPKDPYPLPRIDQIVDSTAGCDLLCFLDAYSGYHQIRMAREDEEKTAFITPIGTYCYTTMPFGLKNAGPTFQRTTRISLGSQIGRNVEAYVDDLVVKTRNQETLLLDLAETFESLRSARIKLNPDKCVFGVPAGKLLGFLVSARGIEANPEKIRAIERMRPPSKLRDVQCVTGCMAALSRFISRLGEKALPLFKLLKRSGPFIWTEEAERALTQLKAYLSSPPVLVAPEPNEPLLLYLAATPQVVSAALVVERDEDNPHSAHPHPVLAWPGREQGGEAPEPNGGPRPPTTGAGPLPACQTVPGAPDPQEGPRATAGRPHLSPSDPEANPVPTRPGREQGEEAPEPNGGLRPLTTGVGPLPACPTTPGGPDPQDGPEATVGRPPLSSSDPEVVGTEDECTPRGRSDKERPRDVAPSEEDRPHRKVQRPVYFVSEALRDAKTRYPQAQKMLYAILMASRKLRHYFQAHRVTVVTSYPLGQILHNREGTGRVVKWAIELSEFDLHFEPRHAIKSQALADFVAEWTPAPEPVSVPEASSGPSQPPHTTHWVMQFDGSLSLQGAGAGVTLTSPSGDVLRYLVRLDFRATNNMAEYEGLLAGLRVAAGLGIRRLLVLGDSQLVVNQVCKEYRCSDPQMDAYVRQVRRMERHFDGIELRHVPRRGNTVADELSRLASSRAQTPLGAFEERLAQPSARPDPLGETDAPDRPPMPVGVQASGPEGSAPSSLRLIAWIAEIQAYLTDKTLPKDREGSERVQRISKRYVLVEGTLYRRAANGILLKCIPREQGVELLADIHEGECGAHSASRTLVGKAFRQGFYWPTALNDAVDLVRRCRACQFHAKQIHQPAQALQIIPLSWPFAVWGLDILGPFRRAPGGFEYLYVAIDKFTKWPEAYPVVKIDKHSALKFIKGITARFGVPNRIITDNGTQFTSELFGDYCEDMGIKLCFASPAHPRSNGQVERANAEILRGLKTKTFNILKKHGDSWIEELPAVLWANRTTPSRATGETPFFLVYGAEAVLPSELTLRSPRATMYCEADQDQLRRDDLDYLEERRRRAALRAARYQQSLRRYHQRHVRARSLCVDDLVLCRVQTRAGLSKLSPMWEGPYRVIGVPRPGSVRLATGDGTELPNPWNIEHLRRFYP

SEQ ID NO: 168644 - protein, 1758 aa, Oryza sativa
  unsure (1)..(1758): unsure at all Xaa locations
  Clone ID: PAT_MRT4530_67139C.1.pep
MAEQAKAHNLSPSVSGDDGEQNPRRRARTPPPPPRQSPRREEALERVEGSATSTSTGDGEGQRDGERRLLVHGDGSTPQGALQAAGALLRHPPIVPDPESPAQRWLDDVANLVMTARQRLGAGGRSSATKTSGAATTGSVSSRRRARRAAVVARHSAATPSSAPPTQEDLRGGPDARISIKRRRNGRRAAHATEGASSSGVSHQHGRGDHPPCXPVGGVGCRAFVASLRNVRWPPRGGXVRHNRMLEKIASKEPQTTAELFQLADRVARKEEAWTWNPSGSGVAALAAPGFPARTGRRDRRRKKRSAYSDDEGHVLAVEGASRATRKGRPASDKKKEAGAPSRERPTGKWCIVHNTSLHDLADCRAVKSLAERTRKWEEERRQEHREGKSPAVPSGNRRSEAKQKAPAEDIDDDDDDLGFQEPGATIATVDGGACAHVSRRSLKAMKRELLATAPTHEATRRARWSEVALTFDQTDHPPCVARGGQIAMVVSPTVCNVKLGRVLIDGGAALNILSPAAFDAIKAPGMVLRPSQPIIGVTPGHTWPLGHIDLPVTFGGSANFRTERVNFDVADLSLPYNAVLGRPALVKFMAAVHYAYLQMKMPGPGGPISVHGDLKVALACMEQRADHLTAASKPEGGDERLGTSAPAAPRQRIVTCDEVPEDALVSFLRANADVFAWRPADMPGVPREVIEHRLAVRSGARPVRQKVRRQAPERQAFIREEVARLLEAGFIREVIHPEWLANPVVVPKANGKLRMCIDYTDLNKACPKDPYPLPRIDQIVDSTVGCDLLCFLDAYSGYHQIRMAREDEEKTAFITPIGTYCYTTMPFGLKNAGPTFQRTTRISLGSQIGRNVEAYVDDLVVKTRNQETLLSDLAETFESLRSARIKLNPDKCVFGVPAGKLLGFLVSARGIEANPEKIRAIERMRPPSKLRDMQCVTGCMAALSRFISRLGEKALPLFKLLKRSGPFTWTEEAERALTQLKAYLSSPPVLVAPEPNEPLLLYLAATPQVDGPEATVGRPPLSSSDPEVVGTEDECTPRGRLDKEHPRDVAPSEEDRPHRKVQRPVYIVSEALRDAKTRYPQAQKMLYAILMASRKLRHYFQAHRVTVVTSYPLGQILHNREGTGRVVKWAIELSEFDLHFEPRHAIKSQALADFVAEWTPAPEPVSVPEASSGPSQLPHTAHWVMQFDGSLSLQGAGAGVTLTSPSGDVLRYLVRLDFRATNNMAEYEGLHVGLRVAAGLGIRRLLVLGDSQLVVNQVCKEYRCSDPQMDAYVRQVRRMERHFDGIELRHVPRRDNTVADELSRLASSRAQTPPGAFEERLAQPSARPDPLGETDAPDRPPKPVGVQASGPEGSAPSSLRLIAWIAEIQAYLIDKTLPEDREGSERVQRISKRYVLVEGTLYRRAANGILLKCIPREQGVELLADIHEGECGSHSASRTLVGKAFRQGFYWPTALNDAVDLVRRCRACQFHAKQIHQPAQALQIIPLSWPFAVWGLDILGPFRRAPGGFEYLYVAIDKFTKWPEAYPVVKIDKHSALKFIKGITARELFGDYCEDMGIKLCFASPAHPRSNGQVERANAEILRGLKTKTFDILKKHGDSWIEELPAVLWANRTTPSRATGETPFFLVYGAEAVLPSELTLRSPRATMYCEADQDQFRRDDLDYLEEQRRRAALRAARYQQSLRRYHQRHVRARSLCVDDLVLRRVQTRARLSKLSPMWEGPYRVIGVPRPGSVRLATGNGTELPNPWNIEHLRRFYP

SEQ ID NO: 168645 - protein, 644 aa, Oryza sativa
  unsure (1)..(644): unsure at all Xaa locations
  Clone ID: PAT_MRT4530_6713C.1.pep
MKVDVNQDHGQEDNVIRKNQWCPSGIFTKNQKIRVQRLRNRERLQEVEQEINHRLRKAKPRQEWRVKNQVPVADDVAADEVKRLAKGKSVVTAPVNMVFTLLAEFGIDQADVNEVEEESAKLVLSPEQAVFEKPEGTENRHLKPLYINGYVNGKPMSKMMVDGGAAVNLMPYATFRKLGRNAEDLIKTNMVLKDLVGSYSLLLGRDWIHANCCIPSTMHQCLIQWQGDKIEIVPADSQLKMENPSYYFEGVVEGSNVYNKDTVDDLNDKQVADQLVDAASGNKILSFIDGNAGYNQIFMTEEDMHKTAFRCPGAIGLFEWVVMTFGLKSAGATYQRAMNYIYHDLIGWLVEVYIDDVVVKSKEIEDHIADLRKVFERTRKYGLKMNPTKCAFGVSAGQFXGFLVHERGIEVEALSTIQRVXVICKADVVKYMLSAPILKGRVGKWIFSLTEFDHRYESLKAIKGQAIADFIVEHRDDSIGSVEIVPWTLFFDGSVCTHGCGIGLVIISPRGAYFEFAYTIKPYATNNQAEYEAVLKGLQLLKKVEAETIEIMGDSLLVISQLAGEYECKNDTLMVYNEKCQELKKEFRLVTLKHVSREQNIEANDLAHGASGYKPMIKDVKVEIAAMTADDWRYDVHQCSFKNI

SEQ ID NO: 168646 - protein, 110 aa, Oryza sativa
  unsure (1)..(110): unsure at all Xaa locations
  Clone ID: PAT_MRT4530_67140C.1.pep
PYIYEERGLIFXPYIYSTCVTSLVFFFWYTIMCVHVLSTSSLSLFTFSLSLNVKYTVRECVCVRRTYDVRIGVFSSYGMIKISHVYSEFLIIYIIHMGIYLISPCTKKKK

SEQ ID NO: 168647 - protein, 1924 aa, Oryza sativa
  Clone ID: PAT_MRT4530_67141C.1.pep
MAEQAKAHSLSPSVSGDDGEPNPRRRARTPPPLPRQSPRREEALERVEGSATSTSTGAGEGRRDGERRLLVYGDGSTPQGALQAAGALLRHPPIVPGPESPAQRWLDDVANLVMTAQQRLGAGGRSSATKTSGAATTRSVSSRRRARRAAAVARHSAATPSSAPPTQEDLRGGPDARISIEHQRNGRRAAHATEGASSSGVSHQHGRGDQPSVPPVGGVGCRAFVASLRNVRWPPRFWPTIAEKYDGSVNPAEFLQVYTTGIEAAGDDDRVMANFFPMALKGQARGWLMNLPPASVHSWEDLCQQFTMNFQGTYPRPGEEADLHAVQRRDDESLRSYIQRFCQVRNTIPCIPAHAVIYAFRGGRRDRRRKKRSAHSDDEGHVLAVEGASRATRKGRPASDKKKEAGAPSRERPTGKWCIVHNTSLHDLADCRAVKSLAERTRKWEEERRQERREGKSPAVPSGNRRSEAKQKAPAEDIDDGDDDLGFQEPGATIATVDGGACAHVSRRSLKAMKRELLAAAPTHEATRRARWSEVALTFDQTDHPPCVARGGQIAMVVSPTVCNVKLGRVLIDGGAALNILSPAAFDAIKAPGMVLRLSQPIIGVTPGHTWPLGHIDLPVTFGGSANFRTERVNFDVADLSLPYNAVLGRPALVKFMAALHYAYLQMKMPGLGGPISVHGDLKVALACMEQRADHLAAASKPEGGDERLGTSIPAAPRQRIVTCDEVPEDALVSFLRANADVFAWRPADMPGVPREVIEHRLAVRSGARPVRQKVRRQAPERQAFIREEVARLLEAGFIREVIHPEWLANPVVVPKANGKLRMCIDYTDHNKACPKDPYPLPRIDQIVDSTAGCDLLCFLDAYSGYHQIHMAREDEEKTAFITPIGTYCYTTMPFGLKNAGPTFQRTTRISLGSQIGRNVEAYVDDLVVKTRNQETLLSDLAETFESLRSARIKLNPDKCVFGVPAGKLLGFLVSARGIEANPEKIRAIERMRPPSKLRDVQCVTGCMAALSRFISRLGEKALPLFKLLKRSGPFTWTEEAERALTQLKAYLSSPPVLVAPEPNEPLLLYLAATPQVVSAALVVERDEDNPHSVHPHPVLAWPGREQGGEAPEPNGGPRPPTTGAGPLPACQTVPGAPDPQDGPRATAGRPHLSPSDPEANPVPTRPGREQGEEAPEPNGGLRPLTTRVGPLPACPTTPGAPDPQDGPEATVGRPPLSSSDPEVVGTEDECTPRGRLDKERPRDVAPSEEDRPHRKVQRPVYFVSEALQDAKTRYPQAQKMLYAILMASRKLRHYFQAHRVTVVTSYPLGQILHNREGTGRVVKWAIELSEFDLHFEPRHAIKSQALADFVAEWTPAPEPVSVPEASSGPSQLPHTAHWVMQFDGFLSLQGAGAGVTLTSPSGDVLRYLVRLDFRATNNMAEYEGLLAGLRVAAGLGIRRLLVLGDSQLVVNQVCKEYRCSDPQMDAYVRQVRRMERHFDGIELRHVPRRDNTVADELSRLASSRAQTPPGVFEERLAQPSARPDPLGETDAPNRPPRPVGVQASGPEGSAPSSLRLIAWIAEIQAYLTDKTLPEDREGSERVQRISKRYVLVEGTLYRRAANGILLKCIPREQGVELLADIHEGECGAHSASRTLVGKAFRQGRPGPAMQSVRAPGGFEYLYVAIDKFTKWPEAYPVVKIDKHSALKFIKGITARFGVPNRIITDNGTQFTSELFGDYCEDMGIKLCFALPAHPRSNGQVERANAEILRGLKTKTFNILKKHGDSWIEELPAVLWANRTTPSRATGETPFFLVYGAEAVLPSELTLRSPRATMYCEADQDQLRRDDLDYLEERRRHAALRAALYQQSLRRYHQRHVRARSLCVDDLVLRRVQTRAGLSKLSPMWEGPYRVIGVPRPGSVRLATGDGTELPNPWNIEHLRRFYP

SEQ ID NO: 168648 - protein, 143 aa, Oryza sativa
  Clone ID: PAT_MRT4530_67142C.1.pep
MDWLVWVAVASSSESVRGKRLSTKRCGEFRRFRAETRVPRKETGLAGRDPSAARPRRNGGETWMRRALVLSVVLAGWWARPHGQIDKSYRLVGLVRRSDLVTGAKRWWGWCGAIGASGWPMDGQDGGLVPGLGLVVVGGQRPV

SEQ ID NO: 168649 - protein, 2009 aa, Oryza sativa
  Clone ID: PAT_MRT4530_67143C.1.pep
MAEQAKAHNLSPSVSGDDGEPNPRRRARTPPPPPRQSPRREEALERVEGSATSTSTGDGEGRRDGERRLLVYGDGSTPQGALQAAGALLRHPPIVPDPESPAQRWLDDVANLVMTARQRLDAGGRSSATKTSGAATTGSVSSRRRARRAVAVARHSAATPSSAPPTQEDQRGGPDARIDIERRRNGRRAPHATEGASSSGVSPQHGRGDQPSVPPVGGVGCRAFVASLRNVRWPPRFRPTIAEKYDGSINPAEFLQVYTTGIEAAGGDDRAMANFFPMALKGQARGWLMNLPPASVHSWEDLCQQFTMNFQGTYPRPGEEADLHAVQRRDDESLRSYIQRFCQVRNTIPCIPAHAVIYAFRGGVRHNRMLEKIASKEPQTTAELFQLADRVARKEEAWTWNPSGSGWRDRRRKKRSAYTDDEGHVLAVEGASRATRKGRPAGDKKKEAGAPSRERPTGKWCIVHNTSLHDLADCRAVKGLAERTRKWEEERRQERREGKSPAVPSGNRRSEAKQKAPAEDIDDGDDDLGFQEPGATIATVDGGACAHVSRRSLKTMKRELLAAAPTHEATRRARWSEVALTFDQTDHPPCVARGGQIAMVVSPTVCNVKLGRVLIDGGAALNILSPAAFDAIKAPGMVLRPSQPIIGVTPGHTWPLGHIELPVTFGGSANFRTERVNFDVADLSLPYNAVLGRPALVKFMAAVHYAYLQMKMPGPGGPISVHGDLKVALACMEQRADHLAAASKPEGGDERLDTSVPAAPRQRMITCDEVPEDALVSFLRANADVFAWRPADMPGVPREVIEHRLAVRPGARPVRQKVRRQAPERQAFIREEVARLLEAGFIREVIHPEWLANPVVVPKANGKLRMCIDYTDLNKACPKDPYPLPRIDQIVDSTAGCDLLCFLDAYSGYHQIRMAREDEEKTAFITPIGTYCYTTMPFGLKNAGPTFQRTTRISLGSQIGRNVEAYVDDLVVKTRNQETLLSDLAETFESLRSARIKLNPDKCVFGVPAGKLLGFLVSARGIEANPEKIRAIERMRPPSKLRDVQCVTGCMAALSRFISRLGEKALPLFKLLKRSGPFTWTEEAERALTQLKVYLSSPPVLVAPEPNEPLLLYLAATPQVVSAALVVERDEDNPHSAHPHPVLAWPGKEQGGEAPESNGGPRPPTTGAGPLPAYQTVPGAPDPQDGPEATAGRPHLSPSDPEANPVPIRPRREQGEEAPEPNGGLRPLTTGVGPLPACPTTPGAPDPQDGPEATVGRPPLSSSDPEVVGTEDECTPRGRLDKERPRDVAPSEEDRPHRKVQRPVYFVSEALRDAKTRYPQAQKMLYAILMASRKLCHYFQAHRVTVVTSYPLGQILHNREGTGRVVKWAIELSEFDLHFQPRHAIKSQALADFVAEWTPAPEPVSVPEASSGPSQLPHTAHWVMQFDGSLSLQGAGAGVTLTSPSGDVLRYLVRLDFRATNNMAEYEGLLAGLRVAAGLGIRRLLVLGDSQLVVNQVCKEYRCSDPQMDAYVRQVRRMERHFDGIELRHVPRRDNTVADELSRLASSRAQTPPGAFEERLAQPSARPDPLGETDAPDRPPMPVGVQASGPEGSAHSSLRLIAWIAEIQAYLTDKTPPEDREGSERVQRISKRYVLVEGALYRRAANGILLKCIPREQGVELLADIHEGECGAHSASRTLVGKAFRQGFYWPIALNDAVDLVRRCRACQFHAKQIHQPAQALQIIPLSWPFAVWGLDILGPFRRAPGGFEYLYVAIDKFTKWPEAYPVVKIDKHSALKFIKGITARYGVPNRIITDNGTQFTSELFGDYCEDMGIKLCFASPAHPRSNGQVERANAEILRGLKTKTFNILKKHGDSWIEELPAVLWANRTTPSRATGETPFFLVYGAEAVLPSELTLRSPRATMYCEADQDQLRRDDLDYLEERRRRAALRAARYQQSLRRYHQRHVRARSLCVDDLVQTRAGLSKLSPMWEGPYRVIGVPQPGSVRLATSDGTELPNPWNIEHLHRFYP

SEQ ID NO: 168650 - protein, 141 aa, Oryza sativa
  Clone ID: PAT_MRT4530_67144C.1.pep
CRKVSVTFDPFMYLSLPLPSTTMRTMTITVFNTDGTTGPSPYTVSVPKSGDTKTLIDALSIACSLKGDERLLVAEVYNSALIRYLEEPSEVISLIRDGDRLVAYKLPKDSEDAPIVVFRNQRMESTLTSFGRKSWKSFGTP

SEQ ID NO: 168651 - protein, 92 aa, Oryza sativa
  Clone ID: PAT_MRT4530_67145C.1.pep
FSPSIDNVNRPPKIHVFNPDRVPRAFSFFFPAPYWFQHLPFSIFLQNMFVLLILIQFLLSLLFWQLFPPPCPPPHMLIETPAPSQSKITNKK

SEQ ID NO: 168652 - protein, 275 aa, Oryza sativa
  Clone ID: PAT_MRT4530_67146C.1.pep
MATSTATARTPTKAAAAAAGGRAAGNTTPSFKPASRARFLHAFLENAHPNIPAAGPGRPGPRPRTPPWRGGGGGGEGDFDFDKCREAAREALRTSHEEFFRKERAASAAAAEEQLQKEEEEEKAAAQEAKKGALETLEEEDVAELEGSSKVRALRTKVMTKALSSVPDSGAGRVKHLVQAFESILSISGATSDADRAGEGSWALPGLQAWKEDCEGPNRLCSSLDGKSDRLSWDSRTSAGGCRSRRNTSESLRSSWNKKLKVTSQHPFKLRTEAV

SEQ ID NO: 168653 - protein, 101 aa, Oryza sativa
  Clone ID: PAT_MRT4530_67147C.1.pep
MPSAARRRTRTPASRRRPRTSTPSPRRWWQRRRPSRCSCSRRTSCPSRSRRSGARSPPCRRSPRRSSCALSPSSKGACPAPARAGTRTRVQSSTPPQGRLP

SEQ ID NO: 168654 - protein, 160 aa, Oryza sativa
  Clone ID: PAT_MRT4530_67148C.1.pep
KKKKKKKKKKKKKKNQLVIDEAERSLHDALCVIRCLVNKRFLIAGGGAPEIEMSMQLAAWAKELQGMESYCIKEFAEALEVIPYTLAENAGLNPISIVTELRNRHAKGEKNAGINVRKGQITNILEENVVQPLLVSTSAITLACECVRMILKIDDIVTVR

SEQ ID NO: 168655 - protein, 69 aa, Oryza sativa
  Clone ID: PAT_MRT4530_67149C.1.pep
RKPRVVIKKQQHRGVVWLVVLLLTGQALFQNQDPAPKFAQSVTPPREGKTYWWGIRIHGETPIQNRIFR

SEQ ID NO: 168656 - protein, 108 aa, Oryza sativa
  unsure (1)..(108): unsure at all Xaa locations
  Clone ID: PAT_MRT4530_6714C.1.pep
ADGQTHITCSCFNKSPYXVPPLSIHQLPXDDLLRXKCCCPPRSFAYATPRLAXSDDRWEGLTAFPPDRLLDLPRHDGLQQGASAVMRSTLEQSKWIAVKKCLSIFNIF

SEQ ID NO: 168657 - protein, 647 aa, Oryza sativa
  Clone ID: PAT_MRT4530_67150C.1.pep
MPAPAPAAPWPVSQEISSLADRLLAHAGGDGDGAAGMRDLAGALLRIQPVARGVERRGDAGQRDLADWLLQLKGAVAEADDLLDELLLRRRHGSRLSPSLASCLARGKPPSRELKRLVGRIDRIHDVSERLVDAAAEEEAGEAGRGVRSPNRVTGSVLTERKVFGREKECGEVISRLVDCPENACSSALPVVAIVGHGGMGKTTVAQFVYSDERIEQKFDIKAWVCVWDRSDVAELTREILQSIGGPDDTLYGDNSAKLDILQAKLEVLVRSKRFLLVLDDVWNDEAKMELENKDLWRKVLAPLRSAGRGSKILVTTRMKLVARYLNSTHVVSLDVLGSSDCWLLLKEAALGGESKDIPPDLQEIGRTIAAKAKGSPLVSKALGQMLRNTRSTWRWRALLDAEISHNIIISSLQHSYQHLPGHLQRCFAYCSIFPRGCRFQRDKLVKMWVALGFIQTSRKERKGEYDLAQEYFYDLLSRSFFCAASKDNQTFYFLDNLMHDLAQHASVHDCMKIDEGMPSVIPPTVRHLSVSTDYFPQLKSKCKLERLRTLLVLRSSSLSLSHLPSKFLSEFKNLRVLDLSESDILELPETISQLFHLHYLALCHMTSKLPKCIYKLVQSGVLDMPILLFPDSHPRGMSKFVTQKTS

SEQ ID NO: 168658 - protein, 943 aa, Oryza sativa
  unsure (1)..(943): unsure at all Xaa locations
  Clone ID: PAT_MRT4530_67151C.1.pep
MRVVAEEGTLTMQNQQGSPSQEMHRARARLFLDKCREQLLESQRDKWPPKFCPNLTEKYDSCVNPSEFLQIYTMIIEAAGGDDRPPRKEKATDSKPSATTPGESRSADKWCSMHNTYRDSLADCRTVKNLAVRYRKTDEERQQSRREGKAPTTSAGNRQGDAKKKAPADDDDDSEDLEFKEPQQTVATLDGGACAQVSCRSFKAMRRALLAAVPTHEAARRARWSEXLALVVSPTVYNVKLRRVLIDGXASLNIISPAAFHALKAPGMKLQPSLPIIGVTPGNTWLLGHIELPVTFGDPTNFCTERIDFDVANLNLPYNAVLGRPALVKFMAATHYAYPQIKMSGPNGPITISSDVKIALACAEQRADSLAAATEPEEAGRPPEASTSRASEKRITSGDEGGDRAPPRRAVGCVTHLXKIRRQAPERQAFIREVTRLLEAGFIREVIYPEWLAXPVVIPKANGKLRMCIDYTDLNKACPKDPFPLLRIDQIVDSTMGCNLLCFLDAYSVYHQIRMAWEDEEKTASITPVGTFCYTTMPFGLKNAGPTSQRMTRITLSNQIRHNVEAYVDDLVVKTRQKDTLLQDLAETFDSLRSTRMKQNPERRDNAVADELSRIASARAPLPPGVFEESLMQPSARSDPPRVLNATTPTSMPSEPQASGPEGVNPDPTRQIAWMADIRAYLDNHTLPEDRAEAKKLARISKRYVLVEGTLYRRDANGVLLKCIPRKQGVELIADAHEGECRAYSASRILVVWGLDILGPFKAARGGYQHLYIAIDKFTKWPEAYPVIKINKHSALKFIRGITSRFRVPNRIITDNGTQFTSLKTKTYNVLKKHGDSWLEELPVVLWANWTTPSRATRETPFFLVYGVEAVLPLELSLGSPRVALYNEADQDELRRDDLDYLEERRRRTALRTVHYQQSLQRYHQRHVWARSLQVHDLFLRRV

SEQ ID NO: 168659 - protein, 72 aa, Oryza sativa
  Clone ID: PAT_MRT4530_67152C.1.pep
MDMDKVDPVVGATKLEVTGVAESELVNDLAWAGWPEVVTRHKDTTWLNQRLEEVEVVLEEEVEVVLLCIGDN

SEQ ID NO: 168660 - protein, 64 aa, Oryza sativa
  Clone ID: PAT_MRT4530_67153C.1.pep
MAAVCVLIVVASILLKGLLHHLGQARRIASVAISLGHKRDLRLNSPLAQPNSDTEAGRLTFSPC

SEQ ID NO: 168661 - protein, 57 aa, Oryza sativa
  Clone ID: PAT_MRT4530_67154C.1.pep
IDLAANAGELELFSCADHPQYALIKNFFESGFGIHNAGMIRSDRKLKERLFADGLLK

SEQ ID NO: 168662 - protein, 2199 aa, Oryza sativa
  Clone ID: PAT_MRT4530_67155C.1.pep
MGGLGVAARSKPPLSPNHTDNPIAVSPPSPFRSASRTETLAGGGSRYAEMLAPLPRLTSALRGHYDADQAYLLRKSALQSLKLPRPRDEWELARKIVPDWDDAPSDVRQAYKQFLGAVVELLNGEVVSEELQEVAPAVYALFAGDDTQSNLADNVLRRRNELENLVGYSVQDSVLKKLAQLAQMLCSLQRARGHELVQINADESITSEFGANFDFKPPSRFIVDVSLDDDLPLGSGVLSSKPAEHDQYDASSASVSHNSVSPGGYVNLRWLKDQCDLITRSGGSVLSGDELAKALCRVLLSNKAGDEIAGELLDLVGDAAFETVQDLLSHRKELVDAIQHGLMILKSEKMSSSNQPKMPTYGTQVTVQTEYERQLDKIRRKEEKRGKRGTETATNDIFSDDFSSFLLASERKQPFDDVVGTGEGANSFTITSLPQGTTRKHMKGYEEVKIPPTPTAPLKANEKLIEIGELDELAQAAFQGYKSLNRVQSRIFQATYYTNENILVCAPTGAGKTNIAMIAVLHEVKQHFRDGILHKNEFKIVYVAPMKALAAEVTSTFSRRLSPLNLVVRELTGDMQLTKNEIEETQMIVTTPEKWDVITRKSSDMSLSMLVKLIIIDEVHLLNDDRGSVIEALVARTLRQGESMQSMIRIVGLSATLPTYLEVAQFLRVNPDTGLFFFDSSYRPVPLAQQYIGISERDYAKKIELFNTLCYEKVVESIKQGHQALVFVHTRKDTGKTARTLIDLAANAGELELFSCADHPQYALIKKDVSKAKSREVAEFFESGFGIHNAGMIRSDRSLMERLFADGLLKVLVCTATLAWGVNLPAHTVVIKGTQLYDPKAGGWRDLGMLDVMQIFGRAGRPQFDKSGEGIIITTHDKLAYYLRLLTSQLPIESQFLGSLKDNLNAEVALGTVTNVREACAWLGYTYLFIRMKTNPLVYGIAWEEVIGDPSLGSKQRAFIIDAARALDKAKMMRYDEKSGNFYCTELGRIASHFYLQYSSVEAYNEMLRRHMNESEVINMVAHSSEFENIVVREEEQDELESLFKNACPHDIKGGPTDKHGKISILIQVYISRAPIDSSSLHSDAQYISQSLARIMRALFEICLRRGWSQMTSLLLEFCKGVDRKIWPEQHPLRQFDRDLSHEICKRLEEKHVDLDRLYEMEENDIGALIRFSHLGKVVKQYVGYFPYVNLSATVSPITRTVLKVDLLITPEFLWRDRHHGMSLRWWIIVEDSENDTIYHSELFTLMKKARGAPTKISFNVPIFEPHPPQYYIRAISDSWLGAESLFTVSFHNLTLPQTQITHTELLDLKPLPLSALGNKTYQDLYRFSHFNPIQTQAFHVLYHSDNNVLLGAPTGSGKTISAELAMLHLFNTQPDMKVVYIAPLKAIVRERMNDWRQRLVTQLGKKMVEMTGDFTPDMMALLSADIIISTPEKGDGISRSWHSRSYVMKVGLMILDEIHLLGADRGPILEVIVSRMRYISSQTERSIRFVGLSTALANARDLADWLGVRDDGLFNFKPSVRPVPLEVHIQLAASDEKPRQFLSMADNSLDMILSQVSDTNLRHTLQFGIGLHHAGLNDRDRSLVEELFSNNKIQVLVCTSTLAWGVNLPAHLVIIKFLYEPFPVESNLREHLHDHINAEIVSGTISNKEEAIIYLTWTYLYRRLVVNPAYYGLEDTETYTLNCYLSRLVETTFEDLEDSGCIKVDDHSVKYLILGKIASQYYLSYLTVSMFGTNIGPNTSLEAFVHILSASAEFDELPVRHNEDNLNRTLCGKVPYSVDQQHLDDPHVKANLLFQAHFSRAELPISDYVTDLKSVLDQSIRIIQAMIDICANSGWLSSALTCMHLLQMIIQGFPGSVTPDYVPFQMWDTLQGLSTYIRAMLSTQALLGAIGVGEKSATVIGATFQWFLRDLTGMLGGILFTFYQVSNSLANSNRQCHLIAIDSLFTDEITCLGSNLDSNAKMWRLVADFMNDLGMLMDLLSPLFPSSLIVIMCLGSLSRSFTGVASGATRAALTQHFALANNAADISAKEGSQETLATMLGMGLGMLLAHVTRGHALGVWVSFLSLTIFHMYANYKAVQSLSLTTLNYERSSILLQYFMDNGEENYFLLDKEGSVHIFIHKQAAATDILMSFIHGLVLAHLMQKSKSGHAEARQWIDEKYNTFISKLQVEGYSTERLLSHSIVWRAHWVHGPSEEKLE

SEQ ID NO: 168663 - protein, 219 aa, Oryza sativa
  Clone ID: PAT_MRT4530_67156C.1.pep
MEDGSIEGSSASLAGVGGGSETAATTLQWAMSELLNNPKVMQKAQDEIRQVLYGQERITEETISSLHYLHLVIKETLRLHPPTPLLLPRECREPCQILGFDVSKGAMVLINAWSIGRDPSNWHAPEKFMPERFEQNNIDFKETSFEYIPFGAGRRICPGMTFRLANIELLLASLLYHFDWELPYGMQAGDLDMTETLAVTARRKADLLVVPVVRVPIVG

SEQ ID NO: 168664 - protein, 51 aa, Oryza sativa
  Clone ID: PAT_MRT4530_67157C.1.pep
ASDYLPLVFRRITLLTISIEISSSPPIVMLWHQYGVLSVWQIPAQHSRVLN

SEQ ID NO: 168665 - protein, 117 aa, Oryza sativa
  Clone ID: PAT_MRT4530_67158C.1.pep
RFCGLHPDYLALTHTGSHGHIITQERPLLLHSQYRHRKICPFEPMPHSNLSLCAHKQPLAALTSCHRMDWLMRCSLDPQAPPVEAVARPVYRPGAQVCFAQKANAWVGPGSQAGPVQ

SEQ ID NO: 168666 - protein, 51 aa, Oryza sativa
  Clone ID: PAT_MRT4530_67159C.1.pep
SLPTKRARGDGEHAARAYSTVARQCRRRWQDVDGQLLTGSCHGIHGNSKKT

SEQ ID NO: 168667 - protein, 93 aa, Oryza sativa
  Clone ID: PAT_MRT4530_6715C.1.pep
QSRITASRPSPPLDDVSHSLHLLCNPQPSSDATSATASSNRSPSFVDIFHARPAPPTGRALVTDGAVVAYGPDMWVPRDLLFFWNTLPRKRHV

SEQ ID NO: 168668 - protein, 45 aa, Oryza sativa
  Clone ID: PAT_MRT4530_67160C.1.pep
MYLTIIYHLRHQHQVHHNHLHLHRHRHCHRHHHHIHFHLHGHHRH

SEQ ID NO: 168669 - protein, 111 aa, Oryza sativa
  Clone ID: PAT_MRT4530_67161C.1.pep
VQRKNALRSRRNSCEVARVDVEEVVDRTGSTFSSSCVLLAVLPCRSAPQTSSASTGSITRASKARRTPIRIPIRSSCIFGCNPKTPFRSTRQQRPLAERIDPPDIHKDHIG

SEQ ID NO: 168670 - protein, 95 aa, Oryza sativa
  Clone ID: PAT_MRT4530_67162C.1.pep
MAGPRVVEARGVGRLNGRRSSPTASPIDEAAPSDWFKGTENPPLQEHYKGVCFSAQKGGQDLQSLWFQEYYGFSLAICSSHLVHRQGKKSYMQPI

SEQ ID NO: 168671 - protein, 111 aa, Oryza sativa
  Clone ID: PAT_MRT4530_67163C.1.pep
AQRKKTLRSRRNSREVARVDVEEVVDRTGSTLSSSCVLLAVLPCRSAPQTSGASTGSITRTSKACRTPIRIPIRSSYILGCNPKTPFRSTRQQWPLAERIDPPGIHKDHIG

SEQ ID NO: 168672 - protein, 111 aa, Oryza sativa
  Clone ID: PAT_MRT4530_67164C.1.pep
VQRKKTLRSRRNSREVARVDVEEVVDRTGSTFSSSCVLLAVLPRRSAPQTSGASTGSITRVSKARRTPIRILIRSSYILGCNPKTPFRSTRQQRPLAERIDPPGIHKDHIG

SEQ ID NO: 168673 - protein, 146 aa, Oryza sativa
  Clone ID: PAT_MRT4530_67165C.1.pep
MVFIGKYPRTAGAVGRRELGEPPLLATNSSSPPPLLPSHRVDGGVDGVGVSTVQDNRNGGVAASPPTSPPPPPLPCPSSAASSPSSPPHPRALLLRPCGGQVDGGVDGVGVGSWVDGGVGGLGVLVEGISVSQVDGGGRWVEEEVR

SEQ ID NO: 168674 - protein, 67 aa, Oryza sativa
  Clone ID: PAT_MRT4530_67166C.1.pep
PGPRTLRLSFKRKYGYFFPFPFNKEVLYVPPLISICCIIRRGYFRPPQPLLLKNRTRSCSFFNTRLI

SEQ ID NO: 168675 - protein, 1893 aa, Oryza sativa
  Clone ID: PAT_MRT4530_67167C.1.pep
MAEQAKAHNLSPSVSGDDGEPNPRRRARTPPPPPRQSPRREEALERVEGSATSTSTGDGEGRRDGERRLLVYGDGSTPQGALQAAGALLRHPPIVPDPESPAQRWLDDVANLVMTARQRLDTGGRSSATKTSGTATTGSTSSRRRARRAAAAVRHSAATPSSAPPTREDLRGGPDARISIERRRNGRRATHATEGASSSGVSPQHGRGDQPSVPPVGGVGCRAFVASLRNVRWPPRFRPTIAEKYDGSVNPAEFLQVYTTGIEAAGGDDRVMANFFPMALKGQARGWLMNLPPASVHSWEDLCQQFTMNFQGTYPRPGEEADLHAVQRRDDESLRSYIQRFCQVRNTIPCIPAHAVIYAFRGGVRHNRMLEKIASKEPQTTAELFQLADRVARKEEAWTWNPSGSGVAASAAPGSAARTWRRDRRRKKRSAHSDDEGHFLAVEGASRATRKGRPASDKKKEAGAPSRERPTGKWCIVHNTSLHDLADCRAVKSLAERTRNEAKQKAPAEDIDDGDDDLGFQEPGATIATVDGGACAHVSRRSLKAMKRELLAAAPTHEATRRARWSEVALTFDQTDHPPCVARGGQIAMVVSPTVCNVKLGRVLIDGGAALNILSPAAFDAIKAPGMVLRPSQPIIGVTPGHTWPLGHIDLPVTFGGSANFRTERVNFDVADLSLPYNTVLGRPALVKFMAAVHYAYLQMKMPGPGGPISVHGDLKVALACMEQRADHLTAASKPEGGDERLGTSAPAAPRQRIVTCDEVPEDALVSFLRANADVFAWRPADMPGVPREVIEHRLAVRSGARPVRQKVRRQAPERQAFIREEVARLLEAGFIREVIHPEWLANPVVVPNANGKLRMCIDYTDLNKACPKDPYPLPRIDQIVDSTAGCNLLCFLDAYSGYHQIRMAREDEEKTAFITPIGTYCYMTMPFGLKNAGPTFQRTTRISLGSQIGRNVEAYVDDLVVKTRNQETLLSDLAETFESLRSARIKLNPDKCVFGVPAGKLLGFLVSARGIEANPEKIRAIERMRPPSKLRDVQCVTGCMAALSRFISRLGEKALPLFKLLKHSGPFTWTEEAERALTQLKAYLSSPPVLVAPEPNEPLLLYLAATPQVVSAALVVERDEDNPHSAHPHPVLAWPGREQGGEAPKPNGGPRPPTIGAGPLPACQTVPGAPDPQDGPGATAGRPHLSPSDPEANPVPTRPGREQGEEAPEPNGGLRPLTTGVGPLPACPTTPGAPDPQDGPEATVGRPPLSSSDPEVVGTEDECAPRGRLDKERPRDVAPSEEDRPHRKVQRPVYFVSEVLRDAKTRYPQAQKMLYAILMASRKLHHYFQVHRVTVVTSYPLAQILHNREGTGRVVKWAIELSEFDLHFEPRHAIKSQDLADFVAEWTPAPEPVSVPEASSGPSQLPHTAHWVMQFDGSLSLQGAGAGVTLTSPSGDVLRYLVRLDFRATNNMAEYEGLLAGLRVAAGLGIRRLLVLGDSQLVVNQIQAYLTDKTLPEDHEGSERVQRISKRYVLIEGTLYRRATNGILLKCIPREQGVELLADIHEGECGAHSASRTLVGKVFRQGFYWPTALNDAVDLVRRCRACQFHAKQIHQPAQALQIIPLSWPFAVWGLDILGPFRRAPGGFEYLYVAIDKFTKWPEAYPVVKIDKHSALKFIKGITSRFGVPNRIITDNGTQFTSELFGDYCEDMGIKLCFASPAHPRSNGQVERANAEILRGLKTKTFNILKKHGDSWIEELPAVLWANRTTPSRATGETPFFLVYGAEAVLPSELTLRSPRATMYCEADQDQLRRDDLDYLEERRRRAALRAARYQQSLRRYHQRHVRARSLCVDDLVLHRVQTRAGLSKLSPMWEGPYRVIGVPRPGSVRLAMGDGTELPNPWNIEHLRRFYP

SEQ ID NO: 168676 - protein, 65 aa, Oryza sativa
  Clone ID: PAT_MRT4530_67168C.1.pep
LPPPPAPSPASLPPSLRAAPPDPPPSPSHSRTRGRQSRHRCGGCVATIRRTLTVRPPPHPTASLL

SEQ ID NO: 168677 - protein, 1972 aa, Oryza sativa
  Clone ID: PAT_MRT4530_67169C.1.pep
MAEQAKAHNLSPSVSGDDGEPNPRRRARTPPPPPRQSPSREEALERVEGSVTSTSTGDGEGQRDGERRLLVYGDGSTPQGALQAAGALLRHPPIVPDLESPAQRWLDDVANLVMTARQRLGAGERSTATKTSGAATTGSVSSRRRARRAAAVARHSAATPSSAPPTREDLRRGPDARISIEHRRNGRRAAHATEGASSSGVSPRHGHGDQPSVPPVGGVGCRAFVASLRNVRWPPRFRPTIAEKYDGSVNPAEFLQVYTTGIEAAGGDDRVMANFFPMALKGQARGWLMNLPPASVHSWEDLCQQFTMNFQGTYPRPGEEADLHAVQRRDDESLRSYIQRFCQVRNTIPCIPAHEVIYAFRGGVRHNRMLEKIASKEPQTTAELFQLADRVARKEEAWTWNPSGSGVAASAAPGSAARTGRRDRRRKKRSAHSDDEGHVLAVEGAPRATRKGRPASDKKKEASAPSRECPTGKWCTVHNTSLHDLADCRAVKSLAERTRKWEEERRQERREGKSPAVPSGNRRSEAKQKAPAEDIDDGDDDLGFQEPGATIATLDGGACAHFSRRSLKAMKRELLAAAPTHEATRRARWSEVALTFDQTDHPPCVAQGGQIAMVVSPTVCNVKLGRVLIDGGAALNILSPAAFDAIKAPGMVLRPSQPIIGVTPPHTWPLGHIDLPVTLGGSANFRTERVNFDVADLSLPYNAVLGRPALVKFMAAVHYAYLQMKMPGPGGPISVHGDLKVALACMERRADHLTAASKPEGGDERLGTSAPAAPRQRIVTCDEVPEDALVSFLRANADVFAWRPADMPGVPREVIEHRLAVRSGARPVRQKVRRQAPERQAFIREEVARLLEAGFIREVIHPEWLANPVVVPKANGKLRMCIDYTDLNKACPKDPYPLPRIDQIVDSTAGCDLLCFLDAYSGYHQIRMAREDEEKTAFITPIGTYCYTTMPFGLKNAGPTFQRTTRISLGSQIGRNVEAYVDDLVVKTRNQETLLLDLAETFESLRSARIKLNPDKCVFGVPAGKLLGFLVSARGIEANPEKIRAIERMRPPSKLRDVQCVTGCMAALSRFISRLGEKALPLFKLLKRSGPFIWTEEAERALTQLKAYLSSPPVLVAPEPNEPLLLYLAATPQVTVPGAPDPQEGPRATAGRPHLSPSDPEANPVPTRPGREQGEEAPEPNGGLRPLTTGVGPLPACPTTPGGPDPQDGPEATVGRPPLSSSDPEVVGTEDECTPRGRSDKERPRDVAPSEEDRPHRKVQRPVYFVSEALRDAKTRYPQAQKMLYAILMASRKLRHYFQAHRVTVVTSYPLGQILHNREGTGRVVKWAIELSEFDLHFEPRHAIKSQALADFVAEWTPAPEPVSVPEASSGPSQPPHTTHWVMQFDGSLSLQGAGAGVTLTSPSGDVLRYLVRLDFRATNNMAEYEGLLAGLRVAAGLGIRRLLVLGDSQLVVNQVCKEYRCSDPQMDAYVRQVRRMERHFDGIELRHVPRRGNTVADELSRLASSRAQTPLGAFEERLAQPSARPDPLGETDAPDRPPMPVGVQASGPEGSAPSSLRLIAWIAEIQAYLTDKTLPKDREGSERVQRISKRYVLVEGTLYRRAANGILLKCIPREQGVELLADIHEGECGAHSASRTLVGKAFRQGFYWPTALNDAVDLVRRCRACQFHAKQIHQPAQALQIIPLSWPFAVWGLDILGPFRRAPGGFEYLYVAIDKFTKWPEAYPVVKIDKHSALKFIKGITARFGVPNRIITDNGTQFTSELFGDYCEDMGIKLCFASPAHPRSNGQVERANAEILRGLKTKTFNILKKHGDSWIEELPAVLWANRTTPSRATGETPFFLVYGAEAVLPSELTLRSPRATMYCEADQDQLRRDDLDYLEERRRRAALRAARYQQSLRRYHQRHVRARSLCVDDLVLCRVQTRAGLSKLSPMWEGPYRVIGVPRPGSVRLATGDGTELPNPWNIEHLRRFYP

SEQ ID NO: 168678 - protein, 1665 aa, Oryza sativa
  Clone ID: PAT_MRT4530_6716C.1.pep
MAEKQAPLPSSPGSVKGKLPKPGLTDIIDDNVLPIDPEKFTPDNKQEFEAMMQQARDQYLSSFMQTRKGTLVQKYKLKLVADSPGTGSSKDREVKQAPDGSAQPNNKGATGGSIGNQGDNPQEVHGAPGDAAQGPQGGNLNQNIELAQDFFNNFQDWVDYAVHHALINQSGVLVNTMSNMNKTIPLIQPVMVPEHLVRNIQPNLHNYQGGNLSYQYQPPSPQAQYQPAGSAQQQFAHQFGQFEPMQQQPQGAAQQRPWADVIADVMREQFGLRPKETGSLYRQPYPEWFERVPLPNRFKIPDFSKFSGQEGVSTYEHISRYLAQCGEASAVDALRVRMFRLSLSGSAFTWFSSLPYGSVNSWADLEKQFHSYFYNGVHEMKLSDLTAIKQRYDEPVHEYIQRFREVRNKCFSLSLTDAQLADLAFQGMIPPIREKFSSEDFNSLSHLIQKVTLHEHRSADVRRSSRKVNHVCPYTYGSDDEDDDSEIAAVEWVRSKKVAIEGGKIKFDDSKKPMKVDGNPFPDNMVHTASQAAGGAKIINKYQRKYDKQQARRYEENNNGFDPHWDCEFFRFFCNEGMRLPSIENCPGCSDVIESSSRPHNQGDRPRQTRLPVHQRLGPMSQDHGQEDEGTRKNQWCPSGIYTKNQKRRVQRLRSRERFQEVEEGINHRLRKPRPRQVWRVKNQAPTADDAAADEAKRLAKGKSVVTAPINMVFTLPAEFGINQADVDEVEEESAKLVLSPEQAVFEKPEGTENRHIKPLYVNGYVNGKPMSKMMVDGGAAVNLMPYATFRKLGRNAEDLIKTNMVLKDFGGNPSETKGVLNVELTVGSKTIPTTFFVIDGKGSYSLLLGRYWIHANCCIPSTMHQCLIQWQGDKIEVVPADSQSKMENPSYYFEGVVEGSDVYAKDTVDDLDDKQGQGFMSDDDLEEIDIGPGDQPRPTFISKGLSSEFRTKLIELLKEFRDCFAWEYYEMPGLSRSIVEHRLPIKTGVRPHQQPPRRCKADMLESVKAEIKRLYDAGFIRPCRYAEWVSSIVPVIKKNGKVRVCIDFRDLNKATPKDEYPMPVADQLVDAASGNKILSFMDGNAELDDHIADLRKVFERTRKYGLKMNPTKCAFGVSAGQFLGFLVHERGIEAIKGQAIADFIVEHHDDSIGSVEIAPWTLFFDGSVRTDGCGIDLVIISPRGACFEFAYTIKPYATNNQAECEAVLKGLQLLKEVEADTIEIMGDSLLVISQLAGEYECKNDTLIVYNEKCLELMKEFRLVTLKHVSREQNLEANDLAQGARADDWRYDVHQYLSNPSQSASRKLRYKALKYTLLGDELYYRTIDGVLLKCLSADQAKVAIGEVHEGICGTHQSAHKMKWLLRRTGYFWLTMLEDCFRYYKGCQDCQKFGAIQRAPASAMNPIIKPWPFRGWGIDMIGMINPPSSKGHKYILVATDYFTKWVEAIPLKKVDSGDAIQFVQEHIIYRFGLPQTITMDQGSIFVSDEFVQFADSMGIKLLNSSPYYAQANGQAEASNKSLIKLIKRKISDYPRQWHTRLAEAFWSYRMACHGSIQVPPYKLVYGHEAVLPWEVRIGSRQTELQNDLTADEYYNLMADEREDLVQSRLRALAKVTKDKERVARHYNKKVVPKDFSEGELVWKLILLIGTRDNKFDKWSPNWGGPF

SEQ ID NO: 168679 - protein, 149 aa, Oryza sativa
  unsure (1)..(149): unsure at all Xaa locations
  Clone ID: PAT_MRT4530_67170C.1.pep
MTTMTGGICSSGCGCSPSLASPLLLLLLLPAWWRRAPGRRRRRDGGRRGRGRTRASAPRRRARTCPTATARSPTPSRRRRRRACPGHGSPRPPAXNRDGLRRPGPPTPARRVPEEETPPXRRRRPPLAPPPTPPRAGCPTARATPAPPP

SEQ ID NO: 168680 - protein, 80 aa, Oryza sativa
  Clone ID: PAT_MRT4530_67171C.1.pep
LAYLSALTADWTALSSQVRLPMCVRVATAPAPARVSVLPASNKLGDRLRMQATYNVKLITPDGEAALYVTYDRYILDPRA

SEQ ID NO: 168681 - protein, 1941 aa, Oryza sativa
  Clone ID: PAT_MRT4530_67172C.1.pep
MAEQAKAHNLSPSVSGDDGEPNPRRRARTPPPPPRQSPRREEALERVEGSATSTSTGDGEGRRDGERRLLVYGDDSMPQGALQAAGALLRHPPIVLDPESPAQRWLDDVANLVMTARQRLGAGGRSSATKTSGAATTGSVSSRRRARRVAAVARHSAATPSSAPPTQEDLRGGPDARISIERRRNGRRAAHATEGASSSGVSHQHGRGDQPSVPPVGGVGCRAFVASLRNVRWPPRFRPTIAEKYDGSVNPAEFLQVYTTGIKAAGGDDRVMANFFPMALKGQARGWLMNLPPASVHSWEDLCQQFTMNFQGTYPRPGEEADLHAVQRRDDESLRSYIQRFCQVRNTIPCIPAHAVIYAFRGGVRHNRMLEKIASKEPQTTAELFQLADRVARKEEAWTWNPSGSGVAASAAPGSAARTGRRDRRRKKRSAHSDDKGHVLAVEGASRATRKGRPASDKKKEAGAPSRERPTGKWCIIHNTSLHDLADCRAVKSLAERTRKWEEERRQERREGKSPAVPSGNRRSEAKQKAPAEDIDDGDDDLGFQEPGGTIATVDGGACAHVSRRSLKAMKRELLAAAPTHEATRRAWWSEVALTFDQIDHPPCVARGGQIAMVVSPTVCNVKLGRVLIDGGAALNILSPAVFDAIKAPGMVLRPSQPIIGVTPGHTWPLGHIDLPVTFGGSANFRMERVNFDVADLSLPYNAVLGRPALVKFMAAVHYAYLQMKMPGPGGPISVHGDLKVALACMEQRADHLTAASKPEGGDERLGTSAPAAPRQRIVTCDEVPEDALVSFLRANADVFAWRPADMPGVPREVIEHRLAVRSGARPVRQKVRWQAPERQAFIREEVARLLEAGFIREVIHPEWLANPVVVPKANGKLRMCIDYTDLNKACPKDPYPLPRIDQIVDSTAGQIGRNVEAYVDDLVVKTRNQETLLSDLAETFESLRSARIKLNPDKCVFGVPAGKLLGKLRDVQCVTGCMAALSRFISRLGEKALPLFKLLKRSGPFTWMEEAERALTQLKAYLSSPPVLVAPEPNEPLLLYLAATPQVVSAALVVERDKDNPHSAHPHPVLAWPGREQGGEAPEPNGGPRPPTTGAGPLPACQTVPGAPDPQDGPRATAGRPHLSPSDPEANPVPTRPGREQGEEAPEPNGGLRPLTTGVGPLPACPTTPGAPDPQDGPEATVGRPPLSSSDPEVVGTEDECTPRGRLDKERPRDVAPSEEDRPHRKVQRPVYFVSEALRDAKTRYPQAQKMLYAILMASRKLRHYFQAHRVTVVTSYPLGQILHNREGTGRVVKWAIELSEFDLHFEPRHAIKSQALADFVAEWTPAPEPVSVPEASSGPSQLPHTAHWVMQFDGSLSLQGAGAGVTLTSPSGDVLRYLVRLDFRATNNMAEYEGLLAGLRVVAGLGIRRLLVLGDSQLVVNQVYKEYRCSDPQMDAYVRQVRRMERHFDGIELRHVPRRDNTVADELSRLASSRAQTPPGAFEERLAQPSARPDPLGETDAPDRPPMPVGVQASGPEGSAPSSLRLIAWIAEIQAYLTDKTLPEDREGSERVQRISKRYVLVEGTLYRRAANGILLKCIPREQGVELLADIHEGECGAHSASRTLVGKAFQQGFYWPTALNDAVDLVRRCRACQFHAKQIHQPAQALQIIPLSWPFAVWRLDILGPFRRAPGGFEYLYVAIDKFTKWPEAYPVVKIDKHSALKFIKGITARFGVPNCIITDNGTQFTSELFGDYCEDMGIKLCFASPAHPRSNGQVERANAEILRGLKTKTFNILKKHGDSWIEELPAVLWANRTTPSRATGETPFFLVYGAEAVLPSELTLRSPRATMYCEADQDQLRRDDLDYLEERRRRAALRAARYQQSLRRYHQRHVRARSLCVDDLVLRRVQTRAGLSKISPMWEGPYRVIGVPWPGSVRLATGDGTELPNPWNIEHLRRFYP

SEQ ID NO: 168682 - protein, 1957 aa, Oryza sativa
  unsure (1)..(1957): unsure at all Xaa locations
  Clone ID: PAT_MRT4530_67173C.1.pep
MAEQANAPNLSPSISGDDGEPNPRRRARTPPPPPRQSPRREEALKRVEGSATSTSTGDGEGRRDGERRILVYGDGSTPQGTLQAAGALLRHPPVVPDPESPAQRWLDDVAKLVMTARQRLDAGGRTSATKTSGTAATGSASSRRRARRAAAAVRHSAATPSSTPPTREDPRGGPDVRTSIERRRNGRRAAHATEGASSSRVSPQHGRGDQPSVPLVGGVGCRAFVASLRNVRWPPRFRPTIAEKYDGSVNPAEFLQVYTTGIEAAGGDDRVMANFLPMALKGQARGWLMNLPPASVHSWEDLCQQFTMNFQGTYPRPGEEADLHAVQRRDDESLRSYIQRFCQVRNTIPCIPAHAVIYAFRGGVRHNRMLEKIASKEPQTTAELFQLADRVARKEEAWTRNPSGSGVAASAAPGSAAQTGRRDRRRKKRSAHSDNEGHVLAVEGASRATRKGRPASDKKKKASAPSRERPTGKWCTVHNTSLHDLADCRAVKSLAERTRKWEEERRQERREGKSPAVPSGNRRSEAKQKAPAEDIDDGDDDLGFQEPGATIATVDGGACAHVSRRSLKAMKRELLAATPTHEATRRARWSEVALTFDQTDHPLCVARGGQIAMVVSPTICNVKLRRVLIDGGAALNILSPAAFDAIKAPGMVLRPSQPIIGVTPGHTWPLGHIDLPVTFGGSANFRTELVSFDVADLSLPYNAVLGRPALVKFMAAVHYAYLQMKMPGHGDLKVALACMEQRADHLAAASKPEGGDERLSTSVPAAPRQRMITCDEVPVKEVALGDGPPADMPGVPREVIEHRLAVRPGARPVRQKVRRQAPERQAFIREEVARLLEAGFIREVIHPEWMANPVVVPKANGKLRMCIDYTDLNKACPKDPYPLPRIDQIVDSTAECDLLCFLDAYSGYHQIRMAREDEEKTAFITPIGTYCYTTMPFGLNNAGPTFQRTTRISLGNQIGRNVEAYVDDLVVKTRNQETLLSDLAETFESLRSARMKLNPDKCVFGVPAGKLLGFLVSARGIEANPEKIRAIERMRPPXKLRDVQCVTGCXLSSPPVLVAPEPNEPLLLYLAATPQVVSAALVVERDEENPHSAHPHPVLAWPGREQGGEAPEPNGGPRPPTTGAGSLPACQTVPGAPDPQDGPAATAGRPHLSSSDPEANPVLTRPGREQGEEAPEPNGGLRPLTIGVGLSPDSPEATVGRPPLSSSDPEVVGTEDKCAPRGHLDEERPWDAAPGEEDRPHRKVQRPVYFVSEALRDAKTRYPQAQKMLYAILMASRKLRHYFQAHRVTVVTSYPLGQILHNREGTGRVVKWAIELSEFDLHFEPRHAIKSQALADFVAEWTPAPEPVSIPEASSDPSQLPHTAHWVMQFDGSLSLQGVGAGVTLTSPSRDVLRYLVRLDFRATNNMAEYEGLLAGLRVAAGLGIRRLLVLGDSQLVVNQVCKEYRCSDPQMDAYVRQVRRKERYFDGIELRHVPRRDNMVADELSRLASSRAQTPPGAFEERLAQPSARPDPLGETDAPDRPPRPVGVQASGPEGSVPSSLRLIAWITEIQAYLTDKTLPEDREGSERVQRISKRYVLVEGTLYRRAANGILLKCIPREQGVELLNDIHEGECGAHSASRTLVGKGFRQVFYWPTALNDAVDLVRRCRACQFHAKRINQPAQALQNIPLSWPFAVWGLDILGPFRRALGGFEYLYVAIDKFTKWPEAYPVIKIDKHSALKFIKGITARFGVPNRIITDNGTQFTSELFGDYCEDMGIKLCFASPAHPRSNGQVERANAEILRALKTKTFNILKKHGNSWIEELPAVLWANQTTPSRATGETPFFLVYGAEAVLPSELTLRSPRATMYCEADQDQLRRDDLDYLEERRRRAALRAARYQQSLRRYHQRHVWARSLCVDDLVLRRVQTRAGLSKLSPMWEGPYRVIGVPRPGSVRLATGYGTELPNPWNIEHLRRFYP

SEQ ID NO: 168683 - protein, 1014 aa, Oryza sativa
  Clone ID: PAT_MRT4530_67174C.1.pep
MPGVPREVIEHRLAVRSGARPVRQKVRRQAPERQAFIREEVARLLEAGFIREVIHPEWLANPVVVPKANGKLRMCIDYTDLNKACPKDPYPLPRIDQIVDSTAGQIGRNVEAYVDDLVVKTRNQETLLSDLAETFESLRSARIKLNPDKCVFGVPAGKLLGFLVSARGIEANPEKIRAIEQMRPPSKLRDVQCVTGCMAALSRFISRLGEKTLPLFKLLKRSGPFTWTEEAERALTQLKAYLSSPPVLVAPEPNEPLLLYLAATPQVTVPGAPDPQDGPRATAGRPHLSPSDPEANPVPTRPGRQQGEEAPEPNGGLRPLTAGVGPLPACPTTPGAPDPQDGPEATVGRPPLPSSDPEVVGTEDECTPQGRLDKERPRDVAPSEEDRPHRKVQRPVYFVSEALQDAKTRYPQAQKMLYAILMASRKLRHYFQAHRVTVVTSYPLGQILHNREGTGRVVKWAIELSEFDLHFEPRHAIKSQALADFVAEWTPAPEPVSVPEASSGPSQLPHTAHWVMQFDGSLSLQGAGAGVTLTSPSGDVLRYLVRLDFRATNNMAEYEGLLAGLRVAAGLGIRRLLVLGDSQLVVNQVCKEYRCSDPQMDAYVRQVRRMERHFDGIELRHVPRRDNTIADELSRLASSRAQTPPGAFEERLAQPSARPDPLGETDAPDRPPRPVGVQASGPEGSAPSSLRLIAWIAEIQAYLTDKTLPEDREGSERVQRISKRYVLVEGTLYRRAANGILLKCIPREQGVELLADIHEGECGAHSASRTLVGKAFRQGFYWPTALNDAVDLVRRCRACQFHAKQIHQSAQALQIIPLSWPFAVWGLDILGPFRRAPGGFEYLYVAIDKFTKWPEAYPVVKIDKHSALKFIKGITARFGVPNRIITDNGTQFTSELFGDYCEDMGIKLCFASPAHPRSNGQVERANAEILRGLKTKTFNILKKHGDSWIEELPAVLWANRITPSRATGETPFFLVYGAEAVLPSELTQKSPRATMYCEADQDQLRRDDLDYLEE

SEQ ID NO: 168684 - protein, 113 aa, Oryza sativa
  unsure (1)..(113): unsure at all Xaa locations
  Clone ID: PAT_MRT4530_67175C.1.pep
MPSYSDCLMALKQQTFHPYENRWPHQANCSLCNLTFQDXPNLFVQCAFTNRIWRLLRSXVNVGFPLPSDLNVDLADWRMASRRSFRDYLRKVFGTLFFFRDCLSKLYGCAALW

SEQ ID NO: 168685 - protein, 1987 aa, Oryza sativa
  Clone ID: PAT_MRT4530_67176C.1.pep
MAEQAKAHNLSPSVSGDEGEPNPRRRARTPPPPPRQSPRREEALERVEGSATSTSTGDGEGRRDGERRLLVYGDGSTPQGALQAAGALLRHPPIVPDPESPAQRWLDDVANLVMTARQRLGAGGRSSATKTSGAATTGSVSSRRRARRAAAVARHSAATPSSTPPTQEDLRGVPDARISIERRRNGRRAAHATEGASSSGVSHQHGRGDQPSVPPVGGVGCRAFVASLRNVHWPPRFRPTIAEKYDGSVNPVEFLQVYTTGIEAAGGDDRIMANFFPMALKGQARGWLMNLPPASVHSWEDLCQQFTMNFQGTYPRPGGGVRHNRMLEKIASKEPQTTAELFQHADRVARKEEAWTWNPSGSSVAASAAPGSAARTGRRDRRRKKRSAHSDDEGHVLAVEGVSRATRKGRPASDKKKEAGAPSRERPTGKWCIVHNTSLHDLADCRAVKTLAERTRKWEEERRQERREGKSPAVPSGNRRSEAKQKAPAEDIDDGDDDLGFQEPGATIATVDGGACAHVSRRSLKAMKRELLAAAPTHEATRRTRWSEVALTFDQTDHPPCVARGGQIEMVVSPTVCNVKLGRVLIDGGAALNILSPAAFDAIKAPGMGLRPSQPIIGVTPGHTWPLGPIDLPVTFGGSANFRTERVNFDVADLSLPYNAVLGRPALVKFMAAVHYAYLQMKMPGPGGPISVHGDLKVALACMEQRADHLTAASKPEGGDERLGTSAPAAPRQRIVTCDEVPVKEEDALVSFLRANADVFAWRPADMPGVPREVIEHRLAVRSGAMPVRQKVRRQAPERQAFIREEVARLLEAGFIREVIHPEWLANPVVVPKANGKLRMCIDYTDLNKACPKDPYPLPRIDQIVDSTAGCDLLCFLDAYSGYHQIRMAREDEEKTAFITPIGTYCYTTMPFGLNNAGPTFQRTTRISLGSQIGRNVEAYVDDLVVKTRNQETLLSDLAETFESLRSTRIKLNPDKCVFGVPAGKLLGFLVSTRGIEANPKKIRAIERMRPPSKLRDVQCVTGCMAALSRFISRLGEKALPLFKLLKRSGPFTWTEEAERALTQLKAYLSSPPVLVASEPNEPLLLYLAATPQVVSAALVVERDEDDPHSAHPHPVLAWPGREQGGEAPEPNSGPRPPTTGAGPLPACQTVPGAPDPQDGQRATAGRPHLSPSDPEDNPVPTRPGREQGEEAPEPNGGLRPLTTGVGPLPACPTTPGAPDPQDGPEATVGRPPLSSSDPEVVGTEDECAPRGRLDKERPRDVAPSEEDRPHRKVQRPVYFVSEALRDAKTRYPQAQKMLYAILMASRKLRHYFQAHRVTVVTSYPLGQILHNREGTGRVVKWAIELSEFDLHFEPRHAIKSQALADFVAEWTPALEPVSVPEASSGPSQLPHTAHWVMQFDGSLSLQGAGAGVTLTSPSGDVLRYLVRLDFRATNNMAEYEGLLAGLRVAAGLGIRRLLVLGDSQLVVNQVCKEYRCSDPQMDAYVRQVRRMERHFDGIELRHVPRRDNTVADELSRLASSRAQTPPGAFEERLAQPSARPDPLEETDAPDRPPRPVGVQASGPEGSAPSSLRLIAWIAEIQAYLTDKTLPEDREGSERVQRISKRYVLVEGTLYRRAANGILLKCIPREQGVELLADIHEGECGAHSASRTLVGKAFRQGFYWPTALNDAVDLVRRCRACQFHAKQIHQPAQALQIIPLSWPFAVWGLDILGPFRRAPGGFEYLYVAIDKFTKWPEAYPVVKIDKHSALKFIKGITARFGVPNRIITDNGTQFTSELFGDYCEDMGIKLCFASPAHPRSNGQVERANAEILRGLKTKTFNILKKHGDSWIEELPAVLWANRTTPSRATGETPFFLVYGAEAVLPSELTLRSPRATMYCEADQDQLRRDDLDYLEERRWRAALRAARYQQSLRRYHQRHVRARSLCVDDLVLRRVQTRAGLSKLSPMWEGPYRVIGVPRPGSVRLATGDGTELPNPWNIEHLRRFYP

SEQ ID NO: 168686 - protein, 1650 aa, Oryza sativa
  Clone ID: PAT_MRT4530_67177C.1.pep
MTARQRLGAGGRSSATKTSGAATTGSVSSRRRARRAAAVARHSAATPSSTPPTQEDLRGGPDARISIERRRNGRRAAHATEGASSSGVSHQHGRGDQPSVPPVGGVGCRAFVASLRNVRWPPRFQPTIAEKYDGSVNPAEFLQVYTTGIEAAGGDDRVMANFFPMALKGQARGWLMNLPPASVHSWEDLCQQFTMNFQGTYPRPGGGVRHNRMLEKIASKEPQTTAELFQLADRVARKEEAWTWNPSGSGVAASAAPGSDARTGRRDRRRKKRSAHSDDEGHVLAVEGASRATRKGRPASDKKEAGAPSRERPTGKWCIVHNTSLHDLADCRAVKSLAERTRKWEEERRQERREGKSPAVPSGNRRSEAKQKAPAEDIDDGDDDLGFQEPGATIATVDGGACAHVSRRSLKAMKRELLAAAPTHEATRRARWSEVALTFDQTDHPPCVARGGQIAMVVSPTVCNVKLGRVLIDGGAALNILSPAAFDAIKAPGMVLRPSQPIIGVTPGHTWPLGHINLPVTFGGSANFRTERVNFDVADLSLPYNAVLGRPALVKFMAAVHYAYLQMKMPGPGGPISVHGDLKVALACMEQRTDHLTAASKPEGGDERLGTSAPAAPRQRIVTCDEVPEDALVSFLRANADVFAWRPADMPGVPREMIEHRLAVRSGARPVRQKVRRQAPERQAFIREEVARLLEAGFIREVIHPEWLANPVVVPKANGKLRMCIDYTDLNKACPKDPYPLPRIDQIVDSTAGCDLLCFLDAYSGYHQIRMAREDEEKTAFITPIGTYCYTTMPFGLKNAGPTFQRTTRISLGSQIGRNVEAYVDDLVVKTHNQETLLSDLAETFESLRSARIKLNPDKCVFGVPAGKLLGFLVSARGIEANPEKIRAIERMRPPSKLRDVQCVTGCMAALSRFISRLGEKALPLFKLLKSSGPFTWTEEAERALTQLKAYLSSPPVLVAPEPNESLLLYLAATPQVVSAALVVERDEDNPHSAHPHPVLAWPGREQRGEAPEPNGGPRPPTTGAGPLPACQTVPGAPDPQDGPRATAGRPHLSPSNPEANPVPTRPGREQGEEAPEPNGGLRPLTTGVGPLPACPTTPGAPDPQDGPEATVGRPPLSSSDPEVVGTEDKCTPRGRLDKERPRDVAPSEEDRPHRKVQRPIYFVSEALRDAKTRYPQAQKMLYAILMASRKLRHYFQAHRVTVVTSYPLGQILHNREGTGRVVKWAIELSEFDLHFEPRHAIKSQALADFVAEWTPAPEPVSVPEASSGPSQLPHTAHWVMQFDGSLSLQGAGAGVTLTSPSGDVLRYLVRLDFRATNNMAEYEGLLAGLRVAAGLGIRRLLVLGDSQLVVNQVYKTLPEDREGSERVQRISKRYVLVEGTLYRRAANGILLKCIPREQGVELLADIHEGECGAHSASRTLVGKAFRQGFYWPTALNDAVDLVRRCRACQFHAKQIHQPAQTLQIIPLSWPFAVWGLDILGPFRRAPGGFEYLYVAIDKFTKWPEAYPVVKIDKHSALKFIKGITARFGVPNRIITDNGTQFTSELFGDYCEDMGIKLCFASPAHPRSNGQVERANAEILRGLKTKTFNILKKHGDSWIEELPAVLWANRTTPSRATGETPFFLVYGAEAVLPSELTLRSPRATMYCEAD

SEQ ID NO: 168687 - protein, 203 aa, Oryza sativa
  Clone ID: PAT_MRT4530_67178C.1.pep
MYSTASRITRSSKPAMSSSAGSRRGGRSVRRRWVLGGGFPIGGGGASCRGRPSPPESGCTGVFGSGGGGGAGHCLPDTPPSSSEIISGLVDDLPADDDTPPESGPTWPPGPGGGGPRPGGLLSTPPPPPSASGVTRPCGRGDGGALPDLPPSTSTAPPTTTPSLGNISGGSTCRRRASSSGARRTTGRRSSSSSFGEDEDEPA

SEQ ID NO: 168688 - protein, 1990 aa, Oryza sativa
  Clone ID: PAT_MRT4530_67179C.1.pep
MAEQAKAHNLSPSVSGDDGEPNPRRRARTPPPPPRQSPRREEALERVEGSATSTSTGDGGGRRDGERRLLVYGDGSTPQGALQAAGALLRHPPVVPDPESPAQRWLDDVANLVMTARQRLGAGGRSSATKTSGAATTGSVSSRRRARRAAAVARHSAATPSSAPPTQEDLRGGPDARISIERRRNGRRAAHATEGASSSGVSHQHGRGDQPSVPPVGGVGCRAFVASLRNVRWPPRFRPTIAEKYDGSVNPAEFLQVYTTGIEAAGGDDRVMANFFPMALKGQARGWLMNLPPASVHSWEDLCQQFTMNFQGTYPRPGEEADLHAVQRRDDESLRSYIQRFCQVRNTIPCIPAHAVIYAFRGGVRHNRMLEKIASKEPQTTAELFQLADRVARKEEAWTWNPSGSGVAASAAPGSAARTGRRDRRRKKRSAHSDDEGHVLAVEGASRATRKGRPASDKKKEAGAPSRERPTGKWCIVHNTSLHDLADCRAVKSLAERTRKWEEERRQERREGKSPAVPSGNRRSEAKQKAPAEDIDDGDDDLGFQEPGATIATVDGGACAHVSRRSLKAMKRELLVAAPTHEATRRARWSEVALTFDQTDHPPCVAREGQIAMVVSPTVCNVKLGRVLIDGGAALNILSPAAFDAIKAPGMVLRPSQPIIGVTPGHTWPLGHIDLPVTFGGSANFRTERVNFDVADLSLPYNAVLGRPALRADHLAAASKPEGGDERLGTSVPAAPRQRIVTCDEVPEDALVSFLRANADVFAWRPADMPGVPREVIEHRLAVRSGTRPVRQKVRRQAPERQAFIREEVARLLEAGFIREVIHPEWLANPVVVPKANGKLRMCIDYTDLNKACPKDPYPLPRIDQIVDSTAGCDLLCFLDAYSGYHQIRMAREDEEKTAFITPIGTYCYTTMPFGLKNAGPTFQRTTRISLGSQIGRNVEAYVDDLVVKTRNQETLLSDLAETFESLRSARIKLNPDKCVFGVPAGKLLGYLVSARGIEANPEKIRAIERMRPPPSKLRDVQCVTGCMAALSRFISRLGEKALPLFKLLKRSGPFTWTEEAERALTQLKAYLSSPPVLVAPEPNEPLLLYLAATPQVVSAALVVERDENNPHSAHPHPVLAWPGREQGGEAPEPNGGPRPPTTGAGPLPACQTVPGAPDPQDGPRATAGRPHLSPSDPEANPVPIRPGREQGEEAPEPNGGLRPLTTGVGPLPACPTTPGAPDPQDGPEATVGRPPLSSSDPEVVGTEDECAPRGRLGEERPRDAAPSEEDRPHRKVQRPVYFVSEALRDAKTRYPQAQKMLYAILMASRKLRHYFQAHRVTVVTSYPLGQILHNREGTGRVVKWAIELSEFDLHFQPRHAIKSQALADFVAEWTPAPEPVSVPEASSGPSQLPHIAHWVMQFDGSLSLQGAGAGVTLTSPSGDVLRYLVRLDFRATNNMAEYEGLLAGLRVAAGLGIRRLLVLGDSQLVVNQVCKEYRCSDPQMDAYVRQVRRMERHFDGIELRHVPRRDNTVADELSRLASSRAQTPPGAFEERVAQPSARPDPLGETDAPDRPPMPVGVQASGPEGSAPSSLRLIAWIAEIQAYLTDKTLPEDREGSERVQRISKRYVLVEGTLYRRAANGILLKCIPREQGVELLANIHEGECGAHSASRTLVGKAFRQGFYWPTALNDAVDLVRRCRACQFHAKQIHQPAQALQIIPLSWPFAVWGLDILGPFRRAPGGFEYLYVAIDKFTKWPEAYPVVKIDKHSALKFIKGITARFGVPNRIITDNGTQFTSELFGDYCEDMGIKLCFASPAHPRSNGQVERANAEILRGLKTKTFNILKKHDDSWIEELPAVLWANRTTPSRATGETPFFLVYGAEAVLPSELTLRSPRATMYCEADQDQLRRDDLDYLEERRRRAALRAARYQQSLRRYHQRHVRARSLCVDDLVLYRVQTRAGLSKLSPMWEGPYRVIGVPRPGSVRLATGDGTELPNPWNIEHLRRFYP

SEQ ID NO: 168689 - protein, 325 aa, Oryza sativa
  Clone ID: PAT_MRT4530_6717C.1.pep
MDASAWFATPSGQPVQHAANQVVPEHLVHHVQPDGTVIPQVIPEHLEQFGLRPKDAGNLYRQPYPEWFERVPLPNRFKVPDFSKFSGQDSASTYEHVSRFLAQCGEASAVDALRVSQWVKNSGKEERYDFDITKADKIFDLLFREKQIQLPTDHTIPSADELGKKRYCKWHNSGSHTTNDCKVFKQQIQAAIKGGKIKFDDSKRPMKVDGNPVNMVHTACRTADGGRAKGFQVNSAKIINKYQRKYDKQQEKHYEEDDDGFDPHWGCEFFRFCWNEGMRLPSIEDYPGCSDIAESSSRSFGRGNRLRQTRVPVHQRLGPVNQDRG

SEQ ID NO: 168690 - protein, 2015 aa, Oryza sativa
  unsure (1)..(2015): unsure at all Xaa locations
  Clone ID: PAT_MRT4530_67180C.1.pep
MAEQAKAHNLSPSVSGDDGELNPRRRARTPPPPPRQSPRREEALERVEGSATSTSTGDGEGRRDGERRLLVYGDGSTPQGALQAAGALLRHPPIVPDPESPAQRWLDDVANLVMTARQRLGAGGRSSATKTSGAATTGSVSSRRRARRAAAVARHSAATPSSAPPTQEDLRGGPDARISIERRRNGRRAAHATEGASSSGVSHQHGRGDQPSVPPVGGVGCRAFVASLRNVRWPPRFRPTIAEKYDGSVNPAEFLQVYTTGIEAAGGDDRVMANFFPMALKGQARGWLMNLPPASVHSWEDLCQQFTMNFQGTYPRPGEEADLHAVQRRDDESLRSYIQRFCQVRNTIPCIPAHAVIYAFRGGVRHNRILEKIASKEPQTTAELFQLADRVARKEEAWTWNPSGSGVAASAAPGSAARTGRRDRRRKKRSAHSDDEGHVLAVEGASRATRKGRPASDKKKEAGAPSRERPTGKWCIVHNTSLHDLADCRAVKSLAKRTRKWEEERRQERREGKSPAVPSGNRRSEAKQKASAEDIDDGDDDLGFQEPGATIATVDGGACAHVSRRSLKAMKRELLAAAPTHEATRRARWSEVALTFDQTDHPPCVARGGQIAMVVSPTVCNVKLGRVLIDGGAALNILSPAAFDAIKAPGMVLRPSQPIIGVTPGHNWPLGHIDLPVTFGGSANFRTERVNFDVVDLSLPYNAVLGRPALVKFMAAVHYAYLQMKMPGPGGPISVHGDLKVALACMEQRADHLTAASKPEGGDERLGTSAPAAPRQRIVTCDEVPVKEVALGDGPVSFLRANADVFAWRPADMPGVPREVIEHRLAVRSGARPVRQKVRRQAPERQAFIREEVARLLEAGFIHEVIHPEWLANPVVVPKANGKLRMCIDYTDXDSTAGCDLLCFLDAYSGYHQIRMAREDEEKTAFITPIGTYCYMTMPFGLKNAGPTFQRTTRISLGSQIGRNVEAYVDDLVVKTRNQETLLSDLAETFESLRSARIKLNPDKCVFGVPAGKLLGFLVSARGIEANPEKIRAIERMRPPXKLRDVQCVTGCMAALSRFISRLGEKALPLFKLLKRSGPFTWTEEAERALTQLKAYLSSPPVLVAPEPNEPLLLYLAATPQVVSAALVVERDEDNPHSAHPHPVLAWPGREQGGEAPEPNGGPRPPTTGAGPLPACQTVPGAPDPQDGPRATAGRPHLSPSDPEANPVPTRPGREQGEEAPEPNGGLRPLTTGVGPLPACPMTPGAPDPQDGPEATVGRPPLSSSDPEVVGTEDECTPRGRLDQEHPRDVAPSEEDRPHRKVQRPVYFVSEALRDAKTRYPQAQKMLYAILMASRKLRHYFQAHRVTVVTSYPLGQILHNREGTGRVVKWAIELSEFDLHFEPRHAIKSQALADFVAEWTPAPEPVSVPEASSGPSQLPHTAHWVMQFDGSLSLQGAGAGVTLTSPSGDVLRYLVRLDFRATNNMAEYEGLLAGLRVAAGLGIRRLLVLGDSQLVVNQVCKEYRCSDPQMDAYVRQVRRIERHFDGIELRHVPRRDNTVADELSRLASSRAQTPPGAFEERLAQPSARPDPLGETDAPDRPPMPVGVQASGPEGSAPSSLRLIAWIAEIQAYLTDKTLPEDREGSERVQRISKRYVLVERTLYRRAANGILLKCIPREQGVELLADIHEGECGSHSASRTLVGKAFRQGFYWPTALNDAVDLVRRCRACQFHAKQIHQPAQALQIIPLSWPFAVWGLDILGPFRRAPGGFEYLYVAIDKFTKWPEAYPVVKIDKHSALKFIKGITARFGVPNRIITDNGTQFTSELFGDYCEDMGIKLCFASPAHPRSNGQVERANAEILRGLKTKTFNILKKHGDSWIEELPAVLXANRTTPSRATGETPFFLVYGAEAVLPSELTLSSSRATMYCEADQDQLRRDDLDYLEERRRRAALRVARYQQSLRRYHQRHVRARSLCVDDLVLRRVQTRAGLSKLSPMWEGPYRVIGVPRPGSVRLATGDGTELPNAWNIEHLRRFYP

SEQ ID NO: 168691 - protein, 1827 aa, Oryza sativa
  unsure (1)..(1827): unsure at all Xaa locations
  Clone ID: PAT_MRT4530_67181C.1.pep
MTTRHRLGAGGRSSATKTSGAATTGYVSSRRRARRAAAVARHSAATPSSAPPTQEDLRGGPDARISIERRRNGRRAAHATEGASSSGVSRQHGRGDQPSVPPVGGVGCRAFVASLRNVRWPPRFRPTIAEKYDGSVNPAEFLQVYTTGIEAAGGDDRVMANFFPMALKGQARGWLMNLPPASVHSWEDLCQQFTMNFQGTYPRPXFCQVRNTIPCIPAHAVINAFXGGVRHNRMLEKIASKEPQTTAELFQLADRVARKEEAWTWNPSGSGVAASAAPGSAARTGRRDRRRKKRSAHSDDEGHVLAVEGASRATRKGRPASDKKKEAGAPSRERPTGKWCIVHNTSLHDLADCRAVKSLAERTRKWEEERRQERREGKSPAVPSGNRRSEAKQKAPAEDIDDGDDDLGFQEPGATIATVDGGACAHVSRRSLKAMKRELRAAAPTHEATRRARWSEVSLTFDQTDHPPCIARGGQIAMVVSPTVCNVKLGRVLIDGGAALNILSPAAFDAIKAPGMVLRPSQPIIGVTPGHTWPLGHIDLPVTFGGSANFRTERMKMPGPGGPISVHGDLKVTLSCMEQRADHLTAASKPEGGDERLGTSAPAAPRQRIVTCDEVPEDALVSFLRANADVFAWRPADMPGVPREVIEHRLAMRSGARPVRQKVRRQVPERQAFIREEVARLLEAGFIREVIHPEWLANPVVVPKANGKLRMCIDYTDLNKACPKDPYPLLRIDQIVDSTAGEDEEKTAFITPIGTYCYTTMPFGLKNAGPTFQRTTRISLGSQIGRNVEAYVDDLVVKTRNQETLLSDLAETFESLRSARIKLNPDKCVFGVPAGKLLGFLVSARGIEANPEKIRAIERMRPPSKLRDVQCVTGCMAALSRFISRLGEKALPLFKLLKRSGLFTWTEEAERALTQLKAYLSSPLVLVAPEPNEPLLLYLAATPQVVSAALVVERDEDNPHSAHPHPVLAWPRREQGGEAPEPNGGPRPPTTGAGPLPACQTVPGAPDPQDGPRATAGRPHLSPSDPEANPVPTRPGREQGEEAPEPNGGLRPLTTGVGPLPACPTTPGAPDPQDGPEATVGRPPLSSSDPEVVGTEDECTPRGRLDKERPRDVAPSEEDRPHRKVQWPVYFVSEALRDAKTRYPQAQKMLYAILMASRKLRHYFQAHRVTVVTSYPLGQILHNREGTGRVVKWAIELSEFDLHFEPCHAIKSQALADFVAEWTPAPEPVSVPEASSGPSQLPHTAHWGAGAGVTLTSPSGDVLRYLVRLDFRATNNMAEYEGLLAGLRVAAGLGIRRLLVLGDSQLVVNQVCKEYRCSDPQMDAYVRQVRRMERHFDGIELRHVPRRDNTVADELSRLASSRAQTPPGAFEERLVQPSARPDPLGETDAPDRPPMPVEVQASGPEGSAPSSLRLIAWIAEIQAYLTDKTLPEDCEGSERVQRISKRYVLVEGTLYRRAANGILLKCIPREQGVELLADIHEGECGAHSASRTLVGKAFRQGFYWPTALNDAVDLVRRCRACQFHAKQIHQPAQALQIIPLSWPFAVWGLDILGPFRRAPGGFEYLYVAIDKFTKWPEAYPVVKIDKHSALKFIKGITARFGVPNRIITDNGTQFTSELFGDYCEDMGIKLCFASPAHPRSNGQVERANAEILRGLKTKTFNILKKHGDSWIEELPAVLWANRTTPSRATGETPFFLVYGAEAVLPSELTLRSPRATMYCEADQDQLRRNDLDYLEERRRRAALRAARYQQSLRRYHQRHVRARSLCVDDLVLRRVQTRAGLSKLSPMWEGPYRVIGVPRPGSVQLATGDGTELPNPWNIEHLRRFYP

SEQ ID NO: 168692 - protein, 59 aa, Oryza sativa
  Clone ID: PAT_MRT4530_67182C.1.pep
RSIIGRPLIPDIIKLTNLRRKARRHVRISRHLRWSRSGVRSNNFNKPCSAQGISTWSIP

SEQ ID NO: 168693 - protein, 116 aa, Oryza sativa
  Clone ID: PAT_MRT4530_67183C.1.pep
APDGLYFSQAKKGTQGHIIRIGTTYKGGDWKTKGNLLSQLALTGGGGPEEPPPRFIFSINKASRDFRVGGHGIPWQAKGFYWVLALGGNRAMTRVVEPPLLVYPGTRLTKFLLRAI

SEQ ID NO: 168694 - protein, 807 aa, Oryza sativa
  unsure (1)..(807): unsure at all Xaa locations
  Clone ID: PAT_MRT4530_67184C.1.pep
MSLKHPHSPVLDGDPPPHRRPRGLVSTPPPPAVAADTSPSPSPSPAAPPPRRRGGGGGGGEREREREKERTKLRERHRRAITSRMLSGLRQHGNFPLPARADMNDVLAALARAAGWTVHPDGTTFRASSQPLHPPTPQSPGIFHVNSVETPSFTSVLNSYAIGTPLDSQASMLQTDDSLSPSSLDSVVVADQSIKNEKYGNSDSVSSLNCLENHQPVELEVVLPPPLAALLVCGSTVVQLMGGSMAGSADGHPEEEQRERSGDGRVGACAGAAAGAEPVPAAVHSSSSHAVSAVIAAIGSLTRASAALAGDYTRTPYIPVYASLPMGIINSHCQLIDPEGIRAELMHLKSLNVDGVIVDCWWGIVEAWIPHKYEWSGYRDLFGIIKEFKLKVQVVLSFHGSGETGSGGVSLPKWVMEIAQENQDVFFTDREGRRNMECLSWGIDKERVLRGRTGIEVLGHPWXYFDFMRSFHMEFRNLTEEGLISAIEIGLGVSGELKYPSCPERMGWRYPGIGEFQCYDRYMQKNLRQAALSRGHLFWARGPDNAGYYNSRPHETGFFCDGGDYDSYYGRFFLNWYSGILIDHVDQVLSLATLAFDGVETVVKIPSIYWWYRTASHAAELTAGFYNPTNRDGYSPVFRMLKKHSVILKFVCYGPEFTIQENNEAFADPEGLTWQVMNAAWDHGLSISVESALPCLDGEMYSQILDTAKPRHDPDRHHVSFFAYRQLPSFLLQRDVCFSELGNFVKCMHDGSLIKIVVRVRTIIAHQSGSSALDVLMQRLTVLCIRGVSTYPIKIIRSRYLTTVIAL

SEQ ID NO: 168695 - protein, 74 aa, Oryza sativa
  Clone ID: PAT_MRT4530_67185C.1.pep
KDPLVPLGAWFVFLWGPLNRVIGSCFSSRPKALLESFCLPWFSMSSDGGIPLCYDHSHFGGCPVFISFLSIGFC

SEQ ID NO: 168696 - protein, 39 aa, Oryza sativa
  Clone ID: PAT_MRT4530_67186C.1.pep
NLDVISLRLNSVGGRKVSVSLVMEKSPLSLVESMWYLMY

SEQ ID NO: 168697 - protein, 449 aa, Oryza sativa
  Clone ID: PAT_MRT4530_67187C.1.pep
MPPPSPSLRDLSDELVGEILVRLPPDDPACLLRASLACKVWRRILADRALRRRLHRAPPVVGFLRIGMGEGDMRYGSRYTPNNGAASSRRPAAAGSRDLPLWLVLDCRHGRALFATPCPRRAAAATTSLGHDLVVWDPFTNEHRRLPRPSSPLAITGRGFNAAVLCAAGGGGGGCDHRSCHGGPFLVALIWSHSPSPFLPHLPGATSARVYSSDTGEWSDTTTVEHHDVFYYLEDRSPLPCRSVLVGDTLYFTWSSTHAFELRLGGGQRRLSIVYGPPRPPPLIESSSPIFMMSMGDDGVLRCVEVEPEDEKLCLRLRLRLWSRNVDDNGVAQWIRGRAIELEPLLPDGALQTPWIPSSVQLLGAVEGTDVIFVGTHSPDHPAAVYMVQLNSRRSRKVFDKCTSVVPYTSFCIPAMSNFTILDKVLGDTTFSSVKVGTSKYMRLFPQVP

SEQ ID NO: 168698 - protein, 109 aa, Oryza sativa
  unsure (1)..(109): unsure at all Xaa locations
  Clone ID: PAT_MRT4530_67188C.1.pep
IDSSRSSWDSRGMAGISFGRGDLPRLVPGHPGYMEKAWEXQNDLWYHPKIMSNGGSFGSSISAIFHNESGYWVWTGRLSGDAGRRPCYVRWGKGKEKKGQEKRRRTRQQ

SEQ ID NO: 168699 - protein, 91 aa, Oryza sativa
  unsure (1)..(91): unsure at all Xaa locations
  Clone ID: PAT_MRT4530_67189C.1.pep
MFGFGHHGHHGQDXPPQHHGGGGXGAHQPTFKIFCRADXGYCXAVREGNVVLAPTNPRDEHQXXYKDMRFRAKXKDEXGNPAFXLVNXGQR

SEQ ID NO: 168700 - protein, 92 aa, Oryza sativa
  Clone ID: PAT_MRT4530_6718C.1.pep
ERKATFILRIFQRQSNYGIEKKENERRPFSLSQIRPKERNRIPIKKTPMRLIQQRQLMPDDGHEHGHGREDKCLARSPTAADSLRPRRRPTA

SEQ ID NO: 168701 - protein, 117 aa, Oryza sativa
  Clone ID: PAT_MRT4530_67190C.1.pep
MGMGTRLPITCVGMGMGKFLTRQQVWVMKWASSLSMGVGTGEENPMGTHLLPSLVATVDAVADKWPTPLPHQQPRSNAYAYEPQVVQLPASARMPRSGCRTATPRPPVDAAARFYYL

SEQ ID NO: 168702 - protein, 106 aa, Oryza sativa
  Clone ID: PAT_MRT4530_67191C.1.pep
NFAPSTFDGRKRAPPGGDGGRKNKVFFPKGSLKNGFPLPGRPPGGQFPHPFPGGGGPLKTKPGALGFGYWKEVHFNPLTRVPLRASLGPPTPVISAPKGGFLGVAV

SEQ ID NO: 168703 - protein, 83 aa, Oryza sativa
  Clone ID: PAT_MRT4530_67192C.1.pep
RPCRRVARQVGQGRPLLPSPPHGHSSRLPDEAPSIAVLFLVPDPASASSLVREPPLRSGVEVTVRIDENDSHDSFEVNLSWKN

SEQ ID NO: 168704 - protein, 148 aa, Oryza sativa
  Clone ID: PAT_MRT4530_67193C.1.pep
MASKLYYAVAPLVLVLLLLAPLSSARLAAAAAADDDGQWPAGGGRGRKVGGRTDVEDVEGNREVQELGLFCVVEHNRRGGSATRGRGLVFSRVVAAQTQVVSGIKYYLRIAAQEADDELVFDAVVVVKAWVPSREMVSFVPAAELPGY

SEQ ID NO: 168705 - protein, 58 aa, Oryza sativa
  Clone ID: PAT_MRT4530_67194C.1.pep
AEGFINRARGQIFVSAPTASELLTKMEQYTRLHQEVAPATSWEISELGYGRTPGADQS

SEQ ID NO: 168706 - protein, 1712 aa, Oryza sativa
  unsure (1)..(1712): unsure at all Xaa locations
  Clone ID: PAT_MRT4530_67195C.1.pep
MAEPAKAHNLSPSVSGDDGEPNPRRRARTPLPPPRQSPRREKALERAEGSATSASTGDGEGRRDGERRLLVYGDGSTPQGALQAAGALLRHPPVAHDPESPAQRWLDDVAKLVMTARQRLDAGGRSSATKTSGAATTGSASSKRRARRAAAAVRHSAATPSSAPPTRKDLRGGPDARISIERRRNGRCAAHATEGASSSGVSPQHGRGDRPSVPPVGGVGCRAFVASLRNVRWPPRFRPTIAEKYDGSVNPAEFLQVYTTGIEAAGGDDRVMANFFPMALKGQARGWLMNLPPASVHSWEDLCQQFTMNFQGTYPRPGEEADLHAVQRRDDESLRSYIQRFCQVRNTIPCILAHAVIYAFRGGVRHNRMLEKITSKEPHTTAELFQLADRVARKEEAWTWNPSGSGVAASAAPGSAAQTGRRDRRRKKRSPHSDDEGHVLAVEGASRATRKGRPASDRKKEASAPSRERPTGKWCTVHNTSLHDLADCHAVKSLAERTRKLEEERRQERREGKSPAVPSGNRRSEAKQKAPAEDINGGDDDLGFQEPGAAIATVDGGACAHVSRRSLKAMKRELLAAAPTHEATRRARWSEVALTFDQTDHPPCVARGGQIAMVVSPTVCNVKLGRVLIDGGAALNILSPAAFDAIKAPGMVLRPSQPIIGVTPGHTWPLGHIDLPVTFGGSANFRTERVNFDVADLSLPYNAVLGRPALVKFMAAVHYAYLQMKMPGPGGPISVHGDLKVALACMEQRADHLAAASKPEGGDERLGTSVPAAPRQRMITCDEVPEDALVSFLRANADVFAWRPADMPGVPREVIEHRLAVRPGARPVRQKVRRQAPERQAFIREEVAQLLEAGFIREVIHPEWLANPVVVPKANGKLRMCIDYTDLNKACPKDPYPLPRIDQIVDSTAGCDLLCFLDAYSGYHQIRMAREDEEKTAFITPIGTYCYTTMPFGLKNAGPTFQRTTRISLGSQIGRNVEAYVDDLVVKTRNRDTLLTDLAETFESLRSARIKLNPDKCVFGVPAGKLLGFLVSARGIEANPEKIRAIERMRPPSKLRDVQCVAGSMAALSRFISRLGEKTLPLFKLLKRSGPFTWTEEAERALTQLKAYLSSPPVLVASEPNEPLLLYLAATPQVVSAALVVEHDEDNPHSAHPHPVLTWPGREQGGEAPEPNGGPRPPTTGAGPLPTCQTVPGAPDPQDGPAATAGRPHLLPSDPEANSVPTRPGREQGEEAPEPNGGLRPLTTGVGPFPACPTTPGAPDPQDGPEATVVRPPLSSSDPEVIGTEDECAPRGHLDEERPKDATPSKEDRPHRKVQRPVYFVSEALRDAKTRYPQAQKMLYAILMASRKLRHYFQAHRVTVVTSYPLGQILHNREGTGRVVKWAIELSEFDLHFEPRHAIKSQALADFVAEWTPAPEPVSVPEASSGPSQLPHTAYWVMQFDGSLSLQGAGAGVMLTSPSGDVLRYLVRLDFRATNNMAEYEGLLAGLRVAAGLGIRRLLVLGDSQLVVNXDKTLPEDHEGSERVXRISKRYVLXRAPGGFEYLYVAIDKFTKWPEAYPVVKIDKHSALKFIKGITARFGVPNRIITDNGTQFTSELFGDYCEDMGIKLCFASPAHPRSNGQVERANAEILRGLKTKTFNILKKHGDSWIEELPAVLWANRTTPSRATGETPFFLVYGSEVVLPSELTLRSPRATMYCEADQDQLRRDDLDYL

SEQ ID NO: 168707 - protein, 60 aa, Oryza sativa
  Clone ID: PAT_MRT4530_67196C.1.pep
ETADPVSYRWRHHCRHPPRDRAGAAGAAQRARQGRRRATRRRPGEGAARLRRPPAGGHGI

SEQ ID NO: 168708 - protein, 1476 aa, Oryza sativa
  Clone ID: PAT_MRT4530_67197C.1.pep
MSWHRAGVLLLGAQSCLPVPGVPAVGGIGLVLLSMARMGWKLCHVFRLYTVVFTTNFQGTYPRPGEEADLQAVQRRDDESLRSYVQRFCQVRNTIPCIPAHAVIYAFRGGVRHNRMLEKIASKEPQTTAELFQLADRVARKEEAWTWNSSGSGVAAPAAPGSAARSEWRDRRRKKRSAHSDDEGHVLAVEGASRATRKGRPASDKKKEAGAPSRERPTGKWCSVHNTSLHDLADCHAVKSLAERTRKWEEERRQERREGKAPAAPASNRRGEAKQKATAEDVDDGDNDLGFQEPGATVATVDGGACAHVSRRSLKAMKRELLAASPTHEATRRARWSEVALTFDQTDHPPRGAALNILSSSAFDAIKAPGMVLRPSQPIIGVTPRHTWPLGHIDLPVTFGGSANFRTERVNFDVADLSLPYNAVLGRPALVRFMAAVHYAYLQMKMPGPGGPITVHGDLKVALACMEQRADHLAAVSKPAGGDERLSASVPAAPRQRMITCDEIPEDALVSFLRANADVFAWRPADMPGVPREVIEHRLAVQPGARPGRQKVRRQAPERQAFIREEVARLLEAGFIREVIHPEWLANPVVVPKANGKLRMCIDYTDLNKACPKDPYPLPRIDQIVDSTAGCDLLCFLDAYSGYHQIRMAREDEEKTAFITPIGTYCYMAMPFGLKNAGPTFQRTTRISLGSQIGRNVEAYVDDLVVKTRNQETLLSDLAETFESLRSARIKLNPDKCVFDVPAGKLLGFLVSARGIEANPEKIRAIERMRPPSKLRDVQCVTGCMAALSRFISRLGEKALPLFKLLKRSGPFTWTEEAERALTQLKVYLSSPPVLVAPEPDEPLLLYLAATPQVVSAALVVERDEDNPHSAHPHPMSTRPEREQGGEAPEPNGGPRPPTTGVGPPPACQTVSGAPDPQDGPGATARRPHLSPSDPEVNPVSTRPGREQGGEAPEPNGGPRPLTAGAGPPPVCPMVPGAPDPQEGLGATAGRPRLTPSDPEVIGTEAECALRSLSDEERPGDVAPSEEGRPRRKVQQPVYFVSEALRDAKTRYPQAQKMLYAILMASRKLRHYFQAHRVTVVTSYPLGQILHNREGTGRMVKWAIELSEFDLHFEPRHAIKSQALADFVAEWTPAPEPVSAPEDSSGPSQLPHTAYWVMQFNGSLSLQGAGAGVTLTSPSGDVLRYLVRLYFRATNNMAEYEGLLAGLRVAAGLGIRRLLVLGDSQLVVNQAYIADKTLPEDYEGSERVQRISKRYVLVEGTLYRRAANGVLLKCIPRERGVELLADIHEGECGAHSASRTLVGKAFRQGFYWPTALNDAVDLVRRCRVCQFHAKQTHQPAQALQTIPLSWPFAVWGLDILGPFRRAPGGFEYLYVAIDKFTKWPEAYPVIKIDKHSALKFIRGITARFGVPNRIITDNGTQFTSELFGDYCEDMGIKLCFASPAHPRSNGQVERANAEILKGLKTKTFNILKKHGD

SEQ ID NO: 168709 - protein, 1764 aa, Oryza sativa
  unsure (1)..(1764): unsure at all Xaa locations
  Clone ID: PAT_MRT4530_67198C.1.pep
MAEQAKVHNLSPSVSGDDGEPNPRRRARTPPPPPHQSPRREEVLERIEGSATSTSTGDGEGRRDGERRLLVYGDGSTPQGALQAAGALLRHPPVVPDPESPAQRWLDDVANLVMTARQRLGAGGRSSATKTSGAATTGSVSSRRRARRAAAVARHSAATPSSAPPTQEDLRGGPDARISIERRRNGRRAAHATEGASSSGVSHQHGRGDQPSVPPVGGVGCRAFVASLRNVRWPPRFWPTIAEKYDGSVNPAEFLQVYTTGIEAAGGDDRVMANFFPMALKGQARGWLMNLPPASVHSWEDLCQQFTMNFQGIYPRPGEEADLHAVQRRDDESLRSYIQRFCQVRNTIPCIPAHAVIYAFRGGVRHNCMLEKIASKEPQTTAELFQLADRVARKEEAWTWNPSGSGVAASAAPGSAAQTGRRDRRRKXEGASRATRKGRPAGDKKKEAGAXERPTGKWCIVHNTSLHDLADCRAVKSLAERTRKWEEERRQERREGKSPAVPSGNRRSEAKQKAPAEDIDDGDDDLGFQEPGATIATVDGGACAHVSRRSLKAMKRELLAAAPTHEATRRARWSEVALTFDQTDHPPCVARGGQIAMEVSPTFCNVKLGRVLIDGGAALNILSPAAFDAIKAPGMVLRPSQPIIGVTPDHTWPLGHIDLPVTFGGSANFRTERVNFDVADLSLPYNAVLGRPALVKFMAAVHYAYLQMKMPGPGGPISVHGDLKVALACMEQRADHLTAASKPEGGDERLGTSAPAAPRQRIVTCDEVPAGFIREVIHPEWLANPVVVPKANGKLRMCIDYTDLNKACPKDPYPLPRIDQIVDSTAGCDLLCFLDAYSGYHQIRMAREDEEKTAFITPIGTYCYTTMPFGLKNAGPTFQRTTRISLGSQIGRNVEAYVDDLVVKTRNQETLLSDLAETFESLRSARIKLNPDKCVFGVPAGKLLGFLVSARGIEANPEKIRAIERIRPPSKLRDVQCVTGCMAALSRFISRLGEKALPLFKLLKRSGPFTWTEEAERALTQLKAYLSSPPVLVAPEPNEPLLLYLAATPQVVSVALVVERDEDNPHSAHPHPVLAWPERKQGGEAPESNGGPRPPTTGAGPLPACQTVPGAPEPQDGPEATAGRPHLSPSDPEANPVPIRPGREQGEEAPEPNGGLRPLTTGVGPLPACPTTPGAPDPQDGPEATVGRPPLSSSDPEVVGTEDECTPRGRLDKERPRDVAPSEEDRPHRKVQRPVYFVSEARRDAKTRYPQAQKMLYAILMASRKLRHYFQAHRVTVVTSYPLGQILHNREGTGWVVKLAIELSEFDLHFEPRHAIKSQALADFVAEWTPAPEPVSVPEASSGPSQLPHTAHWVMQFDGSLSLQGAGAGVTLTSPSGDVLRYLVRLDFRATNNMAEYEGLLAGLRVAAGLGIRRLLVLGDSQLVVNQVYKTLPEDREGSERVQRISKRYVLVEGTLYRRAANGILLKCIPREQGVELLADIHEGECGAHSASRTLVGKAFRQGFYWPTALNVAVDLVRRCRACQFHAKQIHQSAQALQIILLSWPFAVWGLDILGPFRRAPGGFEYLYVAIDKFTNWPEAYPVVKIDKHSALKFIKGITARFGVPSRIITDNGTQFTSELFGDYCEDMGIKLCFASPAHPRSNGQVERANAEILRGLKTKTFNILKKHDDSWIEELPAVLWANRTTPSRATGETPFFLVYGAEAVLPSELTLRSSRATMYCEADQDQLHRDDLDYLEERRRRAALRAARYQQSLRRYHQRHVRA

SEQ ID NO: 168710 - protein, 109 aa, Oryza sativa
  unsure (1)..(109): unsure at all Xaa locations
  Clone ID: PAT_MRT4530_67199C.1.pep
RGCRDTPGQDTRARGCGGVVWHAILLRASHEIIGRSXVLGRSYSGAARTKAESSEEAAVEPLAFGRVYILTFTSALFPHIVFCGALLLFLLLAGFVWLLSSFCLPDPYR

SEQ ID NO: 168711 - protein, 323 aa, Oryza sativa
  unsure (1)..(323): unsure at all Xaa locations
  Clone ID: PAT_MRT4530_6719C.1.pep
MTRSSSSSRYKAKTVLIKAALDLFRIATRLHANLSRSAITHIQFSEEQRXLVQNVLITYLGLPLCVREPTKLELQPILDRLAKKVAVGKLKLLLPDGGMCLIKXVLMAIPMHVLSIMQXQSGLLRMLREYVGFFCARGKRKSMVALFGKALSLKLEVKRTEQKGRPWRMVGWKRNKDLQDIFNSTVIHVVGNGQDTNFYVENWLPRGNIVGNMPTLFSFVSRSRLIVGQGIVGYRWGRDLQGSLSNRALAEYLFLWDELXECSHPIXMEDSIIWKLTSNGXFIVYAAYNLFFMATMKCPYGELFWKIRVLARVRFFMWLAVKG

SEQ ID NO: 168712 - protein, 69 aa, Oryza sativa
  Clone ID: PAT_MRT4530_671C.1.pep
QALGPAQPSPAQPEKQRPLVQTADTSATCCWRSAPRVPRKTLKRSSSMHLNGKPKLVAAVDPSSLSRAI

SEQ ID NO: 168713 - protein, 1891 aa, Oryza sativa
  Clone ID: PAT_MRT4530_67200C.1.pep
MAEQAKAHDLSPSVSGDDGEPNPRRRARTPPPPPRQSPKRGEALERVERSATSPIAGDGKERRDGERRLLVYGDGSTPQGALQAAGALLRHPPVVPDPESPAQRWLDDVAKLVMTARQCHARKFTRCDRQRLDAGGRSSATKASGAATTGSASSRRRARRAAAAVRRSAATPSSTPSTREDLRGEQDAHTSIERRRNDRSAAHATEGASSSRVSPRHGRGNQPSVPPVGGVGCRAFVASLRNVRWPPRFRPTIAEKYDGSINPAEFLQVYTTGIEAAGGDDRVMANFFPMALKGQARGWLMNLPPASVHSWEDLCQQFTMNFQGTYPRPGGGVRHNRMLEKIASKEPQTTAELFQLADRVARKEEAWTWNPSGSGVAASAAPGSAAQTGRRDRRRKKRSVHSDDEGHVLAVEGASWATRKGRPASDKKKEASAPSRERPTGKWCTVHNTSLHDLADCRAVKSLAERTRKWEEERRQGRREGKSPAVPSGNRRSEAKQRAPAEDIDDGDDDLGFQEPGATIATVDGGACAHVSRRSFKAMKRELLAAAPTHEATRRARWSEVALTFDQTDHPPCVARGGQIAMVVSPTVCNVKLGRVLIDGGAALNILSPATFDAIKAPGMVLRPSQPIIGVTSGHTWPLGHIDLPVTFGGSANFRTERVNFDVADLSLPYNAVLGRPALVKFMAAVHYAYLQMKMPGPGGPISVHGDLKVALACMEQRVDHLAAASKPEGGDERLGASAPATPRQRMITCDEVPEDALVSFLRANADVFAWRPADMPGVPREVIEHRLAVRPGARPVRQKVRRQAPERQAFIREEVARLLEAGFIREVIHPDWLANPVVVPKVNGKLRMCIDYTDLNKACPKDPYPLPRIDQIVDSTAGCDLLCFLDAYSGYHQIRMAREDEEKTAFITPIGTYCYTTMPFGLKNAGPTFQRTTRISLGSQLGRNVEAYVDDLVVKTRNQETLLSDLAETFEGLRSARIKLNPDKCVFGVPAGKLLGFLVSARGIEANPEKIRAIERMRPPSKLRDVQCVTGCMAALSRFISRLGEKALPLFKLLKRSGPFTWTEEAERALTQLKAYLSSPPVLVAPEPNEPLLLYLAATPQVVSAALVVERDEDNPHSTHPNPVLTQPGRGQGGEAPEPNGGPRPPTTGVGSLPACQMVLGAPDPQEGPEATMGRPHLSPFDPEAHPVLTQPGKEQGEEAPEPNGGLRPLTTGVGPLPACPTTTGAPDPQDGPEATEVRPPLLSSDPEVISTEDKCAPRGCLDEECPRDAAPSEEDRPHRKVQRPVYFVKWTPAPEPVSIPEASTDPSQLPHTAHWVMQFDGSLSLQGAGAGVTLTSPSRDVLRYLVRLDFRATNNMAEYEGLLAGLRVAAGLGIRRLLVLGDSQLVVNQVCKEYRCSDPQMDAYVRQVRRMERHFDGIELRHVPRRDNMIADELSRLASSRAQTPPGVFEERLAQPSARPDPLGEMDAPDRPPRPVGAQASGPEGSAPSSLRLIAWIAEIQAYLTDKTLPEDREGSERVQRISKRYVLVEGTLYRRAANGVLLKCIPREQGVVLLADIHEGECGAHSASRTLVGKAFRQGFYWPTALSDAVDLVRRCRACQFHAKQIHQPAQALQTIPLSWPFAVWGLDILGPFRRAPGGFEYLYVAIDKFTKWPEAYPVIKIDKYSALKFIKGITARELFGDYCEDMGIKLCFASPAHPRSNGQVERANLEILKGLKTKTYNILKKHGDSWVEELPAVLWANRTTPSRATGETPFFLVYGAEAVLPSELTLRSPRATMYCEADQDQLRRDDLDYLEERRRRAALRAARYQQSLRRYHQRQVRARSLCVDDLVLRRVQTRAGLSKLSPMWEGPYRVIGVPRPGSVRLATGDGTELPNPWNIEHLRRFYP

SEQ ID NO: 168714 - protein, 1943 aa, Oryza sativa
  unsure (1)..(1943): unsure at all Xaa locations
  Clone ID: PAT_MRT4530_67201C.1.pep
MAEQAKAHNLSPSVSGDDGEPNPRRRARTPPPPPRQSPRREKALERAEGSATSTSTGDGEGRRDGERRLLVYGDGSTPQGALQAAGALLRHPPVAHDPESPAQRWLDDVAKLVMTARQRLDAGGRSSAAKTSGTATTGSASSRRRARRAAAAVRHSAATPSSAPPTREDLRGGSDARTSIERRRNGRRAAHATEGASSSGVSPQHGRGDQPSVPPVGGVGCRAFVASLRNVRWPPRFRPTIAEKYDGSVNPAEFLQVYTTGIEAAGGDDRVMANFFPMALKGQARXFCQVRNTIPCIPAHAVIYAFRGGXRHNRMLEKIASKEPQTTAELFQLADRVARKEEAWTWNPSGSGVAASAAPGSAAQTGRRDRRRKKRSAHSDDEGHVLAVEGASRATRKGRPASDRKKEAGAPGRERPTGKWCIVHNTSLHDLTDCRAVKSLAERTRKWEEERRQERREGKSPAVPSGNRRSEAKQKAPAEDINDGDDDLGFQEPGATIATVDGGACAHVSRRSLKAMKRELLAAAPTHEATRRARWSEVALTFDQTDHPPCVARGGQIAMVVSPTVCNVKLGRVLIDRGAALNILSPAAFDAIKAPGMVLRPSQPIIGVTPGHTWPLGHIDLPVTFGGSANFRTERVNFDVADFSLPYNAVLGRPALVKFMAAVHYAYLQMKMPGPGGPISVHGDLKVALACMEQRADHLSAASKPEGGDERLGTSVPAAPRQRMITCDEVPEDALVSFLRANADVFAWRPADMPGVPREVIEHRLAVRPGARPVRQKVRRQAPERQAFIREEVARPLEAGFIREVIHPEWLANPVVVPKANGKLRMCIDYTDLNKACPKDPYPLPRIDQIVDSTAGCDLLCFLDAYSGYHQIRMAREDEEKTAFITPIGTYCYTTMPFGLKNAGRNVEAYVDDLVVKTRNQETLLSDLAETFESLRSARIKLNPDKCVFGVPASKLLGFLVSARGIEANPEKIRAIERMRPPNKLRDVQCVTGCMAALSRFISRLGEKALPLFKLLKRSGPFTWTEEAERALTQLKAYLSSPPVLVAPEPNEPLLLYLAATPQVVSAALVVERDEDNPHSAHPHPVLAWPGREQGGEATEPNGGPRPPTTGAGSLPACQTVPGAPDPQDGPAATAGRPHLSPSDPEPNPVPTRPGREQGEEAPEPNGGLRPLRTGVGPLPACPTTPGAPDPQDGPEATVGRPPLSSSDPEVVGTEDECAPRGRLDEERPKDAAPSEEDRPHRKVQRPVYFVSEALRDAKTRYPQTQKMLYAILMASRKLRHYFQAHRVTVVTSYPLSQILHNREGTGRVVKWAIELSEFDLHFEPRHAIKSQALADFVAEWTPAPEPVSVPEASSDPSQLPHTAYWVMQFDGSLSLQGAGAGVTLTSPSGDVLRYLVRLDFRATNNMAEYEGLLAGLRVAAGLGIRRLLVLGDSQLVVNQVCKEYRCSDPQMDTYVRQVRRMKRHFDGIELRHVPRRDNTIADELSRLASSRAQTPPGAFEERLTQPSARPDPLGETDAPDRPPRPIGVQASGPEGSAPSSLRLIAWIAEIQAYLTDKTLPEDREGKGTLYRRTANGVLLKCIPREQGVELLADIHEGECGAHSASRTLVGKAFRQGFYWPTALNDAVDLVRRCRACQFHAKQIHQPAQALQIIPLSWPFAVWGLDILGPFRQAPGGFEYLYVAIDKFTKWPEAYPVVKIDKHSALKFIKGITARFGVPNRIITDNDTQFTSELFGDYCEDMGIKLCFASPAHPRSNGQVERANAEILRGLKTKTFNILKKHGDLWIEELPAVLWANRTTPSRATGETPFFLVYGAEAVLPSELTLRSPRATMYCEADQDQLRRDDLDYLEERRRRVALRAARYQQSLRRYHQRHVRARSLCVDDLVLRRVQTRAGLSKLSPMWEGPYRVIGVPRPGSVRLATGDGTELPNPWNIEHLRRFYP

SEQ ID NO: 168715 - protein, 33 aa, Oryza sativa
  unsure (1)..(33): unsure at all Xaa locations
  Clone ID: PAT_MRT4530_67202C.1.pep
FIRPXYCKRHDMEYHIEIKLINSSNAKHAGSEM

SEQ ID NO: 168716 - protein, 1936 aa, Oryza sativa
  Clone ID: PAT_MRT4530_67203C.1.pep
MDTAAGWVVEAGALLRHPPVVPDPESPAQRWLDDVAKLVMTARQRLDAGRRSSATKASGAATTGSASSRRRARRAAAAVRHSAATPSSTPSTREDLRGGPDARTSVERRRNDRSAPHATEGASSSRVSPQHGRGNQPSVPPVGGVGCRAFVASLRNVRWPPRFRPTIAEKYDGSVNPAEFLQVYTTGIEAAGGDDRVMANFFPMALKGQARGWLMNLPPASVHSWEDLCQQFTMNFQGTYPRPGEEADLHAVQRRDDESLRSYIQRFCQVRNTIPCIPAHAVIYAFRGGVRHNRMLEKIASKEPQTTAELFQLADRVARKEEAWTWNPSGSGVAASAAPGSAAQTGRRDRRRKKRSVHSDDEGHVLAVEGASRATRKGRPASDKKKEASAPSRERPTGKWCTVHNTSLHDLADCRAVKSLAERTRKWEEERRQERREGKSPAVPSGNRRSEAKQKAPAEDIDDGDDDLGFQEPGATIATIDGGACAHVSRRSFKTMKRELLAAAPTHEATRRARWSEVALTFDQTDHPPCVAQGGQIAMVVSPTVCNVKLGRVLIDGGAALNILSPAAFDAIKAPGMVLRPSQPIIGVTPGHTWPLGHIDLPVTFGGSANFRTERVNFDVADLSLPYNAVLGRPALVKFMAAVHYAYLQMKMPGPGGPISVHGDLKVALACMEQRADHLAAASKPEGGDERLGASAPATPRQRMITCDEVPEDALVSFLRANADVFAWRPADMPGVPRKVIEHRLAVRPSARPVRQKVRRQAPERQAFIREEVARLLEAGFIREVIHPEWLANPVVVPKANGKLRMCIDYTDLNKACPKDPYPLPRIDQIVDSTAGCDLLCFLDAYSGYHQIRMAREDEEKTAFITPIGTYCYTTMPFGLKNAGPTFQRTTRISLGSQLGRNVEAYVDDLVVKTRNQETLLSDLAETFESLRSARIKLNPDKCVFGVPAGKLLGFLVSARGIEANPEKIRAIERMRPPAYLGMLGEKALPLFKLLKRSGPFTWTEEAERALTQLKAYLSSPPVLVAPEPNEPLLLYLAATPQVVSAALVVERDEDNPHSTHPHPVLAWPGREQGGEAPEPNGGPRPPTTGVGPLPACQTVLGAPDPQEGPEATVGRPHLSPFDPEANPVLTRPGKKQGEEAPEPNGGLRPLTTGVGPLPACPTTTGAPDPQDGPEATVVRPPLLSSDPEVISTEDKCAPRGCLDEECPRDAAPSEENRPHRKVQRPVYFVSEALRDAKTRYPQAQKMLYAILMASRKLRHYFQAHRVTVVTSYPLGQILHNREGTGRVVKWAIELSEFDLHFEPRHAIKSQALADFVAEWTPAPEPVSIPEASTDPSQLPHTAHWVMQFDGSLSLQGAGAGVTLTSPSGDVLKYLVRLDFRATNNMAEYERLLAGLRVAAGLGIRRLLVLGDSQLVVNQVCKEYRCSDLQMDAYVRQVRRMERHFDGIELRHVPRRDNMIADELSRLASSRAQTPPGAFEERLVQPSARPDPLGETDAPDRPPRPVGAQASGPEGSAPSSLRLIVWIAEIQAYLTDKTLPEDREGSERVHRISKRYVLVEGTLYRRAANGILLKCIPREQGVVLLADIHEGECGAHSASRTLVGKAFRQGFYWPTALNDAVDLVRRCRACQFHAKQIHQPAQALQTIPLSWPFAVWGLDILGPFRRAPGGFEYLYVAIDKFTKWPEAYPVVKIDKHSALKFIKGITARFGVPNRIITDNDTQFTSELFGDYCEDMGIKLCFASPAHPRSNGQVERANSEILKGLKTKTFNILKKHGDSWIEELPAVLWANRTTPSRATGETPFFLVYGAEAVLPSELTLRSPRATMYCEADQDQLRRDDLDYLEERRRRAALRAARYQQSLRRYHQRHVRARSLCVDDLILRRVQTRAGLSKLSPMWEGPYRVVGVPRLGSIRLATGDGTELPNPWNIEHLRRFYP

SEQ ID NO: 168717 - protein, 37 aa, Oryza sativa
  Clone ID: PAT_MRT4530_67204C.1.pep
NYLKKSFETLETACDELRNSRLFLKLLEAVLNPYSAC

SEQ ID NO: 168718 - protein, 1978 aa, Oryza sativa
  Clone ID: PAT_MRT4530_67205C.1.pep
MAEQAKAHNLSPSVSGDDGEPNPRRRARTPPPPPRQSPRREEALERVEGSATSTSTGDGEGQRDGERRLLVYGDGSTPQGALQATGALLRHPPIVPDPESPAQRWLDDVANLVMTARQRLDAGGRSSATKTSGTATTSSASSRRRARRAAAAVRHSAATPSSAPPTREDLRGGPDARISIEHRRNGRRAAHATEGASSSGVSPRHGRGDQPSVPPVGGVGCRAFVASLRNVRWPPRFRPTIAEKYDGSVNPAEFLQVYTTGIEAAGGDDRVMANFFPMALKGQARGWLMNLPPASVHSWEDLCQQFTMNFQGTYPRPGEEADLHAVQRRDDESLRSYIQRFCQVRNTIPCIPAHEVIYAFRGGVRHNRMLEKIASKEPQTTAELFQLADRVARKEESWTWNPSGSGVAASAAPGSAARIGRRDRRRKKRSAHSDDEGHVLAVEGASRATRKGRPASDKKEASAPSRERPTGKWCTIHNTSLHDLTDCRAVKSLAERTRKWEEERRQERREGKSPAVPSGNRRREAKQKAPAEDIDDGDDDLGFQEPGATIATVDGGACAHVSRWSLKAMKRELLAAAPTHEATRRARWSEVALTFDQTDHPPCVARGGQVAMVVSPTVCNVKLGRVLIDGGAALNILSPAAFDAIKAPGMVLRLSQPIIGVTPGHTWPLGHIDLPVTFGGSANFRTERVNFDVADLSLPYNVVLGRPALVKFMAAVHYAYLQMKMPGPGGPISVHGISKSRSLEDALVSFLRANADVFAWRPADMPGVPREVIEHRLAVRPGAKPVRQKVRRQAPERQAFIREEVARLLEAGFIREVIHPEWLANPVVVPKANGKLRMCIDYTDLNKACPKDPYPLPRIDQIVDSTAGCDLLCFLDAYSGYHQIRVAREDEEKTAFITPIGTYCYTTMPFGLKNAGPTFQRTTRISLGSQIGRNVEAYVDDLVVKTRDRETLLSDLAETFESLRSTRIKLNPDKCVFGVPAGKLLGFLVSTRGIEANPEKIRAIEWMRPPQLGEKALPLFMLLKRSGPFTWTEEAERALTQLKAYLSSPPVLVAPEPGEPLLLYLAATPQSFSSFCVLACRFRRCEVCVPRLIPGRGFYAQISSEITSEFPSVTQGGEAPEPNGGPRPPTTGAGPLPACQTVPGAPDPKDGPGATAGRPHLSPSDPEVNPVPTRPGREQGEEAPEPNGGLRPLTTGVGPLPACPTTPGAPDPQDGPEATVGRPHLSSSDPEVVGTEDKCAPRGRLDEERPRDAAPGEEDRPHRKVQRPVYFVSEALRDAKTRYPQAQKMLYAILMASRKLRHYFQAHRVTVVTSYPLAQILHNREGTGRVVKWAIELSEFDLHFEPRHVIKSQALADFVAEWTPAPEPVSVPEASSGPSQLPHTAHWVMQFDGSLSLQGAGAGVTLTSPSGDVLRYLVRLDFRATNNMAEYEGLLAGLRVAAGLGIRRLLVLGDSQLVVNQVCKEYRCSDPQMDAYVRQVRRMEHHFNGIELRHVPRRDNTIADELSRLASSRAQTPPGAFEERLAQPSVRPDPLGETDAPDRPPRPVGVQASGPEGSAPSSLRLIAWIVEIQAYLTDKTLPEDREGSERVQRISKRYVLIEGTLYRRAANEILLKCIPREQGVELLADIHEGECGAHSASRTLVGKAFRQGFYWPTALNDAVDLVRRCRACQFHAKQIHQPAQALQIIPLSWPFAVWGLDILGPFRRAPGGFEYLYVAIDKFTKWPEAYPVVKIDKHSALKFIKGITARFGVPNRIITDNGTQFTSELFGDYCEDMGIKLCFASPAHPRSNGQVERANAEILKGLKTKTFNILKKHGDSWIEELPAVLWANRTTPSRATGETPFFLVYGAEAVLPSELTLKSSRATMYCEADQDQLRRDDLDYLEERRRRAALRAARYQQSLRRYHQRHVRARSLCVDDLVLRRVQTRAGLSKLSPMWEGPYRVIGVPRPGSVRLATGDGAELPNPWNIEHLRRFYP

SEQ ID NO: 168719 - protein, 115 aa, Oryza sativa
  Clone ID: PAT_MRT4530_67206C.1.pep
KIEHGGLGDLLNSSAGPKLALGCMSVPVDLILRSTRNKDKKTVVNPINDSRSARTLSLRGNHCKAHQLNSITYTESYYRNRLYRLSSSNSDSADLVVADLDSSRFLLCFRNDLRL

SEQ ID NO: 168720 - protein, 1081 aa, Oryza sativa
  unsure (1)..(1081): unsure at all Xaa locations
  Clone ID: PAT_MRT4530_67207C.1.pep
MVLRPSQPIIGVTPGHTWPLGHIDLPVTFGGSANFRTERVNFDVADLSLPYNAVLGRPALVKFMAAVHYAYLQMKMPGPGGPISVHGDLKEHALVSFLRANADVFAWRPADMPGVPREVIEHRLAVRSGARPVRQKVRRQAPERQAFIREEVARLLEAGFIREVIHPEWLANPVVVPKANGKLRMCIDYTDLNKACPKDPYPLPRIDQIVDSTAGCDLLCFLDAYSGYHQIRMAREDEEKTALITPIGTYCYTTMPFGLKNAGPTFQRTTRISLGSQIGRNVEAYVNDLVVKTRNQETLLSDLAETFESLRSARIKLNPDKCVFGVPAGKLLGFLVSARGIEANPEKIRAIERMRPPSKLRDVQCVTGCMAALSRFISRLGEKALPLFKLLKRSGPFTWTEEAERALTQLKAYLSSPPVLVAPEPNEPLLLYLAATPQVVSAALVVERDEDNPHSAHPHPVLTWPGREQGGEAPEPNGGPRPPTTGAGPLPACQTVPGAPDPQDGPRATAGRPHLSPSDPEANPVPTRPGREQGEEAPEPNGGLRPLTTGVGPLPACPTTPGAPDPQDSPEATVGRPPLSSSDPEVVGTEDECTLRGRLDKERPRDVAPSEEDRPHRKVQRPVYFVSEALRDAKTRYPQAQKMLYAILMASRKLRHYFQAHRVTVVTSYPLGQILHNREGTGRVVKWAIELSEFDLHFEPRHAIKSQALADFVAEWTPAPEPVSVPKASSGPSQLPHTAHWVMQFDGSLSFQGAEYEGLLAGLRVTAGLRIRRLLVLADSQLVVTXDKTLPEDREGSERVQRISKRYVLXRAPGGFEYLYVAIDKFTKWPEAYPVVKIDKHSALKFIKGITARFGVPNRIITDNGTQFTSELFGDYCEDMGIKLCFASPAHPRSNGQVERANAEILRGLKTKTFNILKKHGDSWIEELPAVLWANRTTPSRATGETPFFLVYGAEAVLPSEFTLRSPRATMYCEADQDQLRRDDLDYLEERRRRAALRAARYQQSLRRYHQRHVRARSLCVDDLVLRRVQTRAGLSKLSPMWEGPYRVIGVPRPGSVRLATGDGTELPNPWNIEHLRRFYP

SEQ ID NO: 168721 - protein, 1882 aa, Oryza sativa
  Clone ID: PAT_MRT4530_67208C.1.pep
MAEQAKAHNLSPSVSGDDGEPNPRRRARTPPPPPRQSPRREEALERVEGSATSTSTGDGEGRRDGERRLLVYGDGSTPQGALQAAGALLRHPPVVPDPESPAQRWLDDVANLVMTARQRLGAGGRSSATKTSGAATTGSVSSRRRARRAAAVARHSAATPSSAPPTREDLRGGPDARISIERRRNGRRAAHATEGASSSGVSPQHGRGDQPSVPPVGGVGCRAFVASLRNVRWPPRFRPTIAEKYDGSVNPAEFLQVYTTGIEAAGGDDRVMANFFPMALKGQARGWLMNLPPASVHSWEDLCQQFTMNFQGTYPRPGEEADLHAVQRRDDESLRSYIQRFCQVRNTIPCIPAHAVIYAFRGGRRDRRRKKRSTHSDDEGHVLAVEGASRATRKGRPASDKKKEASAPSRERPTGKWCTVHNTSLHDLADCRAVKSLAERTRKWEEERRQERREGKSPAVPSGNRRSEAKQKAPAEDIDDGDDDLGFQEPGATIATVDGGACAHVSRRSLKAMKRELLAAAPAHEATRRARWSEFALTFDQTDHPPCVARGGQIAMVVSPTVCNVKLGRVLIDGGAALNILSPAAFDAIKAPGMVLRPSQPIIGVTPGHTWPLGHIDLPVTFGGSANFRTERVNFDVADLSLPYNAVLGRPALVKFMPAVHYAYLQMKMPGPGGPISVHGDLKVALACMEQRAGHLAAASKPEGGDERLGTSVPAAPRQRMITCDEVPANADVFAWRPADMPGVPREVIEHRLAVRPGAKPVRQKVRRQAPERQAFIREEVARLLEAGFIREVIHPEWLANPVVVPKANGKLQMCIDYTDLNKACPKDPYPLPRIDQIVDSTAGCDLLCFLDAYSGYHQIRMAREDEEKTAFITPIATYCYTTMPFGLKNAGPTFQRTTRISLGSQIGRNVEAYVDDLVVKTRDRETLLSDLAETFESLRSARIKLNPDKCVFGVPAGKLLGKLRDVQCVTGCMAALNRFISRLGEKALPLFKLLKRSGPFTWTEEAERALTQLKAYLSSPPVLIAPEPDEPLLLYLAATPQVVSAALVVERDEDNPHSAHPHPVLAWPGREQGGEAPEPNGGPRPPTTGAGPLPACQTVPGAPDPQDGPGATAGRPHLSPSDPEVNPVPTRPGREQGEEAPEPNGGLRLPTTGVGPLPACPTTPGAPDPQDGPEATVGRPHLSSSDPEVVGTEDKCAPRGRLDKERPRDAAPGEEDRPHRKVQRPVYFVSEALRDAKTRYPQAQKMLYAILMASRKLRHYFQAHRVTVVTSYPLAQILHNREGTGRVVKWAIELSEFDLHFEPHHAIKSQALADFVAEWTPAPEPVSVPEASSGPSQLPHTAHWVMQFDGSLSLQGAGAGVTLTSPSGDILRYLVRLDFRATNNMAEYEGLLAGLRVAAGLGIRRLLVLGDSQLVVNQTPPGAFEERLAQPSARPDPLGETDAPDRPPRPVRVQASGPEGSAPSSLRLIAWIAEIQAYLTDKTLPEDREGSERVQRISKRYVLIEGTLYRRAANGILLKCIPREQGIELLADIHEGECGAHSASRTLVGKAFRQGFYWPTALNDAVDLVRRCRACQFHAKQIHQPAQALQIIPLSWPFAVWGLDILGPFRRAPGGFEYLYVAIDKFTKWPEAYPVVKIDKHSALKFIKGITARFGVPNRIITDNGTQFISELFGDYCEDMGIKLCFASPAHPRSNGQVERANAEILRGLKTKTFNILKKHGDSWIEELPAVLWANRTTPSRATGETPFFLVYGAEAVLPSELTLRSPRATMYCEADQDQLRRDDLDYLEERRRRAALRAARYQQSLRRYHQRHVRARSLCVDDLVLRCVQTCAGLSKLSPMWEGPYRVIGVPRPGSVRLATGDGIELPNPWNIEHLRRFYP

SEQ ID NO: 168722 - protein, 56 aa, Oryza sativa
  Clone ID: PAT_MRT4530_67209C.1.pep
MGKLGLLKARRLFQDNEKAALPPAERKLQRNWAPRWFGRTHAGPNPSQFPQMNLYL

SEQ ID NO: 168723 - protein, 1451 aa, Oryza sativa
  unsure (1)..(1451): unsure at all Xaa locations
  Clone ID: PAT_MRT4530_6720C.1.pep
MGENQGIEQVMGKLVDMLAKKLSETSTTINAIVPHAESVQKIELMQNDIKLEGVKNYLSWTRRAMLILKTKGLEGYVIGEVKEPESTSVEWKTXSTTNSLVVAWXLTSLIPAIATTVETISSASEMWKTLTNLYSEEGNMMLMMVAQEKISALKQGERXMAEYVAELKCLXFDLDYYDPLGLEHSNYIAKMKKWVERKRVLEFLKGLNPEFKGRRDAMFHQTTLPTLDVAIATMAQEELKKKLFPXATSSSSSPTYAIVQGNKTRECFNCGEMGHLMCDCRASHKPSYGRGRNGDRGGARGGRGYESRDNRGRGYEYRGDHKANVVTLEGGSSEPINVDVTNFVHSTSDNSNQAFMSINGSYPNWILDSSAXTHVTSMRGAFASYKPYPFTRKETIQIADGTSCPLKGEGTVQCTPSITLSSVLYISSFPVNLVSKSFLVDHMDCQVSLDRENCLIQERQTGKKLGIGVRHDGLSYLDRGRTNEAMCLALMASTSEEXAKVLFLHCRLGHISFEIISKIFPVEFSRVDKHKLVCDACEYGKHTKMSYVSRGLRSMLPFMLIHSDIWTSPVVSMSGMKYFVTFIDCYSRMTWIYLMRHKDEVLKCFQNFYAYIKNHFNARVXFIRTDNGGEYINXEFSNFLSSEGILHQTSCPDTPPQNGVAEKKNHHHLETARSLMYTMNVPKFLWSVAVMAATYLINRTPSGILGMKTPYEMIFHKNVFVLPPKVFGCTCFVRNNRPSVAKXIFIGYSSGQKGYKCWSPSEQXTFVSTDVTFREFVPFYDEKIDLSSXFVDLDNSTSXNHDKQREDKIMGSKEDEQAKEKKVVIGQIPVDMNDPIXEQELRKPHEEENLQVYKRRARFPVIQXVVEDNXVVGDASHVQVPLELGGEEDEVREEESNLPIAVRKGVKSNVGKPPXRYGFEAQDEGNDENNISNYISYDSLSSTYKAFVASVDLVGILKNWREAKQDPKXHQTMLDDLEALEKNKTWNLVPFPEGKKVVNCKWVYTIKQNLNGKKERXKARLVAKGYSQTYGIDYDETCTTNFDWSLHQLDVKNAFLHGDLQEVVYMDIPPGFSTSQTEGKXVLRLKKSLYGLKQSPGEWFDCFQRVMCGMGYKQCNGDHTSFYHHKGCHATIFAVYVDDMIIIGDDSIEIARLKENLSKEFELKNLGQLKYLGIEIARSPRGIVLSQXKYALDLLSDTGMLGCRPASTQIEQNHKLCAELGDPVNKESYQRLVGQVIYLCHTRPDITHAVSVISQYMHNPRSGHMDAVYRILRYLKGSLGKGLWFKKIXHLDVEGYCDADQGNCLDDRRSISGYCVFVRGNLVSWRSKKQLVVSRSTAEAEYKSMSISLSELLWVRDLLTELKLMINIPMKLWCDSKSAINIANNSVQHDRTKHVETDRFFIKERIDDKTLKLNFVNSREQVVDCLTKALGVKXCMSSCSEMGMIDIYRPS

SEQ ID NO: 168724 - protein, 939 aa, Oryza sativa
  unsure (1)..(939): unsure at all Xaa locations
  Clone ID: PAT_MRT4530_67210C.1.pep
PANRPRVPREVIEPRLPVRPGARPVRQKVRRQAPERQAFIREEVARLLEARFIREVIHPEWLANPVVVPKANGKLRMCIDYTDLNKACPKDPYPLPRIDQIVDSTAGCDLLCFLDAYSGYHQIRMAREDEEKTAFITPIGTYCYTTMPFGLKNAGPTFQRTTRISLGSQIGRNVEAYVDDLVVKTRNQETLLSDLAETFESLRSARIKLNPDKCVFGVPAGKLLGFLVSARGIEANPEKIRAIERMRPPSKLRDVQCVTGCMAALSWFVSRLGEKALPLFKLLKRSGPFTWTEEAERALTQLKAYLSSPPVLVAPEPDEPLLLYLAATPQVVSAALVVERDEDNPHSAHLHPVPTWPGREQGEEAPEPNGGLRPLTTGVGPLPACPTTPGAPDPQDGPEATVGRPPLSSSDPEVVGTEDKCAPRGRLDEERPRDATPGEEDRPHRKVQRPVYFVSEALRDAKTRYPQAQKMLYAILMASRKLRHYFQAHRVTVVTSYPLVQILHNREGTGRVVKWAIELSEFDLHFEPRHAIKSQALADFVAEWTPAPEPVSVPEASSGPSQLPHTAHWVMQFDGSLSLQGAGAGVTLTSPSGDVLRYLVRLDFRATNNMAEYEGLLAGLRVAAGLGIRRLLVLGDSQLVVNXDKTLPEDREGSERVQRISKRYVLXRAPGGFEYLYVAIDKFTKWPEAYPVVKIDKHSTLKFIKGITARFGVPNRIITDNGTQFTSELFGDYCEDMGIKLCFASPAHPRSNGQVERANAEILKGLKTKTFSILKKHGDSWIEELPAVLWANRTTPSRATGETPFFLVYGAEAVLPSELTLRSPRATMYCEADQDQLRRDDLDYLEERRRRAALRAARYQQSLRRYHQRHVRARSLCVDDLXVLRRVQTRAGLSKLSPMWEGPYRVIGVPRPGSVRLATGDGTELPNPWNIEHLRRFYP

SEQ ID NO: 168725 - protein, 75 aa, Oryza sativa
  unsure (1)..(75): unsure at all Xaa locations
  Clone ID: PAT_MRT4530_67211C.1.pep
MXYEWYHFLAHLPLPQSLRIFLFFXPLLXAKTIFFQWGPPPILVKVTRNGTSKLLPELVQFINLYVLNCAQKKKK

SEQ ID NO: 168726 - protein, 53 aa, Oryza sativa
  unsure (1)..(53): unsure at all Xaa locations
  Clone ID: PAT_MRT4530_67212C.1.pep
CTLHAFSRTMKNDCKAKQYIHNHMHNNGTKFTXKIFQFQCKADDREADTEASS

SEQ ID NO: 168727 - protein, 90 aa, Oryza sativa
  Clone ID: PAT_MRT4530_67213C.1.pep
STMHCCNRLNTDILVFMSYYILSVYDSSISQKYLVGCVYVIISSVCTHEILYCIWGKNCLKIISFIWIYKNKENVSLHIYYHAIQKTTLV

SEQ ID NO: 168728 - protein, 334 aa, Oryza sativa
  Clone ID: PAT_MRT4530_67214C.1.pep
MDRNKLRSFNQDDFSLDLRTLQTATNNFDERNRLREGGFGMVYKGTLLDGQEIAVKRLSHCSKQGLNELKNELVLVGKLQHKNLVRVLGVCVEKQEKLLVYEYMPNRSLDTFIFDRDKSKELGWEKRFKIIIEIARGLEYLHEESRLKIIHRDLKANNILLDSDLTPEISDFGLAKLFGEDQSHVVTNRVAGTYFGVLILEIITGRRSMGSFNDHEQSFSLLDLIWQHWNSGTILNLVDPSLSRDAGGQLIQRDQLLGCIHVALLCVQENPADRPKLSAVTMMIGGGSNSTASLNPPSRPAFCMHPADATRTASGGETAAASANRVSLTELQPR

SEQ ID NO: 168729 - protein, 79 aa, Oryza sativa
  Clone ID: PAT_MRT4530_67215C.1.pep
MAELMLRLVAHHSCAASLVTFSGLASPTSVSSVAAVVDLDEAWLRRVGAADLNESLKQDGGARCAIFKIIDLSDTRAQL

SEQ ID NO: 168730 - protein, 82 aa, Oryza sativa
  Clone ID: PAT_MRT4530_67216C.1.pep
MVAASPGLQTGAKSRLCSGVFFGEVDLGGKAAPGRKVSGSCVCQYSFRINGSVWLMPYGVMVINGSVCQYGFRINGSVWLMP

SEQ ID NO: 168731 - protein, 110 aa, Oryza sativa
  unsure (1)..(110): unsure at all Xaa locations
  Clone ID: PAT_MRT4530_67217C.1.pep
YWLSRSSSAGAITVQEIYADDVSNRELFYIAQEMAVRYKLVEGLYGRRDGYGDIGCVMDRGATGXMAIGSAKLKDQSANGKKFKXDGYMSLDGQXVRXYIDSAVRHVFLR

SEQ ID NO: 168732 - protein, 87 aa, Oryza sativa
  Clone ID: PAT_MRT4530_67218C.1.pep
MAELMLRLVAHHSCAASLVTFSGLASPTSVSSVAAVVDLDEAWLRRVGAAVNPVRGPLDLNESLKQDGGARCAIFKIIDLSDTRAQL

SEQ ID NO: 168733 - protein, 65 aa, Oryza sativa
  Clone ID: PAT_MRT4530_67219C.1.pep
PVGNRICLNYIVIFHTSNSFLHRFYACLLSKELLLFLSQLYLIYLTCISEQYTLFTLQVMYHVNF

SEQ ID NO: 168734 - protein, 126 aa, Oryza sativa
  Clone ID: PAT_MRT4530_6721C.1.pep
PQVVDTACPSNSRQQALHFILLLTSKLSTELVIRRNLTRTLGGGGEAEERGRSATPPGPRNPRSGGGGWGAPSASPIRHGGDGRAGDHRIGAPPRRWRQQRQGGGERERERESAGLPRACRIPAAR

SEQ ID NO: 168735 - protein, 185 aa, Oryza sativa
  Clone ID: PAT_MRT4530_67220C.1.pep
FSRWRRSCRGDPPAAGGFISCMRDTRRLFTRRCRFIGTEDRIVKRAKKKTSNCYQVEGNSHYKSKSPPFKLLGENKTPWHHPCGLNLLNNQNSGASNIFLFHFVSIFIVVFFFIRVSIRVFIFVFVFMRVLIFIFLHFVLVIVISFQNLDFLKTKKCPKYKQVLHSLYYEVLHRFKLDFNYLKMC

SEQ ID NO: 168736 - protein, 163 aa, Oryza sativa
  unsure (1)..(163): unsure at all Xaa locations
  Clone ID: PAT_MRT4530_67221C.1.pep
MPRFVHRLLSSNSGGLLFFSGAGDTPTPAGXGPWAAEDRGGRWXLQRAARRRRRRSRGDGGGRWAGVGGEGKSRVGLGGGGRWWRIRRRGAAGDGEDGGAGAPRRXRHEEKVRGEGEGEGGGGGARRGGLTGAVDLFRPASEAGGGAVGRWRWWRQRIARGTG

SEQ ID NO: 168737 - protein, 66 aa, Oryza sativa
  Clone ID: PAT_MRT4530_67222C.1.pep
FKMVNRHCWHFNTSPDKRHKLQLNLRLNEIRSHYENVSHHGCPTNHLHLYDLRIPYYHWYRTLIAS

SEQ ID NO: 168738 - protein, 128 aa, Oryza sativa
  Clone ID: PAT_MRT4530_67223C.1.pep
IIYTNEPAELDHGHRPWGVDGRQRRRLIHTMCERCQGGEASGGAATSGCAQGRHPPRTRQRLSGAAETPPCRPTATDTIMLRAFPTLRCLFRGQPGYGRQGGRHHSEHQPLGVRPPIAQGPGRGRQGG

SEQ ID NO: 168739 - protein, 186 aa, Oryza sativa
  unsure (1)..(186): unsure at all Xaa locations
  Clone ID: PAT_MRT4530_67224C.1.pep
ARGPTSLGNASWLNQIDFSNNSXVTGQVPSSFGKLKKXRSLNLERNSLEANDSQSWDFLYAMTNCSSLRVLSVSLNQLRGYIPNSIGNLSSVLVQITMSGNMISGVVPPSIGNLQSLIQLSLDENNLSGTIEEWVGKLTQLQNLNLQLNNFTGPIPSSIGNLTQVTKVLLGSNQFEGPIPSTLGNL

SEQ ID NO: 168740 - protein, 44 aa, Oryza sativa
  Clone ID: PAT_MRT4530_67225C.1.pep
LGGEYCIRSGVDVFRFKKWGSYYYCLLFVSPFRLMRCDVREAWS

SEQ ID NO: 168741 - protein, 94 aa, Oryza sativa
  Clone ID: PAT_MRT4530_67226C.1.pep
MALYELAVFDPSNPVLDPMWRQGITNSWGGWSVSEGTATNPGVACFGFGAFHVTGLYGLGIRESDDNWNIRSYSGSRVYDNAEDGDCQVRRKEV

SEQ ID NO: 168742 - protein, 78 aa, Oryza sativa
  Clone ID: PAT_MRT4530_67227C.1.pep
MVVKHQHSPELSVCRCLRVSLWDHSILLGAPLIHLPIRHVTTHMAHLRTLLHIGAGFIVPISHGCHQPHIWVVNPSCG

SEQ ID NO: 168743 - protein, 141 aa, Oryza sativa
  Clone ID: PAT_MRT4530_67228C.1.pep
MARPRPPPPPSLLLLLLRPPRLPRWRHARFFLVANAIVAGYLVLSLPFSAVLVIRPQTIGLRLLLLVCDMIMAAMLTAAASAAAAIVDLAHNGNLRANWVAICMQFHGFCQRTSGSVVASFLTVVILMFLVILAACSIRKR

SEQ ID NO: 168744 - protein, 71 aa, Oryza sativa
  Clone ID: PAT_MRT4530_67229C.1.pep
GHSVAYFGFYSLVMKKLESHFDGQHNPKCLETFSYTELFRVFGKTLKQKPPPLKILLLIQGQKNLLFWPAT

SEQ ID NO: 168745 - protein, 115 aa, Oryza sativa
  Clone ID: PAT_MRT4530_6722C.1.pep
MSQRGPHVDPTCCTGLPEDRATARGAASRQSRRAVGRHVVGEEDGADGESEDTAAVVVHGRRSRASALKTATGDAVGRRASRLVRAAAGGVVTELDRPSPFSRQGMCKRGGRRCW

SEQ ID NO: 168746 - protein, 223 aa, Oryza sativa
  Clone ID: PAT_MRT4530_67230C.1.pep
MAPQKRTTLVYSFVARGAPPLADHAEVSGNFASVAAQCLQKLPSTNNRHSYNCDGHTFNYHVHDGFTYCVVATESAGRQLPVGFIERVKEDFSKKYSGGKAKNATANSLKREYGPKLKEHMKYCDAHPEEIDKLAKVKAQVTEVKGVMMQNIEKVLDRGEKIELLVDKTEDLRSQAQDFRKAGTKIRRKMWWENMKMKLIVFGIVVALILVIILTVCRDLNCW

SEQ ID NO: 168747 - protein, 1626 aa, Oryza sativa
  Clone ID: PAT_MRT4530_67231C.1.pep
MDKNDRFVTGQTLVMSSADSHDPTSRLPPAEVEVGEADLHAVQRRDDESLRSYIQRFCQVRNTIPCIPAHAVIYAFRGGVRHNRMLEKIASKEPPTTAELFQLADRVARKEEAWTWNPSGSGVAASAAPGSAAQTGRRDRRRKKRSAHSDDEGHVLAVEGASRATRKGRPASDKKKKASAPSRERPTGKRCTVHNTSLHDLADCRAVKSLAERTRNEAKQKAPAEDIDDGDDDLGFQEPGATIATVDGGACAHVSRRSLKAMKRELLAAAPTHEATRRARWSEVTLTFDQTDHPPCVARGGQIAMVVSPTVCNAKLGRVLIDGGAALNILSPAAFDTIKAPGMVLRPSQPIIGVTPGHTWLLGHIDLPVTFGGSANFRTERVNFDVADLSLPYNAVLGRPALVKFMAAVHYAYLQMKMPGPGGPISVHGDLKVALACMEQRADHLSAASKPEGGDERLGTSVPAAPRQRMITCDEVPKVRRQAPERQAFIREEVARLLEAGFIREVIHPEWLANPVVVPKANGKLRMCIDYTDLNKACPKDPYLLPRIDQIVDSTAGCDLLCFLDTYSGYHQIRMAREDEEKTAFITPIGTYCYTTMPFGLKNAGPTFQRTTQISLGSQIGRNVEAYVDDLVVKTRNQETLLSDLAETFESLRSARIKLNPDKHRGQPREDTSYRADAPPSNLRDVQCVTGCMAALSRFISRLGEKALPLFKLLKRSGPFTWTEEAERALTQLKAYLSSPPVLVAPEPNEPLLLYLAATPQVVSAALVVERDEDNPHSAHPHPVLAWPGREQGGEAPEPNGGPRPPTTGAGPLPACQTVPGAPDPQDGPAATAGRPHLSPSDPEANPVPTRPGREQGEEAPEPNGGLRPLTTGVGPLPACPTTLGAPDPQDGPEATVGRPPLSSSDPEVVGTEDECVPRGRLDEERPRDAAPSKEDWPHRKVQRPVYFVSEALRDAKTRYPQAQKMLYAILMASRKLRHYFQAHRVTVVTSYPLGQILHNREGTGRVVKWAIELSEFDLHFEPRHAIKSQALADFVAEWTPAPEPVSVPEASSDPSQLPHTAHWVMQFDGSLSLQGAEYEGLLAGLRVAAGLGIRRLLVLGDSQLVVNQVCKEYRCSDPQMDAYVRQVRRMERHFDGIELRHVPRRDNTIADELSRLASSRAQTPPGAFEERLTQPSARPDPLGETDAPDRPPRPVGVQASGPEGSAPSSLRLIAWIAEIQAYLTDKTLPEDREGSERVQRISKRYVLVEGTLYRRAANGILLKCIPREQGVELLADIHEGECGAHSASRTLVGKAFRQGFYWPTALNDAVDLVRQCRACQFHAKQIHQSAQALQIIPLSWPFAVWGLDILGPFRRAPGGFEYLYVAIDKFTKWPEAYPVVKIDKHSALKFIKGITARFGVPNRIITDNGTQFTSELFGDYCEDMGIKLCFASPAHPRSNGQVERANAEILRGLKTKTFNILKKHGDSWIEELPAVLWANRTTPSRATGETPFFLVYGAEAVLPSELTLRSPRATMYCEADQDQLRRDDLDYLEERRRRAALRAARYQQSLRRYHQRHVRARSLYVDDLVLRRVQTRAGLSKLSPMWEGPYRVIGVPRPGSVRLATGDGTELPNPWNIEHLRRFYP

SEQ ID NO: 168748 - protein, 1736 aa, Oryza sativa
  Clone ID: PAT_MRT4530_67232C.1.pep
MTAQQRLGAGGRSSATKASGAATAGSVSSRRRARRAAAVTRRSSAIPSSTPPTQEDVRTGPDARLSIECRRNGRRAAHATEGASSSGAPLRFGRGGQPPVPPVGGVGCRAFVASLRNVRWPPRFRPTITEKYDGSVNPAEFLQVYTTGIEAAGGDDRVMANFFPMALKGQARGWLMNLPPTSVHSWEDLCQQFTMNFQGTYPRPGEEADLHAVQRRDDESLRSYIQRFCQVRNTIPCIPAHAVIYAFRGGVRHNRMLEKIASKEPQTTAELFQLADRMARKEEAWTWNSTGSGVAASAAPGSTARSGLRDRRRKKRSAHSGDEGHVLAVEGASRATRKGRPASDKKKEAGAPSRERPTGKWCTVHNTSLHDLADCRAVKSLAERTRKWEEERRQEHREGKAPAAPSGNRRSEAKQKAPAEDIDDGDDDLGFQEPGATIATVDGGACAHASRRSLKAMKRELLAAAPTHEATRRARWSEVALTFDQTDHPPCVARGGQIAMVVSPTVCNVKLGRVLIDGGHIDLPVTFGGSANFRTERVNFDVADLSLPYNAVLGRPALVKFMAAVHYAYLQMKMPGPGGPISVHGDLKVALACMEQRADHLAAASKPEDGNERLSTSVPAAPRQRMITCDEVPEDALVSFLRANADVFAWRPADMPGVPREVIEHRLAVRPGARPVRQKVRRQAPERQAFIREEVARLFEAGFIREVIHPEWLANPVVVPKANGKLRMCIDYTDLNKACPKDPYPLPRIDQIVDSTAGCDLLCFLDAYSGYHQIRMAREDEEKTAFITPIGTYCYTTMPFGLKNAGPTFQRTTRISLGSQIGRNVEAYVDDLVVKTRNQETLLSDLAETFESLRSARIKLNPDKCVFGVPAGKLLGFLVSARGIEANPEKIRAIERMRPPSKLRDVQCVTGCMATLSRFISRLGEKALPLFKLLKRSGPFIWTEEAERAFTQLKAYLSSPPVLVAPEPDEPLLLYLAATPQVDGPGATAGRPRLPPSDPEVVGTEAECAPRGLSDEERPGDAAPSEEDRPRRKVQRPVYFVSEALQDAKTRYPQAQKMLYAILMASRKLRHYFQAHRVTVVTSYPLGQILHNREGTGRVVKWAIELSEFDLHFEPRHAIKSQALADFVAEWTPAPEPISVPEASSGPSQLPHTAYWVMQFDGSLSLQGVGAGVTLTSPNGDVLRYLVRLDFRATNNMAEYEGLLAGLRVAAGLGIRRLLVCKEYRCSDPQMDAYVRQVRRMERHFDGIELRHVPRRDNAVADELSRLASSRAQTPPGAFEERLAQPSARPDPLGETDAPERPPRPVGVQASGPEGSAPSSLRLVAWIAEIQAYLTDKTLPEDREGSERVQRISKRYVLVEGTLYRRAANGVLLRCIPREQGVELLADIHEGECGAHSASRTLVGKAFRQGFYWPTALNDAVDLVRQCRACQFHAKQTHQPAQALQTIPLSWPFAVWGLDILGPFRRAPGGFEYLYVAVDKFTKWPEAYPVIKIDKHSALKFIRGITARFGVPNRIITDNGTQFTSELYGDYCEDMGIKLCFASPAHPRSNGQVERANAEILKGLKTKTFNILKKHGDSWIEELPAVLWANRTTPSRATGETPFFLVYGAEAVLPSELTLRSPRATMYCEAVQDQPRRDDLDYLEERRRRAALRAARYQQSLRRYHQRHVRARSLCVDDLVLCRVQTRAGLSKLSPIWEGPYRVIGVPRPGSVRLATGDGIELPNPWNIEHLRRFYP

SEQ ID NO: 168749 - protein, 1574 aa, Oryza sativa
  Clone ID: PAT_MRT4530_67233C.1.pep
MEKDGETGSVAFSSTAMHRLGTGGRSSATKASGAATAGSVSSRRRARRAAAVTRRSSAIPSSTPPTQEDVRRGPDARLSIERRRNGRRAAHATEGASSSGAPLRFGRGGQPPVPPVGGVGCRAFVASLRNVRWPPRFRPTITEKYDGSVNPAEFLQVYTTGIEAAGGDDRRFCQVRNTIPCIPAHAVIYAFRGGVRHNRMLEKIASKEPQTTAELFQLADRVARKEEAWTWNSTGSGVAASAAPGSAARSGRRDRRRKKRSAHSDDKGHVLAVEGASRATRKGRPASDKKKEAGASSRERPTGKWCTVHNTSLHDLADCRAVKSLAERMRKWEEERRQERREGKAPAAPSGNRRSEAKQKAPAEDIDDGDDDLGFQEPGATIATVDGGACAHASRRSLKAMKRELLAAAPTHEATRRARWSEVALTFDQTDHPPCIARGGQIAMVVSPTVCNVKLGRVLIDGGAALNILSPAAFDAIKALGMVLRSSQPIIGVTPGHTWPLGHIDLPVTFGGSANFRTERVNFDVADLSLPYNAVLGRPALVKFMAAVHYAYLQMKMPGPGGPISVHGDLKVALACMEQRADHLAAASKPEGGNERLSTSVPAAPRQRMITCDEVPVKEEDALVSFLRANANVFAWRPADMPGVPREAPEHQAFIREEVARLLEAGFIREVIHPEWLANPVIVPKANGKLRMCIDYTDLNKACPKDPYPLPRIDQIVDSTAGQIGRNVEAYVDDLVVKTRNQETLLSDLAETFESLRSARIKLNPDKCVFGVPAGKLLGDVQCVTGCMAALSRFISRLGEKALPLFKLLKRSGPFIWTEEAERAFTQLKAYLSSPPVLVAPEPDEPLLLYLAATPQVVSAALVVEHDEDNPHPAHPHPVSTRPGREQGGEAPEPNGGPRPPTAGAGPPPACQTVPGAPDPQDGPGATAGRPRLSPSDPEVVGTEAECAPHDLSDEERPGDAAPSEEDRPRRKVQRPVYFVSEALRDAKTRYPQAQKMLYAILMASRKLRHYFQAHRVTVVTSYPLGQILHNREGTGRVVKWAIELSEFDLHFEPRHAIKSQALANFVAEWTPAPEPISVPETSSGPSQLPPTAYWVMQFDGSLSLQGAGAGVTLTSPNGDVLRYLVRLDFRATNNMAEYEGLLAGLRVAAGLGIRRLLVLGDSQLVVNQAYLTDKTLPEDREGSERVQRISKRYVLVEGTLYRRAANGVLLKCIPQEQGVELLADIHEGECGAHSASRTLAGKAFRQGFYWPTALNDAVDLVRRCRACQFHAKQTHQPAQALQTIPLSWPFAVWGLDILGPFRRAPGGFEYLYVAVDKFTKWPEAYPVIKIDKHTALKFIRGITARFGVPNRIITDNGTQFTSELFGDYCEDMGIKLCFASPAHPRSNGQVERANAEILKGLKTKTFNILKKHGDSWIEELPAVLWANRTTPSRATGETPFFLVYGAEAVLPFELTLRSPRATMYCEADQDQLCRDDLDYLEERRRRAALRAARYQQSLRRYHQRHVRARSLCVDDLVLRRVQTRAGLSKLSPMWEGPYRVIGVPRPGSVRLATADGTELPNPWNIEHLRRFYP

SEQ ID NO: 168750 - protein, 1977 aa, Oryza sativa
  Clone ID: PAT_MRT4530_67234C.1.pep
MQIAKLTRGGQRREEALERVEGSATSTSTGDGEGRRDGERRLLVYGDGSTPQGALQAAGALLRHPPIVPDPESPAQRWLDDVANLVMTARQRLNAGGRSSATKTSGTATTGSASSRRRARRAAAAVRHSAATPSSAPPTREDLRGEPDARISIERRRNGRRAAHATEGASSSGVSPQHGRGDQPSVPPVGGVGCRAFVVSLRNVRWPPRFRPTIAEKYDGSVNPAEFLQVYTTGIEAAGGDDRVMANFFPMALKGQARGWLMNLPPASVHSWEDLCQQFTMNFQGTYPRPGEEADLHAVQRRDDESLRSYIQRFCQVRNTIPCIPAHAVIYAFRGGVRHNRMLEKIASKEPQTTAELFQLADRVARKEESWTWNPSGSGVAASAAPGSAARTGRRDRRRKKRSAHSDDEGHVLAVEGASRATRKGRPASDKKEASAPSRERPTGKWCTVHNTSLHDLADCRAVKSLAERTRKWEEERRQERREGKSPAVPSGNRRREAKQKAPAEDIDDGDDDLGFQEPGATIATVDGGACAHVSRRSLKAMKRELLAAAPTHEAMRRARWSEVALTFDQTDHPPCIARGGQVAMVVSPTVCNVKLGRVLIDGGAALNILSPAAFDAIKASGMVLRPSQPIIGVTPGHTWPLGHIDLPVTFGGCANFRTERVNFDVADLSLPYNAVLGRPALVKFMAAVHYVYLQMKMPGPGGPISVHSDLKVALACMEQRADHLAAASKPEGGDERLGTSVPAAPRQRIVTCDEVPEDALVSFLRANADVFAWRPADMPGVPREVIEHRLAVRPGAKPVRQKVRRQAPERQAFIREEVARLLEAGFIREVIHPEWLANPVVVPKANGKLRMCIDYTDLNKACPKDPYPLPRIDQIVDSTAGCDLLCFLDAYSGYHQIRMAREDEEKTTFITPIGTYCYTTMPFGLKNAGPTFQRTTRISLGSQIGRNVEAYVDDLVVKTRDRETLLSDLAETFESLRSTCIKLNPDKCVFGVPAGKLLGFLVSARGIEANPEKIRAIERMRPPSKLRDVQCVTGCMAALSRFISRLGEKALPLFKLLKRFGPFTWTEEAERALAQLKAYLSSPLVLVAPEPGEPLLLYLAATPQVVSAALVVERDEDNPHSANPHPVLAWPGREQGGEAPEPNGGPRPPTTGAGPLPACQTVPGAPDPQDGPGATAGRPHLSPSDPEVNPVPTRPGREQGEEAPEPNGGLRLPMTGVDPLPACPTTPGAPDPQDGPEATVGRPHLSSSDPEVVSTEDKCAPRGRLDEERPRDAAPGEEDRPHRKVQRPVYFVSEALRDAKTRYPQAQKMLYAILMASRKLRHYFQAHRVTVVTSYPLAQILHNREGTGRVVKWTIELSEFDLHFEPRHAIKSQALADFVAEWTPAPEPVSVPEASSGPSQLPHTAHWVKQFDGSLSLQGAGAGVILTSPSGDVLRYLVRLDFRATNNMAEYEGLLAGLRVAAGLGIRRLLMDAYVRQVQRMERHFDGIELRHVPRRDNTIADELSRLASSRAQTPPGAFEERLAQPSARPDPLGETDAPDRPPRPVGVQASGPEGSAPSSLRLIAWIVEIQAYLTDKTLPEDREGSERVQRISKRYVLIEGTLYRRAANGILLKCIPREQGVELLADIHEGECGAHSASRTLVGKAFRQGFYWPTALNDAVDLVRRCRACQFHAKQIHQPAQALQIIPLSWPFAVWGLDILGPFRRAPGGFEYLYVAIDKFTKWPEAYPVVKIDKHSALKFIKGITARFGVPNRIITDNGTQFTSELFGDYCEDMGIKLCFASPAHPRSNGQVERANAEILKGLKTKTFNILKKHGDSWIEELPAVLWANRTTPSRATGETPFFLVYGAEAVLPSELTLKSPRATMYCEVDQDQLRRDDLDYLEERRRRAALRAARYQQSLRRYHQRHVRARSLCVDDLVLRRVQTRAGLSKLSPMWEGPYRVIGVPRPGSVRLATGDGTELPNPWNIEHLRRFYP

SEQ ID NO: 168751 - protein, 1461 aa, Oryza sativa
  Clone ID: PAT_MRT4530_67235C.1.pep
MKRELLAAAPTHEATRQARWSEVALTFDQTDHPPCVARGGQIAMVVSPTVCNVKLGRVLIDGGAALNILSPAAFDAIKAPGMMLRPSQPIIGVTPGHTWALGHIDLPVTFGGPANFRTERVNFDVADLSLPYNAVLGRPALVKFMAAVHYAYLQMKMPGPGGPISVHGDHKVALACMEQRADRLAVVSKPEGGDERLGTSAPAAPRQRIVTCDEVPVKKEDALVSFLRANADVFAWRPADMPGVPREVIEHRLAVRPGARPVRQKVRRQASERQAFIREEVARLLEAGFIREVIHLEWLANPVVVPKANGKLRMCIDYTDLNKACPKDPYPLPRIDQIVDSTAGCDLLCFLDAYSGYHQIRMAREDEENTAFITPIGTYCYTTMPFGLKNAGPTFQRTTRISLGSQLGRNVEAYVDDLVVKTRNQETLLSDLAKTFESLRSARIKLNPDKCVFGVPAGKLLGFLVSARGIEANPEKIRAIDRMRPPSKLRDVQCVAGCMAALSRFISRLGEKALPLFKLLKRSGPFTWTEEAECALTQLKAYLSSPPVLVAPEPNEPLLLYLAATPQVVSAALVVERDEDNPHSAHPHLVQTWPGREQGGEAPEPNGGPRPPTTGVGPLPACQTVLGAPDPQEGPEATVGRPHLSPFDPEANPVLIRPGKEQGEEAPEPNGGLRPLTTGVGPLPACPTMPGAPDPQDGPEATVGRPPLLSSDPEVISTEDKCAPRGCLDEECPRDVAPGEEDRPHRKVQRPVYFISEALRDAKTRYPQAQKMLYAILMASRKLRHYFQAHRVTVVTSYPLGQILHNREGTGRVVKWAIELSEFDLHFEPHHAIKSQALADFVAEWTPAPEPVSVPEASSDPSQLPHTAYWVMQSDGSLSLQGAGAGVTLTSPSGDVLRYMIRLDFRATNNMAEYEGLLAGLRVAAGLGIRRLLVLGDSQLVVNQVCKEYRCSDPQMDAYVRQVRRMERHFDGIELRHVPRRDNMMADELSRLASSRAQTPPGAFEERLAQPSARPDPLGETEAPDRPPRPVGVQASGPEGSAPSSLRLIAWIAEIQAYLTDKTLPEDREGSERVHRISKRYMLVEGILYRRAANGILLKCIPRERGVVLLADIHEGECGAHSASRTLVGKAFRQGFYWPTALNDAVDLVRRCRACQFHAKQIHQPAQALQTIPLSWPFAVWGLDILGPFRRAPGGFEYLYVAIDKFTKWPEAYPVVKIDKHSALKFIKGITARFGVANRIITDNGTQFTSELFGDYCEDMGIKLCFASPAHPRSNGQVERANAEILKGLKTKTFNILKKHGDSWIEELPAVLWANRTTPSRATGETPFFLVYGAEAVLPSELTLKSPRATMYCEADQDQLRRDDLDYLEERRRRAALRAARYQQSLRRYHQRHVRARSLCVDDLVLRCVQTRAGLSKLSPMWEGPYRVVGVPRPGSIRLATGDGTELPNPWNIEHLRRFYP

SEQ ID NO: 168752 - protein, 1963 aa, Oryza sativa
  unsure (1)..(1963): unsure at all Xaa locations
  Clone ID: PAT_MRT4530_67236C.1.pep
MAERAKAHNLSPSASGDDGEPNPRRRARTPPPPSRQNPRREEALERVEGSATSIPTGDGEERRDGARRLLVYGDGSTPQGALQAAGALLRHPPVVPDPESPAQRWLDDVANLVMTAQQRLGAGGRSSATKASGAATAGSVSSRRRARRVAAVARHSAAIPSSTPPTQEDVCGGPDACLGFELRRNGRRAAHATEGASSSGASLQYGRGGRPSVPPFGGVGCRAFVASLRNVRWPPRFRPTIAEKYDGSVNPAEFLQVYTTGIEAAGGDDRVMANFFPMALKGQARGWLMNLPPASVHSWEDLCQQFTMNFQGTYPHPGEEADLHAVQRRDDESLRSYIQRFCQVRNTIPCIPAHAVIYAFRGGVRHNRMLEKIASKEPQTTAELFQLADRVARKEEAWTWNSSGSGVAVSAAPGSAAQSGRRDKRRKKRSAHSDDEGHVLAVEGASRATRKGRPASDKKKEAGAPSRERPTGKWCSVHNTSLHDLVDCRAVKSLAERTRKWEEERRQERREGKSPAAPAGNRRSEAKQKAPAEDIDDGDDGLGFQEPGATIATVDGGACAHVSRRSLKAMKRELLAAAPTHEAMRRARWSEVALTFNQTDHPPCVARGGQIAMVVSPTVCNVKLGRVLIDGGAALNILSPTAFDAIKAPGMVLRPSQPIIGVTPGHTWPLGHIDLPVTFGGSANFRTERVNFDVADLSLPYNAVLGRPAFVKFIAAVHYAYLQMKMPGPGGPISVHGDIKVALACMEQRAEHLAAASKPEGGDERLGTSVPAAPRQRMITCDEVPEDALVSFLRANADVFTWRPADMPGVPREVIEHRLAVRPGARPVRQKVRRQAPERQAFIREEVARLLEAGFIXEVIHPEWLANPVVVPKANGKLRMCIDYTDLNKACPKDPYPLPRIDQIVDSTAGCDLLCFLDVYSGYHQIRMAREDEEKTAFITPIGTYCYTTMPFGLKNAGPTFQHTTRISLGSQIGHNVEAYVDDLVVKTCNQETLLSDLAETFESLRSTRIKLNPDKCVFGVPAGKLLGFLVSARGIEANPEKIRAIERMCPPSKLRDVQCVTGCMAALSRFITRLGEKALPLFKLIKRSRPFTWTEEAERALTQLKAYLSSPPVLVDPEPNEPLLLYLAATPQVVSAALVVERDEDKPHSTRPHPASTRPGREQGGEAPESNGGPRPPTAGAGPPPACPKVPGAPDPQDGHGATAGRPRLSPSDPEVIGTEAECAPRGLSDEERPGDAAPSEEDRPRRKVQRPVYFVSEALRDAKTQYPQAQKMLYAILMASRKLRHYFQAHRVTVVTSYPLGQILHNREGTGWVVKWAIELSEFDLHFEPRHAVKSQALADFVAEWTPAPEPISVPEASSGPSQLPHTAYWVMQFDGSLSLQGAGAGVTLTSPSGDVLKYLVRLDFRATNNMAEYEGLLAGLRVAAGLGIRRLLVLGDSQLVVNQVSKEYQCSDPQMDAYVRQVRRMERHFDGIELWHVPRRDNTVADELSRLASSRAQTPPGAFEERLAQPSARPDPLGETDASERPPRPVGVQASGPEGSAPSSLRLIAWIAEIQAYLTDKTLPEDREGSERVQRISKRYVLVEGTLYRRAANGVLLKCIPREQGVELLADIHEGECGAHSASRTLVGKAFHQGFYWPTALNDAVDLVRRCRACQFHAKQIHQPAQALQTIPLSWPFAVWGLDILGPFRWAPGGFEYLYVAVDKFTKWPEAYPVVKIDKHSALKFIKGITARFGVPNRIITDNGTQFTSELFGDYCEDMGIKLCFASPAHPRSNGQVERANAEILKGLKTKTFNILKKHGDSWIEELPAVLWANRITPSRATGETPFFLVYGAEAVLPSELTLRSPRATMYCKXDQDQLRRDDLDYLEERRRRAALRAAQYQQSLRRYHQRHVRARSLCVDDLVLRRVQTRAGXSKLSPMWEGPYRVIGVPRPGSVRLATGDGTELPNPWNIEHLHRFYP

SEQ ID NO: 168753 - protein, 734 aa, Oryza sativa
  unsure (1)..(734): unsure at all Xaa locations
  Clone ID: PAT_MRT4530_67237C.1.pep
MAEQAKVHNLSPSVSGDDGEPNPRRRARTPPPPPHQSPRREEVLERIEGSATSTSTGDGEGRRDGERRLLVYGDGSTPQGALQAAGALLRHPPVVPDPESPAQRWLDDVANLVMTARQRLGAGGRSSATKTSGAATTGSVSSRRRARRAAAVARHSAATPSSAPPTQEDLRGGPDARISIERRRNGRRAAHATEGASSSGVSHQHGRGDQPSVPPVGGVGCRAFVASLRNVRWPPRFWPTIAEKYDGSVNPAEFLQVYTTGIEAAGGDDRXIYPRPGEEADLHAVQRRDDESLRSYIQRFCQVRNTIPCIPAHALADRVARKEEAWTWNPSGSGVAASAAPGSAAQTGRRDRRRKKRSAHTDDEGHVLAVEGASRATRKGRPAGDKKKEAGAXERPTGKWCIVHNTSLHDLADCRAVKSLAERTRKWEEERRQERREGKSPAVPSGNRRSEAKQKAPAEDIDDGDDDLGFQEPGATIATVDGGACAHVSRRSLKAMKRELLAAAPTHEATRRARWSEVALTFDQTDHPPCVARGGQIAMEVSPTFCNVKLGRVLIDGGAALNILSPAAFDAIKAPGMVLRPSQPIIGVTPDHTWPLGHIDLPVTFGGSANFRTERVNFDVADLSLPYNAVLGRPALVKFMAAVHYAYLQMKMPGPGGPISVHGDLKVALACMEQRADHLTAASKPEGGDERLGTSAPAAPRQRIVTCDEVPVKEVALGDGPSKTTRIGGLLDGK

SEQ ID NO: 168754 - protein, 309 aa, Oryza sativa
  Clone ID: PAT_MRT4530_67238C.1.pep
MDEQRGRGGFDELVLLHQQQEQRRRREQQQEEEEEEEVRRQMFGAVVGGLAAFPAAAAALGQQQVDCGGELGGFCDSEAGGSSEPEAAAGARPRGGSGSKRSRAAEVHNLSEKRRRSKINEKMKALQSLIPNSNKTDKASMLDEAIEYLKQLQLQVQMLSMRNGVYLNPSYLSGALEPAQASQMFAALGGNNVTVVHPGTVMPPVNQSSGAHHLFDPLNSPPQNQPQSLILPSVPSTAIPEPPFHLESSQSHLRQFQLPGSSEFHKILFLHMVFHGEIMPKHHLSSHQESLPGNEMNSIRKESSMLNTN

SEQ ID NO: 168755 - protein, 1970 aa, Oryza sativa
  unsure (1)..(1970): unsure at all Xaa locations
  Clone ID: PAT_MRT4530_67239C.1.pep
MAERAVAHNLSPSASGDDGEQNPRRRVRTPPSPSRRSLGREEAFEGVERSATSPPAGDGEGRRDGERRLLVYGDGSTPQGALQAAGALLRHPPIVPDPETPARRWLDDVADLVMTAQQRLGAGGRSSATKTSGAATTGSVSSRRRARRAAAVSRRSSAIPSSTPPTQEDVRGGPDTRPSIERRRNGRRAAHAMEGASSSGAPLRFGHRGQPPVSPVGGAGCRAFVASLRNVRWPPRFRPTITEKYDGSVNPAEFLQIYTTGIEAAGGDDRVMANFFPMALKGQARGWLMNLPPASVHSWEDLCQQFTTNFQGTYPRPGEKADLHAVQRRDDESLRSYVQRFCQVRNTIPCIPAHAVIYAFRGGVRHNRMLEKIASKEPQTTAELFQLADRVARKEEAWTWNSSGSGVAAPAASGTAARSGRRDRRKKKRSAHSDDEGHVLAVEGASRATRKGRPASDKKKEAGQKFGKWCSVHNTSLHDLADCRAVKSLAERTRKWEEERRQERREGKAPAAPAGNRRGEAKQKATTGDEPGAIVATVDGGACAHVSRRSLKAMKRELLAVAPTHEATRRARWSEVALTFDQTDHPPCVARGGQIAMVVSPTVCNVKLGRVLIDGGAALNILSPAAFDAIKAPGMVLRPSQPIIGVTPGHTWPLGHIDLPVTFGGSANFRTERVNFDVADLSLPYNAVLGRPALVKFMAAVHYAYLQMKMPGPGGPITVHGELKVALACMXQRADHLAAASKPEGXALVSFLRANADVFAWRPADMPGVPREVIEHCLAVRPGARPVRQKVRRQAPERQAFIREEVARLLEAGFIREVIHPEWLANPVVVPKANGKLRMCIDYTDLNKACPKDPYPLPRIDQIVNSTAGCDLLCFLDAYSGYHQIRMAREDEEKTAFITPVGTYCYTTMPFGLKNAGPTFQRTTRISLGSQIGRNVEAYVDDLVVKTRNQETLLSDLAETFESLRSARIKLNPDKCVFGVPAGKLLGFLVSARGIEANPEKIRAIERMRPPSKLRDMLGEKALPLFKLLKRSGPFTWTEEAERALTQLKAYLSSPPVLVAPELDEPLLLYLAAAPQVVSAALVVERDEDNPHSAHPHPVPTRPGREQGGEAPEPNGGPRPPTTGAGPPPACQTVSGAPDPQDGPGATAGRPHLPLSDPEVNPVSTRPGREQGGEAPELNGGPRPPTAGDGPPPACPTVPGTPDPQDGLGATAGRPRLSPSDPEVVGTEAECAPCGLSDEERPGDAAPSEEGWPRRKVQRPVYFVSEALRDAKTRYPQAQKMLYAILMASRKLRHYFQAHRVTVVTSYPLGQILHNREGTGRVVKWAIELSEFDLHFEPRHAIKSQALTDFVAEWTPAPEPVSVPEASSGPSHLPHTAYWVMQFDGSLSLQGAGAGVTLTSPSGDVLRYLVRLDFRATNNMAEYEGLLAGLRVAAGLGIRCLLVLGDSQLVVNQVCKEYRCSDPQMDAYVRQVRRMERHFDGIELRHVPRRDNAVADGLSRLASSRAQTPPGAFEERLAQPSARPDPLGETDAPERPPRPVGVQASGPEGSAPSSPRLIAWITEIQVYLADKTLPEDREGSERVQCISKRYVLVEGTLYRRAANGVLLKCIPREQGVELLADIHEGECGAHSASRTLVGKAFRQGFYWPTALNDAVDLVRRCKACQFHARQPHQLAQALQTIPLSWPFAVWGLDILGPFRQAPGGFEYLYVAVDKFTKWPEAYPVIKIDKHSALKFIRGITARFGVPNRIITDNGTQFTSELFGDYCEDMGIKLCFASPAHPRSNGQVERANAEILKSLKTKTFNILKKHGDSWIEELPAVLWANRTTPSRATGETPFFLVYGVEAVLPSELTLRSPRATMYCEADQDQLRRDDLDYLEERRRRAALRAARYQQSLRRYHQRHVRARSLCVDDLVLRRVQTRAGLSKLSPMWEGPYRVIGVPRPGSVRLATGDGTELPNPWNIEHLRRFYP

SEQ ID NO: 168756 - protein, 162 aa, Oryza sativa
  Clone ID: PAT_MRT4530_6723C.1.pep
MACDQQAELRRVFELFDRDGDGRITREELTESLERLGMPVHREELAATIARIDANGDGCVDMDEFTQLYETVMRVDGGGGGGACDVDEASMREAFDVFDRNGDGFITVDELGAVLASLGIKQGRTAEDCGRMIGQVDRDGDGRVDFLEFKQMMRGGAFATLR

SEQ ID NO: 168757 - protein, 115 aa, Oryza sativa
  Clone ID: PAT_MRT4530_67240C.1.pep
VSFKELAATEKCAGKDSICPVCLECPHNAALLLCSAHDKGCRSYICATNYHHSNCLDQLIDSRRSSKDCEDLDSIELTCPLCRGEVKGYTLVEPAWEQLNQNKRSCLQDGCSYMG

SEQ ID NO: 168758 - protein, 1873 aa, Oryza sativa
  unsure (1)..(1873): unsure at all Xaa locations
  Clone ID: PAT_MRT4530_67241C.1.pep
MAEQAKAHNLSPSVSGDDGEPNPRRRARTPPPPPRQSPRQEEALERVEGSATSTSTGDGEGRRDGERRLLVYGDGSTPQGALLRHPPIVPDPESPAQRWLDDVANLVMTARQRLGAGGRSSATKTSGAATTGSVSSRRRARRAAAVARHSAATPSSAPPTQEDLRGGPDARISIERRRNGRRAAHATEGASSSGVSHQHGRGDQPSVPPVPAHIAEKYDGSVNPAEFLQVYTTGIEAARGDDRVMANFFPMALKGQARGWLMNLPPASVHSWEDLCQQFTMNFQGTYPRPXFCQVRNTIPCIPAHAVIYAFXGGVRHNRMLEKIASKEPQTTAELFQLADRVARKEEAWTWNPSGSGVAASAAPGSAARTGRRDRRRKKRSAHSDDEGHVLAVEGAPWATRKGRPASDQKKEAGALSRERPTGMWCIVHNTSLHDLADCRAVKSLAERTRKWEEERRQERREGKSPAVPSGNRRSEAKQKAPAEDIDDGDDDLGFQEPGATIATVDGGACAHVSRRSLKAMKRELLAAAPTHEATRRGRWSEVALTFDQTDHPPCVARGGQIAMVVSPTVCNVKLGRVLIDGGAALNILSPAAFDAIKAPGMVLRPSQPIIGVTPGHTWPLGHIDLPVTFGGSANFRTERVNFDVADLSLPYNAVLGRPALVKFMAAVHYAYLQMKMPGPGGPISVHGDLKVALACMEQRADHLAAASKPKGGDERLGTSAPAVPRQRIVTCDEVPEDALVSFLWANADVFAWRPADMPGVPREVIEHRLAVRSGARPVRQKVRRQAPERQAFIREEVARLLEAGFIREVIHPEWLANPVVVPKANGKLRMCIDYTDLNKACPKDPYPLPRIDQIVDSTAGCDLLCFLDAYSGYHQIRMAREDEEKTAFITPIGTYCYTTMPFELKNAGPTFQRTTRISLGSQIGRNVEAYVDDLVVKTRNQETLLSDLAETFESLRSARIKLNPDKCVFGVPAGKLLGFLVSARGIEANPEKIRAIERMRPPSKLRDVQCVTGCMAALSRFISRLGEKALPLFKLLKRSGPFTWTEEAERALTQLKAYLSSPPVLVAPEPNEPLLLYLAATPQVVSVALVVERDEDNPHSAHPHPVLAWPGREPGGEAPEPNGGPRPPTTGAGPLPACQTVPGAPDPQDGPRATAGRPHLSPSDPEANPVPTRPGREQGEEAPEPNGGLRPLTTGVGPLPACPTTPGAPDPQDGPEATVGRPPLSSSDPEVVGTEDECTPEALRDAKTRYPQAQKMLYAILMASRKLRHYFQAHRVTVVTSYPLGQILHNREGTGRVVKWAIELSEFDLHFEPRHAIKSQALADFVAEWTPAPEPVSVPEASSGPSQLPHTAHWVMQFNGSLSLQGAGAGVTLTSPSGEVLRYLVRFDFRATNNMAEYEGLLAGLRVAAGLGIRRLLVLGDSQLVVNQVCKEYRCSDPQMDAYVRQVRRMERHFDGIELRHVPRRDNTVADELSRLASSRAQTPPGAFEERLAQPSARPDPLGETDAPDRPPMPVGVQASGPEGSAPSSLRLIAWIAEIQAYLTDKTLPEDREGSERVQRISKRYVXGECGAHSALRTLVGKASRQGFYWPTALNDAVDLXRAPGGFEYLYVAIDKFTKWPEAYPVVKINKHSALKFIKGITARFGVPNRIITDNGTQFTSELFGDYCEDMGIKLCFASPAHPRSNGQVERANAEILRGLKTKTFNILEKHGDSWIEELPAVLWANRTTPSRATGETPFFLVYGAEAVLPSELTLRSPRATMYCEADEDQLRRDDLDYLEERRRRAALRAARYQQSLRRYHQRHVRARALCVDDLVLRRVQTRAGLSKLSPMWEGLYRVIGVPRPGSVRLATGDGTELPNPWNIEHLRRFYP

SEQ ID NO: 168759 - protein, 565 aa, Oryza sativa
  Clone ID: PAT_MRT4530_67242C.1.pep
MSWHRAGVLLLGAQSCLPVPGVPAVGGIGSVLLSMARMGWKLCHVFRLYTVVCRLEETMLGIIRHDNIVVLRGSIQSDDDDGTVQLVYEDMENGCCLHEWLHGNRRSQLEAGERQRRRRLRWRARRSIAVDVARAICYLHHDCKSPIIHRDIKPTNILLDGNLKAKIAGFGLARINVAGLNQPLLNVEIPSEAFGYTAPEYATAQLVTGRLGNEPGVNNGHLAMWAHRGYGRHLSKDVVDKEIVPDMARYLKEMKAMFKLGIGCRNGQVTSLSFHNFQIANLIPASICSLKNLKYLDLSFNNLTGEFPTALYSCSALQFLDLSNNEFTGKLPEHVDKLSLGMQHLNLSRNSFIGDLPSAIGRFSKLKSLVLDSNNFNGTYQGAAIGGLVELEMLTLAYNPFKASLIPNEFGKLTKLTYLWLSWMNLIGNIPNVLSALTELELLDISINKLEGKNPKELDLSINKLTGSIPEDIVNLKNLKILYLYYNNLVGQIPSGVGMLPNLTDLRLFTCHGVFPVSLGDCDTIHIIKASNNHFVGDFPEKIWSCAMLTIVMIGGNNFTGTLPS

SEQ ID NO: 168760 - protein, 1971 aa, Oryza sativa
  unsure (1)..(1971): unsure at all Xaa locations
  Clone ID: PAT_MRT4530_67243C.1.pep
MAEQAKAHNLSPSVSGDDGEPNPRRRARTPPPPPRQSPRGEEALERVEGSATSTSTGDGEGRRDGERRLLVYGDGSTPQGALQAAGALLHHPPIVPDPESPAQRWLDDVANLVMTARQRLGAGGRSSATKTSGAATTGSVSSRRRARRAAAVACHSAATPSLAPPTQEDLRGGPDARISIERRRNGRRSAHATEGASSSGVSHQHGRGDQPSVPPVGGVGCRAFVASLRNVCWPLRFRPTIAEKYDGSVNPAEFLQVYTTGIEAAGGDDRVMANFFAMALKGQARGWLMNLPPASVHSWEDLCQQFTMNFQGTYPRPGEEADLHAVQRRDDESLRSYIQRFCQVRNTIPCIPAHAVIYAFRGGRRDRRRKKRSAHSDDEGHVLAVEGASRATRKGRPASDKKKEAGTPSRERPTGKWCIVHNTSLHDLADCRAVKSLAERTRKWEEERRQERREGKSPAVPSGNRRSEAKQKAPAEDIDDGDDDLGFQEPGATIATVDGGACAHVSRRSLKAMKRELLAAAPTHEATRRARWSEVALTFDQTDHPPCVARGGQIAMVVSPTVCNVKLGHVLIDGGAALNILSPAAFDAIKAPGMVLRPSQPIIGVTPGHTWPLGHIDLPVTFGGSANFRTERVNFDVADLSLPYNAVLGRPALVKFMAAVHYAYLQMKMPGPGGPISVHGDLKVALACMEQRAEHXLHRASKPEGGDERLGTSVPAAPRQRMITCDEVPEDALVSFLRANADVFAWRPADMPGVPREVIEHRLAVRPGARPVRQKVRRQASERQAFIREEVARLLEAGFIREVIHPEWLANPVVVPKANGKLRMCIDYTDLNKACPKDPYPLPRIDQIVDSTAGCDLLCFLDAYSGYHQIRMAREDEEKTAFITPIGTYCYTTMPFGLKNAGPTFQRTTRISLGSQIGRNIEAYVDDLVVKTRNQETLLSDLAETFGSLRSARIKLNPDKCVFGVPAGKLLGFLVSARGIEANPEKIRAIERMRPPSKLRDVQCVTGCMAALSRFISRLGEKALPLFKLLKCSRPFTWTEEAEHALTQLKAYLSSPPVLVAPEPDEPLLLYLAATPQVVSAALVVERDEDNPHSAHPHPVLAWPGREQGGEAPEPNGGPRPPTTGAGPLPACQTVPGAPDPQDGLRATAGRPHLSPSDPEVNPVPIRPGREQGGEAPEPNGGPRPPTTGVGPLPACPTTPGAPDPQDGPEATVERPRLLSSDPEVVGTEDECAPRGRLDEERPRDAAPSEEGRPHRKVQRPVYFVSEALRDAKTRYPQAQKMLYAILMASRKLRHYFQAHRVTVVTSYPLGQILHNREGTGRVVKWAIELSEFDLHFEPRHAIKSQALADFVAEWTPAPEPLSVPEASSGPSQLPHTAHWVMQFDGSLSLQGAGAGVTLTSPSGDILRYLVRLDFRATNNMAEYEGLLAGLSVAAGLGIRRLLVLGDSQLVVNQVCKEYRCSDPQMDAYVRQVRRMERHFDRIELRHVPRRDNTIADELSRLASSRAQTPPGAFEERLAQPSARPDPLGETDAPDRPPRPVGVQTSGPEGSAPSSLILIAWIDEIQAYLTDKTLPEDREGSERVQRISKRYVLAEGTLYRRAANGILLKCIPREQGVELLADIHEGECGAHSASRTLVGKAFRQGFYWPTALNDAVDLVRRCRACQFHAKQIHQPAQALQIIPLLWPFAVWGLDILGPFRRAPGGFEYLYVMIDKFTKWPEAYPVVKIDKHFALKFIKGITARFGVPNRIITDNGTQFTSELFGDYCEDMGIKLCFASPAHPRSNGQVERANAEILRGLKTKTFNILKKHGDSWVEELPAVLWANRTTPSRATGETSFFLVYGAEAVLPSELTLRSPRATMYCEANQDQLRRDDLDYLKERRRRAALRAARYQQSLRRYHQRRVRARSLCVDDLVLRRVQTRAGLSKLSPMWEGPYRVIGVPRPGSVRLATGDGTELPNPWNIEHLRRFYP

SEQ ID NO: 168761 - protein, 194 aa, Oryza sativa
  Clone ID: PAT_MRT4530_67244C.1.pep
SVVGCQFSGDIPKELSQLPKLRFLSLNNNRFTGSIPPSIGNLSNMYWLDLGENRLTGSLPVSDGTNTGLDNLTNALHLLLDNNNFTGGIPPTLTLLTKLEVLHLENNKLTGPLPDLTGMDSLYVVNLENLHITGELPQPLFKLPAIQTLGLKGNNFNGTLTIGSDYSSTLSLIDLQDNQITTLAVSGAQYNKKL

SEQ ID NO: 168762 - protein, 437 aa, Oryza sativa
  unsure (1)..(437): unsure at all Xaa locations
  Clone ID: PAT_MRT4530_67245C.1.pep
RRPSPAARAPPLPPPPXAAPPSAARAPPLPPPPRRRSPTPXPLPPPPQPQRKPPPPPPPPCTPRAPPPSAPPPPPPGHPSAPPPPPGRRSPPPPTPRXTKPPRPSPPPRSPTAKPCPLPFDQPTTRGSPSAWPSTTATSPSPTTSRRCSTSPTPPTPPPPPPPPPPSSPPPRTRMTPSPLPPTPPPPGPDQPRARRAARRPRPQPPXPSASLPRSSRPPPPSSAPMPPPSACAAPPSGGRCASGSSPRRSPPCSPSTSCSPSPSSPAAATTSTTRCPLPEQPPSPHTXLSPRAASPPPSPSSPPPPCGSPLPGSSSSPRTPPSSSPASPAIPPSPAPPPHLLSSPPGSPSPVPPLPPPPPLGSRRRPPSPPPPPQTLSLCVSIPSRPRANPILFAPSFPAKDRVFFSARLFPFSSQRLPYPWSNLQCRTIQGSIAQW

SEQ ID NO: 168763 - protein, 75 aa, Oryza sativa
  Clone ID: PAT_MRT4530_67246C.1.pep
MSSGEESRKPEWRVPQRVLGKGIPPRRRRAGLRRKGEPPGAGGGSGGKEIHLALVGQGVVVCGGDGKKRAVRSEV

SEQ ID NO: 168764 - protein, 1103 aa, Oryza sativa
  Clone ID: PAT_MRT4530_67247C.1.pep
MELVTGAMGSLLPKLGQLLNEYGLQAGLQKKIESLSWELESVHVVLRMVGQVPPEQLDQLVKLWAWDLREASYDMEDIIDAFMVHIDGREDPADPHILRRLRKKISILFKKTKARREIAGAIQDINEKLEEVAARRGRYTVNNIVTKPVVPEDIDPRLLNLYKRATELVGIEGQMDNLIKMLSLGNDIDLFDKTVRVVSVVGIGGLGKTTLVKAVYEKLKPGFDCGAFVPVGQNPDMKKVLRDIIIDLDKKTYTDFNITLFDERQLINKLQEILQEKSLVSSSWGSFTVMRIYRCFIVIDDMWDKKSWGLIRCALQDSNHRSRVVVTTRVFEVATYVGDVYKTQPLSRNDSEKLLYTRIVQGEGKCLDSSLVEVCDKFLKKCGGVPLAIITIASLLANKPQEDWSEVYSTIVLGHGGNDDVENTRRILSLSYYDLPLHLKPCLLYLSIFPEDYYIEKNLLIWKWIAEGFVHEKQAPGVGLFELGEGYFNELINRSMIQPVEAEDKGYVDGCRVHDMVLDMICLLSFEENFVTVLDGSEKQESPRIKTRRLALQHRNFEENRHQLGNVGVDQLRSFVVSECDGITVESPSFHVLRVLALENHFSRNYYCKHILQHLGNLHHLRYLGLQNVRTSELPDEVGDLKFLQVLDLSGTGIQELPESVGLLTKLLSLRANEGTRVSAGSIVKLTSLQEMWICPADISQFVKVLGKLRELRVLHTSLFTHGQDERTDRDLLESLQNLHKIHTIDIGGSSRMKSVMWEAGFTSPRRLRHLRLRSLVFYRMPVGINPLLLPNLCYLDLQVQIVKEQDMETLGRLPELRHLKLCSCKTHVVSVEKAAGDGYFRKLRYFSTPCSFLRFDLHGVICSTKTIMPRLESLEFFVRVLFLRDANLLGFDKLLGFGNHGRTSLRRVEATMACSGARVTEVEEAEAALAQVAAVHPNRPTLKTTRLGDSKIHSPYKEPTSVNPKVVFQNVNVREMKDDDGYFDFHWLLRNPWVKKFGVSIFCEDLRFRSFAYLKLVSHSQPEVVHRDVNVRKIKDKGRNIKFSWLLRNQYVEKFRISINCENASLREVKEAEETAREVTWIHPNSPRVEIVRYGEDKMVSD

SEQ ID NO: 168765 - protein, 91 aa, Oryza sativa
  Clone ID: PAT_MRT4530_67248C.1.pep
RFLGTSSGEVDPSPVSLGEADDPLPTSSGEVDHRLRAQGRPIIHQLVCNLLFVLVDLIIAVFDVVLVYTCLFLFVYGSDSNLNMMLACNEN

SEQ ID NO: 168766 - protein, 110 aa, Oryza sativa
  Clone ID: PAT_MRT4530_67249C.1.pep
MVFPNDAHPGKSVVGKGSEGDGRNGAGKSIALATRGGGCGGGERRWRMTVAKAVGDLATVTVAWRRGARRRRRHIWKGRDGDDAVVADGGGGRPTGKRKEAAQLGLGRLG

SEQ ID NO: 168767 - protein, 231 aa, Oryza sativa
  Clone ID: PAT_MRT4530_6724C.1.pep
TWASAWVSESGGVFNNGELQTLINSIWYLDQLGMASKYNTKIFCRQTLIGGHYGLLDTQTFLPNPDYYSALLWHRLMGREVLSVDINAPRKLRAYAHCRKQQQGITLLLINLSNTTGYNVTLQNDINVSLDKTASLHKHNSFSHSLRRAVSWLGRKPSSDVARREEYHLTAKDGDLQSKTMLLNGAPLELSDDGGVPAMSPALVAVNSPVYLAPTSIAFVVLPMFEAKACS

SEQ ID NO: 168768 - protein, 609 aa, Oryza sativa
  Clone ID: PAT_MRT4530_67250C.1.pep
MGPAPKAEPMKQRVNRCLLRLSDRDTEAMAAAELDGIARGLEADELPAFLAAVLVAAALRRVRDPDSSVRAALVDAARAAAAAAGAADAALAPLVGALLHEQDQCAQLASALAAAAAVEASAPSADLAAYLQALLPRLLKLLRSSAFKAKPALISLIGAASAASGGGAAATAVPSLRDALTGEDWAARKAAAEALALLALEHGDNLVEQKPSCIAVFEAKRFDKVKIVRESMNRMIEAWKEIPDMDEEVCSSDVPPSPQSQTRSSSTDSASDGRYPADSLGSNSVQSVRRRNLSPTKKSPPREALHNVSNRRTSSSSIGNKKNSPPSRHNSGQAKNFECKVNVTDAPDATPIKTVTEEKLLKDGNVRARLEARRVLFQKNGEERYNKVPGLKSGSRVVPYNGDDDSEEIAESEDVHEEFQSGHKEEDLSKIRMQLVQIENQQTSLLNLLQKFMGSSQNGIRSLETRVNGLEMALDEISRDLAASSGRMPSSEPDMNCCILSPKFWRRHDGSRYSSKYSISDIANYSEESRTSYKWERQKFGVQGVVTNPLAEPNASFAGNTVVAQEARRQNSAQYKSRRWCHGDHPRAARTASSGRQWMTSSHFCKSAL

SEQ ID NO: 168769 - protein, 159 aa, Oryza sativa
  Clone ID: PAT_MRT4530_67251C.1.pep
MAQTDKTKVTSGGRRAGDSGYIVDEEDDEEAKARGGAVEGSTLTKMTERDTTGRGTPWDHPEEGLGKEGSGCGSGGTQGSRNTSFSSREEQRSSAIGIPCEKLHVCCSSSGSVGGQSRVGPGSSRERPTRVLGSEADVSDAAKDEGNRVPWSPTGIVAG

SEQ ID NO: 168770 - protein, 218 aa, Oryza sativa
  Clone ID: PAT_MRT4530_67252C.1.pep
MQNQQQQEEEENWGNQYANFKWYDVVLSVVAVLVAVLAMAVLVEAVLVMRSNQYDLELKVRQGAVKVKLLQPPSWMRMNFTLAATNPITNTAATDVNISLSVTDITVTSGNKTLMTEFHVDRGNVSVGPGHTEYVIWLQDASDSSFFDQLENNRKVTIELKVRGDTDTRITPLNEDAFDPPSRHVVFDCAGVSLTVVDDLSMIDHGGNKDDDVSCSYV

SEQ ID NO: 168771 - protein, 166 aa, Oryza sativa
  Clone ID: PAT_MRT4530_67253C.1.pep
MSSHDPSSATAADAVAGGSYRVCDTVVLVCLAFASSIIVFTVAVCFRRAVTLQGYAASASASPSGRGGGAAAAPAAVGGLRGLAPSALAAIPKFAYRRGAAGGGGGWAQCAICLGVVRDGEAVRRLPECKHLFHVECVDMWLYSHATCPLCRRDVGAAAAAAGDKV

SEQ ID NO: 168772 - protein, 51 aa, Oryza sativa
  Clone ID: PAT_MRT4530_67254C.1.pep
KSYALVVREVLVNLFVQHGEHLTDVYVTPKYAIGVNGPLYTRDIGSVQELW

SEQ ID NO: 168773 - protein, 58 aa, Oryza sativa
  Clone ID: PAT_MRT4530_67255C.1.pep
GGMGPGPFFSPKTSLVWGGRNSLFCMVGKEPFFPPGFYAGPKGKFVSLFFLPVGTKYF

SEQ ID NO: 168774 - protein, 682 aa, Oryza sativa
  unsure (1)..(682): unsure at all Xaa locations
  Clone ID: PAT_MRT4530_67256C.1.pep
VLPILNTWCRYNYQPPPGKPNHTCGGADRWADVVSTDDTSNSSSSSPSASTSTSKMELKMSKKISFSRIPRNLKDLLATGLLEGHPVKYIMRKGKVVSPYYFEVHAGSTKKHPSDYIFLENGNNLHDILRACSDATLDMLQSAIQNAIGPAPKKRTFRCQTCKSELSSCCTGKFALLCDSCLESKGSQNSXPGKLCHSSTFCQRQKIWRTSKIGRNPTSSARRSKNESPGSKYCNSSARGSKNAFPGVKTTSTGRITRKDKGLHKLAFMSGVLPEGTDVGYYVGGKVSPSQFEAHAGRAARRKPYHNIYMSNGVSLHELSVSLSKGRNMSNRQSDDLCSICSDGECVGFTTIPRGTWCCRYCENRQQRESSLAYNHNAIAAGRIDGIDPMEQIFTRSIRIATTPVTGFGGCALLCRLHDFSKKKFSARTVLLCDQCGREFHIGCLKEHNMADLTALPEGAWYCTADCVRISETLKDLLSRGAEPISSVDVEIIKRKYEQKALNKDGDLDVRWRVLKDKSSADSKLVLSKAVAIFHESFDPIIQIATGRDLIPAMVYGRSVRDQDYTGMHCAVLTVGNTVVSAGLFRVMGSEIAELPLVATSRDSQGLGYFQALFGCIERLLASLKVKHFVLPAADEAESIWTQRFGFVKITQDELREYLKGGRTTVFQGTSTLHKLVPKLDG

SEQ ID NO: 168775 - protein, 118 aa, Oryza sativa
  unsure (1)..(118): unsure at all Xaa locations
  Clone ID: PAT_MRT4530_67257C.1.pep
MPRGQKSNRTLAMNMPREDVXRRLGSRSTPWKGARLARRVRVGVSTYYFDTLDHAGTRRETTSRQIAAKIAGNRCRHDRSFMDDATTMARGGQGKXDPAAGFLVTGPLYTNVLMGVDG

SEQ ID NO: 168776 - protein, 1895 aa, Oryza sativa
  Clone ID: PAT_MRT4530_67258C.1.pep
MAEQAKAHNLSPSVSGDDGEPNPRRRARTPPPPPRQSPRREEALERVEGSATSTSTGDGEGRRDGERRLLVYGDGSTPQGALQAAGALLRHPPIVPDPESPAQRWLDDVANLVMTARQRLGAGGWSSATKTSGAATTGSVSSRRRARRAAAVARHSAATPSLAPPTQEDLRGGPDARISIERRRNGRRAARATEGASSSGVSHQHGRGDQPSVPPVGGVGCRAFVASLRNVCWPPRFRPTIAEKYDGSVNPAEFLQVYTTGIEAAGGDDRVMANFFPMALKGQARGWLMNLPPASVHSWEDLCQQFTMNFQGTYPRPGGGVRHNRMLEKIASKEPQTTAELFQLADRVARKEEAWTWNPFGSGVAAPAAPGSAAQTGRRDRRRKKRSAHSDDEGHVLTVEGASRATRKGRPASDKKKEAGAPSRERPTSKWCIVHNTSLHDLADCRAVKSLAERTRKWEEERRQERREGKSPAVPSSNRRSEAKQKAPAEDIDDGDDDLGFQEPGATIATVDGGACAHVSRRSLKAMKRELLAAAPTHEATRRARWSEVALTFDQTDHPSCVARGGQIAMVVSPTVCNVKLGRVLIDGGAALNILSPAAFDAIKAPGMVLRPSQPIIGVTPGHTWPLGHIDLPVTFGGSANFRTERVNFDVADLSLPYNAVLGRPALVKFMAAVHYAYLQMKMPGPGGPISVHGDLKVALACMEQRADHLTAVSKPEGGDERLGTSAPAAPRQRIVTCDEVPEDALVSFLRANADVFAWRPADMPGVPREVIEHRLAVRSGARPVRQKVRRQAPERQAFIREEVARLLEAGFIREVIHPEWLANPVVVPKANGKLRMCIDYTDLNKACPKDPYPLPRIDQIVDSTAGCDLLCFLDAYSGYHQIRMAREDEEKTAFITPIGTYCYTTMPFGLKNAGPTFQRTTRISLGSQIGRNVEAYVDDLVVKTRNQETLLSDLAETFESLRSARIKLNPDKCVFGVPAGKLLGKLRDVQCVTGCMAALSRFISRLGEKALPLFKLLKRSGPFTWTEEAERALTQLKAYLSSPPVLVAPEPNEPLLLYLAATPQVDGPRATAGRPHLSPSDPEANPVPTRPGREQGEEAPEPNGGLRPLTTGVGPLPACPTTPGAPDPQDGPEATMGRPPLSSSDPEVVGTEDECTPRGRLDKERPRDVAPSEEDRPHRKVQRPVYFVSEALRDAKTRYPQAQKMLYAILMASRKLRHYFQAHRVTVVTSYPLGQILHNREGTGRVVKWAIELSEFDLHFEPRHAIKSQALADFVAEWTPAPEPVSVPKASSGPSQLPHTAHWVMQFDGSLSLQGAGAGVTLTSPSGDVLRYLVRLDFRATNNMAEYEGLLAGLRVAAGLGIRRLLVLGDSQLVVNQVCKEYRCSDPQMDAYVRQVRRMERHFDGIEHRHVSRRDNTVADELSRLASSRAQTPPGAFEERLAQPSARPDPLGETDAPDRPPMPVGVQASGPEGSAPSSLRLIAWITEIQAYLTYKTLPEDCEGSERVQRISKRYVLVEGTLYRRAANGILLKCIPREQGVELLADIHEGECGAHSASRTLVGKAFRQGFYWPTALNDAVDLVRRCRACQFHAKQIHQPAQALQIIPLSWPFAVWGLDILGPFRRAPGGFEYLYVAIDKFTKWPEAYPVVKIDKHSALKFIKGITARFGVPNRIITDNGTQFTSELFGDYCEDMGIKLCFASPAHPRSNGQVERANAEILRGLKTKTFNILKKHGDSWIEELPAVLWANRTTPSRATGETPFFLVYGAEAVLPSKLTLRSPRATMYCEADQDQLRRDDLDYLEERRRRAALRAARYQQSLRRYHQRHVRARSLCVDDLVLRRVQTRAGLSKLSPMWEGPYRVIGVPRPGSVRLATGDGTELPNPWNIEHLRRFYP

SEQ ID NO: 168777 - protein, 476 aa, Oryza sativa
  Clone ID: PAT_MRT4530_67259C.1.pep
TSKIGRNPTSSARRSKNESPGSKYCNSSARGSKNAFPGVKTTSTGRITRKDKGLHKLAFMSGVLPEGTDVGYYVGGKVSPSQFEAHAGRAARRKPYHNIYMSNGVSLHELSVSLSKGRNMSNRQSDDLCSICSDGGELLLCDSCPRAFHRECVGFTTIPRGTWCCRYCENRQQRESSLAYNHNAIAAGRIDGIDPMEQIFTRSIRIATTPVTGFGGCALCSMSGFMDKQSVLSRSRPDYDDELAVLDQLHDFSKKKFSARTVLLCDQALPEGAWYCTADCVRISETLKDLLSRGAEPISSVDVEIIKRKYEQKALNKDGDLDVRWRVLKDKSSADSKLVLSKAVAIFHESFDPIIQIATGRDLIPAMVYGNTVVSAGLFRVMGSEIAELPLVATSRDSQGLGYFQALFGCIERLLASLKVKHFVLPAADEAESIWTQRFGFVKITQDELREYLKGGRTTVFQGTSTLHKLVPKLDG

SEQ ID NO: 168778 - protein, 63 aa, Oryza sativa
  Clone ID: PAT_MRT4530_6725C.1.pep
MISGDGSNGEELPKTGKTTRQGHLRRRLGKRGGRGRRPGMKGELPAQLTSFGQPARPGCGTWG

SEQ ID NO: 168779 - protein, 429 aa, Oryza sativa
  Clone ID: PAT_MRT4530_67260C.1.pep
MAFRRIRGDEQEEDRDDGGWPEAKRKRQTVPSFISVMRGAMAAEKIQKLGLDLEPFFRKAVQEELERSLSKHGHLLYRSPPMLVNSVDSSLKLAFAKRLQLPIFTNNKLVDVDNNPLQVHLLHMSSTTTSHHHLPMIKKLEVLVLDGDFSHGDEGWSSDEFSGAIVREREGRRPLLVGTLNVAMADDHLGVAFIDDVAFTDNSSWTRSRRFRIGVRAVAVAGSGDGGELRIREAVSESFMVKDHRGESYKKHFPPRPDDEVWRLKNIRKDGPIHKRLESERVRNVQGFLNLHATNPEKLRKLVVMSDRLWKATLHHAKTCDFRAAEMMQVKQSSIEAYQNWDQLDEAETNKTASGNLGQAHEGSLQADEIGTVSGPHFQSRNQMDSEDSLSAAAVTEDADDALWSPCMTSDGHGLIMWKNNTSVWDQTN

SEQ ID NO: 168780 - protein, 1739 aa, Oryza sativa
  Clone ID: PAT_MRT4530_67261C.1.pep
MAEQAKAHNLSPSVSGDDGEPNPRRRARTPPPPPRQSPRREEVLERVEGSATSTSTGDGEGRRDGERRLLVYGDGSTPQGALQAAGALLRHPPVVPDPESPAQRWLDDVANLVMTARQRLGAGGRSSATKTSGAATTGSVSSRRRARRAAAVARHSAATPSSAPPTREDQRGGPDARIDIEHRRNGEEADLHAVQRRDDESLRSYIQRFCQVRNTIPCIPAHAVIYAFRGGVRHNRMLEKIASKEPQTTAEFFQLTDRVARKEEAWTWNPSGSGVAASAAPGSAARTGRRDRRRKKRSAHSDDEGHVLAVEGASRATRKGRPASDKKKEGGAPSRERPTGKWCIVHNTSLHDLADCRAVKSLAERTRKWEEERRQERRESKSPAVPSGNRRSKAKQKAPAEDIDDGDDDLGFQEPGATIAIVDGGACAHVSRRSLKAMKRELLAAAPTHEATRRARWSEVALTFDQTDHPPCVARGGQIAMVVSPTVCNVKLGRVLIDGGAALNILSPAAFDAIKAPGMVLRPSQPIIGVTPGHTWPLGHIDLPVTFGGSANFRTERVNFDVADLSLPYNAVLGRPALVKFMAAVHYAYLQMKMPGPGGPISVHGDLKVALACMEQRADHLTAASKPEGGDERLGTSAPAAPRQRIVTCDEVPEDTLVSFLRANADVFAWRPADMPGVPREVIEHRLAVRSGARPVRQKVRRQAPERQAFIREEVARLLEAGFIREVIHPEWLANPVVVPKANGKLRMCIDYTDLNKACPKDPYPLPRIDQIVDSTAGCDLLCFLDAYSGYHQIRMAREDEEKTAFITPIGTYCYTTMPFGLKNAVLVAPEPNEPLLLYLAATLQVVSAALVVEHDEDNPHSAHPHPVLAWPGREQGGEAPEPNGGPRPPTTGAGPLPACQTVPGAPDPQDGPRATTGRPHLSPSDPEANPVPTRPGREQGEEALEPNGGLRPLTTGVGPLPACSTTPGAPDPQDGPEATVGRPPLSSSDPEVVGTEDECTPRGRLDKERPRDVAPSEEDRPHRKVQRPVYFVSEALRDAKTRYPQAQKMLYAILMASRKLRHYFQAHRVTVVTSYPLGQILHNREGTGRVVKWAIELSEFDLHFEPRHAIKSQALADFVAEWTPAPEPVSVPEASSGPSQLPHTAHWVMQFDGSLSLQGAGAGVTLTSPSGDVLRYLVRLDFRATNNMAEYEGLLAGLRVAAGLGIRRLLVLGDSQLVVNQVCKEYRCSDPQMDAYVRQVQRMERHFDGIELRHVPRRDNTVADELSRLASSRAQTPPGAFEERLAQPSARPDPLGETDAPDRPPMPVGVQASGPEGSAPSSLRLIAWIAEIQAYLTDKTLPEDREGSERVQRISKRYVLVEGTLYRRAANGILLKCIPREQGVELLADIHEGECGAHSASRTLVGKAFRQGFYWPTALNDAVDLVRRCRACQFHAKQIHQPAQALQIIPLSWPFAVWGLDILGPFRRAPGGFEYLYVAIDKFTKWPEAYPVVKIDKHSALKFIKGITARFGVPNRIITDNDTQFTSELFGDYCEDMGIKLRFASPAHPRSNGQVEHANAEILRGLKTKTFNILKKHGDSWIEELPAVLQANRTTPSRATGETPFFLVYDAEAVLPSELTLRSPRATMYCEANQDQLRRDDLDYLEERRRRAALRAARYQQSLRRYHQRHVRARSLCVDDLVLRRVQTRAGLSKLSPMWEGPYRVIGVPRPGSVRLATGDGTELPNPWNIEHLRRFYP

SEQ ID NO: 168781 - protein, 1638 aa, Oryza sativa
  Clone ID: PAT_MRT4530_67262C.1.pep
MATAAAAADRSSAPGARGNPRTQPSGAPAAGRRDETEQVLVAAAARRGARRTAAARSVGVRVGKGRKMEENVRFACGRGVEDIVEVADADGNGNANCNGGDGPGGDGSGGDDSGVDVNGGDGNDGDGSGADGDGNVVVDPEDEPIGVNEEHLYGVVDLESQKEGTSGKKTDKERSSGNEVATQDVPNDFDPQHVPEEEVPIDEIGNVVPLFVHNRENPTFVVDATFPNGEAFKLAMRQFAIKGEFEVDVSHRWIADRAKEIMTTEPNIGPKALQDRLEKKYNVTLRYGRTWEGLQKAKDDIHGSWEASFQLLWSFKAEVERSMPGSIVDIDVNAMGEKVFFRRKYTWQIAAAVGVDGHNWLFPMAYAIFDKENYENWEWFMQRLKQAVEGPIGLTGQTDMGWPVRPASTRSDRHQLGLTDYGSVGSVSAIPSSIISASRGPEDQTCSGSCLKAPDKDESLQALVPSRSRRVSSWRWHVGSDSHVPTSRLLPVEVEVGMGRPIRRGLCERSSELSHSFVCAKLFLFSPMAEQAKAHNLSPSVSGDDGEPNPRRRARTPPPPPRQSPRREEALERVEGSATSTSTGDGEGRRDGERRLLVYGDGSTPQGALQAAGALLRHPPIVPDPESPAQRWLDDVANLVMTARQRLGAGGRSSATKTSGAATTGSVSSRRRARRAVAVARHSAATPSSAPPTQEDLRGGPDARISIERRRNGRRAAYATEGASSSGVSHQHGRGDQPSVPPVGGVGCRAFVASLRNVRWPPRFRPTIAEKYDGSVNPAEFLQVYTTGIEAAGGDDRVMVNFFPMALKGQARGWLMNLPPASVHSWEDLCQQFTMNFQGTYPRPGEEADLHAVQRRDDESLRSYIQRFCQVRNTIPCIPAHAVIYAFRGGVRHNRMLEKIASKEPQTTAELFQLADRVARKEEAWTWNPSGSGVAASAAPGSTARTGRDLIHKIVWKFWAKFLGVTHRVTVVTSYPLGQILHNREGTGRVVKWAIELSEFDLHFEPRHAIKSQALADFVAEWTPAPEPVSVPEASSGPSQLPHTAHWVMQFDGSLSLQGAGAGVTLTSPSGDVLRYLVRLDFRATNNMAEYEGLLAGLRVAAGLGIRRLLVLGDSQLVVNQVCKEYRCSDPQMDAYVRQVRRMERHFDGIELRHVPRRDNTVADELSRLASSRAQTPPGAFEERLAQPSARPDPLGETDAPDRPPMPVGVQASGPEGSAPSSLRLIAWIAEIQAYLTDKTLPEDREGSERVQRISKRYVLVEGTLYRRAANGILLKCIPREQGVELLAGIHEGECGAHSASRTLVGKAFRQGFYWPTALNDAVDLVRRCRACQFHAKQIHQPAQALQIIPLSWPFAVWGLDILGPFRRAPGRFEYLYVAIDKFTKWPEAYPVVKIDKHSALKFIKGITARFGVPNRIITDNGTQFTSELFGDYCEDMGIKLCFASPAHPRSNGQVERANAEILRGLKTKTFNILKKHGDSWIEELPAVLWANRTTPSRATGETPFFLVYGAEAVLPSELTLRSPRATMYCEADQDQLRRDDLDYLEERRRRAALRAARYQQSLRRYHQRHVRARSLCVDDLVLRRVQTRAGLSKLSPMWEGPYRVIGVPRPGSVRLATGDGTELPNPWNIEHLRRFYP

SEQ ID NO: 168782 - protein, 2005 aa, Oryza sativa
  unsure (1)..(2005): unsure at all Xaa locations
  Clone ID: PAT_MRT4530_67263C.1.pep
MAEQAKAHNLSPSISGDDGEPNPRRRARTPPPPPRQSPRREEALERVEGSATSTSTGDGEGRRDGERRLLVYGDGSTPQGALQAAGALLRHPPVVPDPESPAQRWLDDVANLVMTARQRLGAGGRSSATKTSGAATTGSVSSRRRARRAAAVARHSAATPSSAPPTREDQRGGPNARIGIERRRNGRRTAHATEGASLSGVSTQHGRGDQPSVPLVGGVGCRAFVARLQNVRWPPRFRPTIAEKYDGSVNPAEFLQVYTTGIEAAGGDDRVMANFFPMALKGQARGWLMNLPPASVHSWEDLCQQFTMNFQGTYPRPXFCQVRNTIPCIPAHAVIYAFXGGVRHNRMLEKIASKEPQTTAELFQLADRVARKEEAWTWNPSGSGVAASAAPGSAARTGRRDRRRKKRSAHSDDEGHVLAVEGASRATRKGRPASDKKKEASAPSRERPTGKWCTVHNTSLHDLADCRAVKSLAERTRKWEEERRQERREGKSPAVPSGNRRSEAKQKAPAEDIDDGDDDLGFQEPGATIATVDGGACAHVSRRSLKAMKRELLAAAPTHEATRRARWSEVALTFDQTDHPPCVARGGQIAMVVSPTVCNVKLGRVLIDGGAALNILSPAAFDAIKAPGMVLRPSQPIIGVTLGHTWPLGHIDLPVTFGGSANFRTERVNFDVADLSLSYNAVLGRPALVKFMAAVHYAYLQMKMPGPGGPISVHGDLKVALACMEQRADHLAAASKPEGGDERLGTSVPAAPRQRIVTCDEVPEDALVSFLRANADVFAWRPADMPGVPREVIEHRLAVRPGAKPVRQKVRRQAPERQAFIREEVARLLEAGFIREVIHPEWLANPVVVPKANGKLRMCIDYIDLNKACPKDPYPLPRIDQIVDSTAGCDLLCFLDAYSGYHQIRMAREDEEKTAFITPIGTYCYTTMPFGLKNAGPTFQRTTRISLGSQIGRNVEAYVDDLVVKTRNQETLLSDLAETFESLRSARIKLNPDECVFGVPAGKLLGFLVSARGIEANPEKIRAIERMRPPSKLRDVQCVTGCMAALSRFISRLGEKALPLFKLLKRSGPFTWTEEAERALTQLKAYLSSPPVLVAPEPGEPLLLYLAATPQVVSAALVVERDEDNPHSAHPHPVLAWPGREQGGEAPEPNGGPRLPTTGVGPLPACQTVPGAPDPQDGPGATAGRPHLSPSDPEVNPVLTRPGREQGGKAPEPNGGPRPPTTGVGLLPACPTTPGAPDPQDGPKATVGRPPLSSSDPEVIDTEAESALRGLLDEERPRDVAPSEESRPRQKVQRPVYFVSEALRDAKTRYPQAQKMLYAILMALRKLRHYFQAHRVTVVTSYPLGQILHNREGTGRVVKWAIELSEFDLHFEPRHAIKSQALADFVAEWTPAPEPVSIPEASSGPSQPPHTAYWVMQFDGSLSLQGAGAGVTLTSPSGDVLRYLVRLDFRATNNMAEYEGLLAGLRVAAGLGIRRLLVLGDSQLVVNQVCKEYRCSDPQMDAYVRQVRRMERHFDGIELRHVPRRDNTIADELSRLASSRAQSPPGAFEERLAQPSARPDPIGETDAPDRPPRPVGVQASGPEGSAPSSLRLIAWIAEIQAYLTDKTLPEDREGSERVQRISKRYVLVEGTLYRRAANGILLKCIPREQGVELLADIHEGECGAHSASRTLVGKAFRQGFYWPTALNDAVDLVRRCRACQFHAKQIHQPAQALQIIPLSWPFAVWGLDILGPFRRAPGGFEYLYVAIDKFTKWPEAYPVVKIDKHSALKFIKGITARFGVPNRIITDNGTQFTSELFGDYCEDMGIKLCFASPAHPRSNGQVERANAEILRGLKTKTFNILKKHGDSWVEELPAVLWANRTTPSRATGETPFFLVYGAEAVLPSELTLRSPRATMYCEADQDQRRRDDLDYLEERRRRAALRAARYQQSLRRYHQRHVRARSLCVDDLVLRRVQTRAGLSKLSPMWEGPYRVIGVPRLGSVRLATGDGTELPNPWNIEHLRRFYP

SEQ ID NO: 168783 - protein, 79 aa, Oryza sativa
  unsure (1)..(79): unsure at all Xaa locations
  Clone ID: PAT_MRT4530_67264C.1.pep
LDFFQTVVLARIQFSQKGFLEIFFIAAWHIWKXRNGKIFRNELPSFSSWRALFKADVLLHLCRMKDPLKQIVFDWLQTV

SEQ ID NO: 168784 - protein, 1715 aa, Oryza sativa
  unsure (1)..(1715): unsure at all Xaa locations
  Clone ID: PAT_MRT4530_67265C.1.pep
MAEQAKAHNLSPSVSGDDGEPNPRRRARTPPXPRQSPRQEEALERVKGSATSTSTGDGEGRRDGERRLLVYGDGSTPQGALQAAGALLRHPPIVPDPESPAQRWLDDVANLVMTARQRLGAGGRSSATKTSGAATTGSVSSRRRARRAAAVARHSAATPSSAPPTQEDLRGGPDARISIERRRNGRRAAHATEGASSSGVSHQHGRGDQPSVPPVGGVGCRAFVASLRNVRWPPRFRPTSAEKYDGSVNPAEFLQVYTTGIEAAGGDDRVMRFCQVRNTIPCIPAHAVIYAFRGGVRHNRMLEKIASKEPQTTVELFQLADRVARKEEAWNWNPSGSDVAASAAPGSAARTGRRDRRRKKRSAHSDDEGHVLAVEGASRATRKGRPASDKKKEAGAPSRERPTGKWCIVHNTSLHDLADCRAVKSLAERTRKWEERRQERREGKSPAVPSGNRRSEAKQKDPAEDIDDGDDDLGFQEPGATIATVDGGACAHVSHRSLKAMKRELLAAAPTHEATRRARWSEVALTFDQTDHPPCVARGGQIAMVVSPTVCNVKLGRVLIDGGAALNILSPAAFDAIKAPGMVPRPSQPIIGVTPGHTWPLGHIDLPVTFGGSANFRTERVNFDVADLSLPYNAVLGRPALVKFMAAVHYAYLQMKMPGPGGPISVHGDLKVALACMEQRADHLTAASKPEGGDERLGTSAPAAPRQRIVTCDEVPEDALVSFLRANADVFAWRPADMPGVPREVIEHRLAVRSGARPVRQKVRRQAPERQAFIREEVARLLEAGFIREVIHPEWLANPVVVPKANGKLRMCIDYTDLNKACPKDPYPLPRIDQIVDSTAGQETLLSDLAETFESLRSARIKLNPDKCVFGVPAGKLLGFLVSARGIEANPEKIRAIERMRPPSKLRDVQCVIGCMAALSRFISRLGEKALPLFKLLKRSGPFTWTEEAERALTQLKAYLSSPPVLVAPEPNEPLLLYLAATPQVVSAALVVERDEDNPHSAHPHPVLAWPGREQGGEAPEPNGGPRPPTTGAGPLPACQTVPGAPDPQDGPRATAGRPHLSPSDPEANPVPTRPGREQGEEAPEPNGGLRPLTTGVGPLPACPTTPGAPDPQDGPEATVGRPPLSSSDLEVVGTEDECTPKLRHYFQAHRVTVVTSYPLGQILHNREGNGRVVKWAIELSEFDLHFEPRHAIKSQALADFVAEWTPAPEPVSVPEASSGPSQLPYTAHWVMQFDGSLSLQGAGAGVTLTSPSGDVLRYLVRLDFRATNNMAEYEGLLAGLRVAAGLGIRRLLVLGDSQLVVNQVCKEYRCSDPQMDAYVRQVRCMERHFDGIELRHVPRRDNTVADELSRLASSRAQTPPGAFEERLAQPSARPHPLGETDAPDRPPMPVGVQASGPEGSAPSSLRLIAWIAEIQAYLTDKTLXQDREGSERVQRISKCYVLXRAPGGFEYLYVAIDKFTKWPEAYPVVKIDKHSALKFIKGITARFGVPNRIITDNGTQFTSELFGDYCEDMGIKLCFASPAHPRSNGQVERANAEILRGLKTKTFNILKKHGDSWIEELPAVLWANRTTPSRATGETPFFLVYGAEAVLPSELTLRSPRATMYCEADQDQLRRDDLDYLEERRRRAALRAARYQQSLRRYHQRHVRARSLCVDDLVLRRVQTRAGLSKLSPMWEGPYRVIGVPRAGSVRLATGDGTELPNPWNIEHLRRFYP

SEQ ID NO: 168785 - protein, 481 aa, Oryza sativa
  Clone ID: PAT_MRT4530_67266C.1.pep
MCWCAPIATAPVAGGRFPPPSLRCRRRRGRSVRADASPEPVDTQRKKVAVAGAGWAGLAAAHHLVKQGYEVTLLGAESGPTEEIGLRGFWYPYRNIFSLVDELGISPFTGWTKAAYYSSQGLAVEFPIFHDQPRLPAPFGMLTYPEFPSLPLIDRLTSIPVMAAVIDFNNTDTAWMKYDAMSARDLFKMFGCSQKLYKEIFQPAIQAALFAPGLKFHGNRVPTSLAINKDTACISGIVCGEEVHEADAFVLANGLSSLQYIIKNSPFLQSRQEFVNLLHLSTIDVVSIKLWFDKKITIPKVANVCSGFDDPSRWTFFDLTSIYDDYADKSTTIVEAEFYNASHLLPLNDEQIVSEASSHLIKCIQDFEEATVIQQLVRRSPKSTMHFLPGSYKYTVRGSTTLPNLFIAGDWIVNRHGSFSKEKAYVTGLEAANRVVDYFGDGDFAKIIAVEEDEPHIETARNLNRRANELKTQIPFSEFFL

SEQ ID NO: 168786 - protein, 1986 aa, Oryza sativa
  Clone ID: PAT_MRT4530_67267C.1.pep
MAEQAKAHNLSPSVSGDDGEPNPRRRARTPPPPPRQSPRREEVLERVEGSATSTSTGDGEGRRDGERRLLVYGDGSTPQGALQAAGALLRHPPIVPDPESPAQRWLDDVANLVMTARQRLGAGGRSSATKTSGAATTGSVSSRRRARRAAAVARHSAATPSSAPPTQEDLRGGPDACIDIERRRNGRRAAHATEGASSSGVSHQHGRGDQPSVPPVGGVGCRAFVASLRNVRWPPRFRPTIAEKYDGSVNPAEFLQVYTTGIEAAGGDDRVMANFFPMAVKGQARGWLMNLPPASVHSWEDLCQQFTMNFQGTYPRPGEEADLHAVQRRDDESLRSYIQRFCQVRNTIPCIPAHAVIYAFRGGVRHNRMLEKIASKEPQTTAELFQLADRVARKEEAWTWNPSGSGVAASAVPGSAAQTGRRDRRRKKRSAHTDDEGHVLAVEGASRATRKGRPAGDKKKEAGAPSRERPTGKWCIVHNTSLHDLADCRAVKSLAERTRKWEEERRQERREGKSPAVPSGNRRSEAKQKDPAEDIDDGDDDLGFQEPGATIATVDEGACAHVSRRSLKAMKREFLAAAPTHEATRRARWSEVALTFDQTDHPPCVARGGQIAMVVSPTVCNVKLGRVLIDGGAALNILSPAAFYAIKAPGMVLRPSQPIIGVTPGHTWPLGHIDLPVTFGGSANFRTEQVNFDVADLSLPYNAVLGRPALVKFMAAVHYAYLQMKMPGPGGPISVHGNLKVALACMEQRADHLAAASKPEGGDEMLGTSAPAAPRQRIVTCDEVPEDALVSFLRANADVFAWRPADMPGVPREVIEHRLAVRPGARPVRQKVRRQAPECQAFIREEVARLLEAGFIREVIHPEWLANPVVVPKANGKLRMCIDYTDLNKACPKDPYPLPRIDQIVDSTAGCDLLCFLDAYSGYHQIRMAREDEEKTAFITPIGTYCYTTMPFGLKNAGPTFQRTTRISLGSQIGRNVEAYVDDLVVKTRNQETLLSNLAETFESLRSARIKLNPDKCVFGVPAGKLLGFLVSARGIEANPEKIRAIERMRPPSKLRDVQCVTGCMAALSRFISRLGEKALPLFKLLKRSGPFTWTEEAERALTQLKAYLSSPPVLVVPEPNEPLLLYLAATPQVVSAVLVVERDEDNPHSAHPHPVLAWLGREQGGEAPEPNGGPRPLTTGAGPLPACQTVPGAPDPQDGPRATAGRPHLSPSDPEANPVPTRPGREQGEEAPEPNGGLRPLTTGVGPLPACPTTPGAPDPQDGPEATVGRPPLLSSDPEVVGTEDKCAPRGRLDKERPRDVAPSEEDRPHRKAHRVTVVTSYPLGQILHNREGTGRVVKWAVELSEFDLHFEPRHAIKSQALADFVAEWTPAPEPVSVPEASSGPSQLPHTAHWVMQFDGSLSLQGAGAGVTLTSPSGDVLRYLVRLDFRATNNMAEYEGLLAGLRVAAGLGIRRLLVLGDSQLVVNQFCKEYRCSDPQMDAYVRQVRRMERHFDGIELRHVPRRDNTVADELSRLASSRAQTPPGAFEERLAQPSARPDPLGETDAPDRPPMPVGVQASGPEGSAPSSLRLIAWIAEIQAYLTDKTLPEDREGSECVQRISKRYVLVEGTLYRRAANGILLKSIPREQGVELLADIHEGECGAHSASRTLVGKAFRQGFYWPTALNDAVDLVRRCRACQFHAKQIHQPAQALQIIPLSWPFAVWGLDILGPFRRAPGGFEYLYVAIDKFTKWPEAYPVVKIDNHSALKFIKGIIARFGVPNRIITDNGTQFTSELFGDYCEDMGIKLCFASPAHPRSNGQVERANAEILRGLKTKTFNILKKHGDSWIEELPAVLWANQTTPSRATGETPFFLVYGAEAVLPSELTLRSPRATIYCEADQDQLRRDDLDYLEERRRRAALRAARYQQSLRRYHQRHVRARSLCVDDLVLRRVQTRAGLSKLSPMWEGPYRVIGVPRPGSVRMATGDGTELPNPWNIEHLRRFYP

SEQ ID NO: 168787 - protein, 1932 aa, Oryza sativa
  Clone ID: PAT_MRT4530_67268C.1.pep
MAEQAKAHNLSPSVSGDDGEPNPRRRARTPPPPPRQSPRREEALERVQGSATSTSTGDGEGRPDGERRLLVYGDGSTPQGALQAAGVLLRHPPVVPDPESPAQRWLDDVANLVMTARQRLGAGGRSSATKTSRAATTGSVSSRRRARRAAAVARHSAATPSSAPSTQEDLRGGPDARISIERRRNGRRAAHATEGASSSGVSHQHGRGDQPSVPPVGGVGCRAFVASLRNVRWPPRFWPTIAEKYDGSVNPAEFLQVYTTGIEAAGGDDRVMANFFPMALKGQTRGWLMNLPPASVHSWEDLCQQFTMNFQGTYPRPGEEADLHAVQRRDDESLRSYIQRFCQVRNTIPCIPAHAVIYAFRGGVRHNRMLEKIASKEPQTTAELFQLADRVARKEEAWTWNPSGSGVAASAAPGSAAQTGRRDRRRKKRSAHTDDEGHVLAVEGASRATRKGRPAGDKKKEAGAPSRERPTGKWCIVHNTSLHDLADCRAVKSLAERTRKWEEERRQERREGKSPAVPSGNRRSEAKQKAPAEDIDDGNDDLGFQEPGATIATVDGGACAHVSRRSLKAMKRELLAAAPTHEATRRAWWSEVALTFNQTDHPSCVARGGQIAMVVSPTVCNVKLGRVLIDGGAALNILSPAAFDAIKAPGMVLRPSQPIIGVTPGHTWPLGHIDLPVTFGGSANFRTERVNFDVADLSLPYNAVLGRPALVKFMAAVHYAYLQMKMPGPGGPISVHGDLKVALACMEQRADHLTAASKPEGGDERLGTSAPAPPRQRIVTCDEVPEDALVSFLRANADVFAWRPADMPGVPREVIEHRLAVRPGARPVRQKVRRQAPERQAFIREEVARLLEAGFIREVIHPEWLANPVVVPKANGKLRMCIDYTDLNKACPKDPYPLPRIDQIVDSTAGCDLLCFLDAYSSYHQIRMAREDEEKTAFITPIGTYCYTTMPFGLKNAGPTFQCTTRISLGSQIGRNVEAYVDDLIVKTRNQETLLSDLAETFESLRSARIKLNPDKCVFGVPAGKLLGFLVSARGIEANPENIRAIERMPPPSKLRDVQCVTGCMAALSRFISRLGEKALPLFKLLKRSGPFTWTEEAERALTQLKAYLSSPPVLVAPEPNEPLLLYLAATPQVVSAALVVERDEDNPHSAHPHPVLAWPGREQGGEAPEPNGGPRPPTTGAGPLPACQTVPGVPDTQDGPRATAGRPHLSPSDPEANPVPTRPGREQGEEAPEPNGGLRPLTTGVGPLPACRTTPGAPDPQDGPEATVGRPPLSSSDPEVVGTEDKCAPRGRLDEECPRDVAPSEEDRPHRKVQRPVYFVSEALRDAKTRYPQAQKMLYAILMASRKLRHYFQAHRVMVVTSYPLGQILHNRDGTGRVVKWAIELSEFDLHFQPRHAIKSQTLADFVAEWTPAPEPVSVPEASSGPSQLPHTAHWVMQFDGSLSLQGAGAGVTLTSPSGDVLRYLVRLDFRATNNMAEYEGLLAGLRVAAGLGIRRLLMDAYVRQVRRMERHFDGIELRHVPRRDNTVADELSRLASSRAQTPPGAFEERLAQPSARPDPLGETDTHDRPPMPVGVQASGPEGSAPSSLRLIAWIAEIQAYLTDKTLPEDREGSERVQRISKRYVLVEGTLYRRVANGILLKCIPREQGVELLADIHQGECGSHSASRTLVGKAFRQGFYWPTALNDAVDLVRRCRACQFHAKQIHQPAQALQIIPLSWPFAVWGLDILGPFRRAPGGFEYLYVAIDKFTKWPEAYPVVKIDKHSALKFIKGITARFGVPNRIITDNGTQFTSELFSDYCEDMGIKLCFASPAHPRSNGQVERANAEIVRGLKTKTFNILKKHGDSWIEELPAVLWANRTTPSRATGETPFFLVYGAEAVLPSELTLRSPRATMYCEADQDQLRRDDLDYLEERRRRAALRAARYQQSLRR

SEQ ID NO: 168788 - protein, 540 aa, Oryza sativa
  Clone ID: PAT_MRT4530_67269C.1.pep
MASDRRYYYFEEDDGDGEEEVEWLAMEADEDDVGLLEEDDLHLRLPDDRPADCWAITQESLPAAQQQDLSMVMNLLNIKQHLARTLLIHHRWKMHCIYDHLDRKGRDRMLSEACIILPKNSMSAASSTSVTCNVCFEDFSMTDVSTMDCGHCFCNDCWTEHFFASINTGNKQIRCMEVKCKAICDEDIVRRLLSLKYPAASKRFDLLLLESYLEDNDSVKWCPSAPHCGRAIQVGTGERYCEVACPCGVSFCFNCAGQVHSPCPCAIWEKWKAKGHGDSDSVKWILANTKSCPKCSKPIEKNGGCNLVHCKCGQCLCWLCGGPTGREHTWDSISGHSCNRYKEENGDKVDTSRQQMQRYTHYWDRYNIHAGSYKVEQKDLGPAVEEQVKKLESNLTGPKMNWDGSWLAMAYQSLLASRQVLSRSYAFAYYMFGGGEVKTHPSERASLAVAQNLFEDRQEQLERHVEHLSKELATDLLGLPEEEIVLKKVEIANLAKIVQAICGQLYRCIQDELLPLLVQPMNIAAYQPDGPDKAKEFIGA

SEQ ID NO: 168789 - protein, 145 aa, Oryza sativa
  Clone ID: PAT_MRT4530_6726C.1.pep
SITWVPRRRCRRRRPERCLEPLLRSFQRRLADVARVLSCLLDMDFWWILICVHSFRGGERVPHCLKLQPDGEALTFDDRDAPLAQLGKIIVHIADTAEIQGIPDLIGMGALDRSSIEQRLHTEAHIFDVPIADVVYRLAYLPAAT

SEQ ID NO: 168790 - protein, 2010 aa, Oryza sativa
  Clone ID: PAT_MRT4530_67270C.1.pep
MAEQAKAHNLSPSVSGDDGEPNPRRRARTPPPPPRQSPRREEVLERVEGSATSTSTGDGEGRRDGERRLLVYGDGSTPQGALQAAGALLRHPPIVPDPESPAQRWLDDVANLVMTARQRLGAGGRSSATKTSGAATTGSVSSRRRARRAAAVARHSAATPSSAPPTQEDLRGGPDARISIERRRNGRRAAHATEGASSSGVSHQHGRGDQPSVPPVGGVGCRAFVASLRNVRWPPRFRPTIAEKYDGSVNPAEFLQVYTTGIEAAGGDDRVMANFFPMALKGQARGWLMNLPPASVHSWEDLCQQFTMNFQGTYPRPGEEADLHAVQRRDDESLRSYIQRFCQVRNTIPCIPAHAVIYAFRGGVRHNRMLEKIASKEPQTTAELFQLADRVARKEEAWTWNPSGSGVAASAAPGSAAQTGRRDRRRKKRSAHSDDEGHVLAVEGASRATRKGRPASDKKKEAGAPYWERPTGKWCIVHNTSLHDLADCRAVKSLAERTRKWEEERRQERREGKSSAVPSGNRRSEAKQKAPAEDIDDGDDDLGFQEPGATIATVDGGACAHVSRRSLKAMKRELLAAAPTHEATCRARWSEVALTFDQTDHPPCVARGGQIAMVVSPTVCNVKLGRVLIDGGAALNILSPAAFDAIKAPGMVLRPSQPIIGVTPGHTWPLGHIDLPVTFGGSANFRTERVNFDVADLSLPYNAVLGRPALVKFMAAVHYAYLQMKMPGPGGPISVHGDLKVALACMEQRADHLTAASKPEGGDERLGTSAPAAPRQRIVTCDEVPEDALVSFLRANADVFAWRPADMPGVPREVIEHRLAVRSGARPVRQKVRRQAPERQAFIREEVARLLEAGFIREVIHPEWLANPVVVPKANGKLRMCIDYTDLNKACPKDPYPLPRIDQIVDSTAGCDLLCFLDAYSGYHQIRMAREDEEKTAFITPIGTYCYTTMPFGLKNAGPTFQRTTRISLGSQIGRNVEAYVDDLVVKTRNQETLLSDQAETFESLRSARIKLNPDKCVFGVPAGKLLGFLVSARGIEANPEKIRAIERMRPPASLGMLGEKALPLFKLLKRSGPFTWTEEAERALTQLKAYLSSPPVLVAPEPNEPLLLYLAATPQVVSAALVVERDEDNPHSAHPHPMLAWPGREQGGEAPEPNGGPRPPTTGAGPLPACQTVPGAPDPQDGPRATAGRPHLSPSDPEANPVPTRPGREQGEEAPEPNGGLRPLTTGVGPLPACPTTPGAPDPQDGPEATVGRLPLSSSDPEVVGTEDECTPRGRLDKERPRDVAPSEEDRPHRKVQRPVYFVSEALWDAKTRYPQAQKMLYAILMASRKLRHYFQAHRVTVVTSYPLGQILHNREGTGRVVKWAIELSEFDLHFEPRHAIKSQALADFVAEWTPAPEPVSVPEASSGPSQLPHTAHWVMQFDGSLSLQGAGAGVTLTSPSGDVLRYLVRLDFRATNNMAEYEGLLAGLRVAAGLGIRRLLVLGDSQLVVNQVCKEYRCSDPQMDAYVRQVRRMERHFDGIELRHVPRRDNTVADELSRLASSRAQTPPGAFEERLAQPSARPDPLGETDAPDRPPMPVGVQASGPKGSAPSSLRLIAWIAEIQAYLTDKTLPEDREGSERVQRISKRYVLVEGTLYRRAANGILLKCIPREQGVELLADIHEGECGSHSASRTLVGKAFRQGFYWPTALNDAVDLVRRCRACQFHAKQIHQPAQALQIIPLSWPFAVWGLDILGPFRRAPGGFEYLYVAIDKFTKWPEAYPVVKIDKHSALKFIKGITARFGVPNRIITDNGTQFTSELFGDYCEDMGIKLCFASPAHPRSNGQVERANVEILRGLKTKTFNILKKHGDSWIEELPAVLWANRTTPNRATGETPFFLVYGAEAVLPSELTLRSPRATMYCEADQDQIRRDDLDYLEERRRRAALRAARYQQSLRRYHQRHVRARSLCVDDLVLRRVQTRAGLSKLSPMWEGPYRVIGVPRPGSVRLATGDGTELPNPWNIEHLRRFYP

SEQ ID NO: 168791 - protein, 1160 aa, Oryza sativa
  Clone ID: PAT_MRT4530_67271C.1.pep
MRRGPGQGGCPERRPVQDHTDRWPVRQKVRRQAPERQAFIHEEVARLLEAGFIREVIHPEWLANPVVVPKANGKLRMCIDYTDLNKACPKDPYPLPRIDQIVDSTAGCDLLCFLDAYSGYHQIRMAREDEEKTAFITPIGTYCYTTMPFGLKNAGPTFQRTTRISLGSQIGRNVEAYVDDLVVKTRNQETLLSDLAETFESLRSARIKLNPDKCVFGVPAGKLLGFLVSARGIEANPEKIRAIERMRPPSKLRDVQYVTGCMAALSRFISRLGGKALPLFKLLKRSGPFTWTEEAERALTQLKAYLSSPPVLVAPEPDEPLLLYLAATPQVVSAALVVERDEDNPHSAHPHPVLAWPGREQGGEALEPNGGPRPPTTGTGPLPACQTVPGAPDPQDGPEATVGRPPLSSSDPEVVGTEDECAPRGRLEEERPRDAAPSEEDRPHRKVQRPVYFVSEALRDAKTRYPQAQKMLYAILMASRKLRHYFQAHRVTVVTSYPLGQILHNREGTGRVVKWAIELSEFDLHFEPRHAIKSQALADFVAEWTPAPEPVSIPEANSGPSQLPHTAYWVMQFDGSLSLQGAGAGVTLTSPSGDVLRYLVRLDFRATNNMAEYEGLLAGLRVAAGLGIRRLLVLGDSQLVVNQVCKEYRCSDPQMDAYVRQVRRIERHFDGIELRHVPRRDNTIADELSRLASSRAQTPPGAFEERLAQPSARPDPLGETDAPDRPPRPVGVQASGPEGSAPSSLRLIAWIAEIQVYLTDKTLPEDREGSERVQRISKCYVLVEGTLYRRAANGILLKCIPREQGVELLADIHEGECGAHSASRTLVGKAFRQGFYWPTALNDAVDLVRRCRACQFHAKQIHQPAQALQIIPLSWPFAVWGLDILGPFRRAPGGFEYLYVAIDKFTKWPEAYPVVKIDKHSALKFIKDITARFGVPNRIITDNGTQFTSELFGDYCEDMGIKLCFASPAHPRSNGQVERANAEILRGLKTKTFNILKKHGDSWTEELPAVLWANRTTPSRATGETPFFLVYGAEAVLPSELTLRSPRATMYCEADQDQLRRDDLDYLEERRRRAALRAARYQQSLRRYHQRHVRARSLCVDDLVLRRVQTRAGLSKLSPMWEGPYRVIGVPRPGSVRLATGDGTELPNPWNIEHLRRFYP

SEQ ID NO: 168792 - protein, 79 aa, Oryza sativa
  Clone ID: PAT_MRT4530_67272C.1.pep
SFFNQSLKMFPVWTYCKAFQGRKQPLIYKVVLGTYSPIVTRWPLLSHYSLMDNKMYLKEKRPHRKEFCMRLSPSNLGGK

SEQ ID NO: 168793 - protein, 98 aa, Oryza sativa
  Clone ID: PAT_MRT4530_67273C.1.pep
LGVLPLKLVLTSPKGLLFQAHFSLEEVVELGWFSDQLDDTFEKIEIQENTLEGSSQREGKQQVLVPELMLGEHKIKCAQILRDMEVAMQLQKGDCILT

SEQ ID NO: 168794 - protein, 63 aa, Oryza sativa
  Clone ID: PAT_MRT4530_67274C.1.pep
FTITSAQYSDFFGGIADVNYIGAVNTLLPLPFSLFETKTCVSPMYFQDQKNDVEIVYIEFELC

SEQ ID NO: 168795 - protein, 2036 aa, Oryza sativa
  Clone ID: PAT_MRT4530_67275C.1.pep
MAEQAKAHNLSPSVSGDDGEPNPRRRARTPPPPPRQSPRREEALERVEGSATSTSTGDGEGRRDGERRLLVYGDGSTPQGALQAAGALLRHPPIVPDPESPAQRWLDDVANLVMTARQRLGAGGRSSATKTSGAATTGSVSSRRRARRAAAVARHSAATPSSAPPTQEDLRGGPDARISIERRRNGRRAAHATEGASSSGVSHQHGRGDQPSVPPVGGVGCRAFVASLRNVRWPPRFRPTIAEKYDGSVNPAEFLQVYTTGIEAAGGDDRVMANFFPMALKGQARGWLMNLPPASVHSWEDLCQQFTMNFQGTYPRPGEEADLHAVQRRDDESLRSYIQRFCQVRNTIPCIPAHAVIYAFRGGVRHNRMLEKIASKEPQTTAELFQLADRVARKEEAWTWNPSGSGVAASAAPGSAARTGRRDRRRKKRSAHSDDEGHVLAVEGASRATRKGRPASDKKKEAGAPSRERPTGKWCIVHNTSLHDLADCRAVKSLAERTRKWEEERRQERREGKSPAVPSGNRRSEAKQKAPAEDIDDGDDDLGFQEPGATIATVDGGACAHVSRRSLKAMKRELLAAAPTHEATRRARWSEVALTFDQTDHPPCVARGGQIAMVVSPTVCNVKLGRVLIDGGAALNILSPAAFDAIKAPGMVLRPSQPIIGVTPGHTWPLGHIDLPVTFGGSANFRTERVNFDVADLSLPYNAVLGRPALVKFMAAVHYAYLQMKMPGPGGPISVHGDLKVALACMEQRADHLTAASKPEGGDERLGTSAPAAPRQRIVTCDEVPVKEVALGDGPKTLVSFLRANADVFAWRPADMPGVPREVIEHRLAVRSGARPVRQKVRRQAPERQAFIREEVARLLEAGFIREVIHPEWLANPVVVPKANGKLRMCIDYTDLNKACPKDPYPLPRIDQIVDSTAGCDLLCFLDAYSGYHQIRMAREDEEKTAFITPIGTYCYTTMPFGLKNAGPTFQRTTRISLGSQIGRNVEAYVDDLVVKTRNQETLLSDLAETFESLRSARIKLNPDKCVFGVPAGKLLGFLVSARGIEANPEKIRAIERMRPPSKLRDVQCVTGCMAALSRFISRLGEKALPLFKLLKRSGPFTWTEEAERALTQLKAYLSSPPVLVAPEPNEPLLLYLAATPQVVSAALVVERDEDNPHSAHPHPVLAWPGREQGGEAPEPNGGPRPPTTGAGPLPACQTVPGAPDPQDGPRATAGRPHLSPSDPEANPVPTRPGREQGEEAPEPNGGLRPLTTGVGPLPACPTTPGAPDPQDGPEATVGRPPLSSSDPEVVGTEDECTPRGRLDKERPRDVAPSEEDRPHRKVQRPVYFVSEALRDAKTRYPQAQKMLYAILMASRKLRHYFQAHRVTVVTSYPLGQILHNREGTGRVVKWAIELSEFDLHFEPRHAIKSQALADFVAEWTPAPEPVSVPEASSGPSQLPHTAHWVMQFDGSLSLQGAGAGVTLTSPSGDVLRYLVRLDFRATNNMAEYEGLLAGLRVAAGLGIRRLLVLGDSQLVVNQVCKEYRCSDPQMDAYVRQVRRMERHFDGIELRHVPRRDNTVADELSRLASSRAQTPPGAFEERLAQPSARPDPLGETDAPDRPPRPVGVQASGPEGSAPSSLRLIAWIAEIQAYLTDKTLPEDREGSERVQRISKRYVLVEGTLYRRAANGILLKCIPREQGVELLADIHEGECGAHSASRTLVGKAFRQGFYWPTALNDAVDLVRQCRACQFHAKQIHQPAQALQIIPLSWPFAVWGLDILGPFRRAPGGFEYLYVAIDKFTKWPEAYPVVKIDKHSALKFIKGITARFGVPNRIITDNGTQFTSELFGDYCEDMGIKLCFASPAHPRSNGQVERANAEILRGLKTKTFNILKKHGDSWIEELPAVLWANRTTPSRATGETPFFLVYGAEAVLPSELTLRSPRATMYCEADQDQLRRDDLDYLEERRRRAALRAARYQQSLRRYHQRHVRARSLCVDDLVLRRVQTRAGLSKLSPMWEGPYRVIGVPRPGSVRLATGDGTELPNPWNIEHLRRFYP

SEQ ID NO: 168796 - protein, 46 aa, Oryza sativa
  Clone ID: PAT_MRT4530_67276C.1.pep
LHKFFNKTNGQMLDKKSTALYINSNNLASVGHLSVLDASEFGGGDH

SEQ ID NO: 168797 - protein, 78 aa, Oryza sativa
  Clone ID: PAT_MRT4530_67277C.1.pep
KESCVVAPPISTPVLLCPSPISTPVPLCRETHIYYPAHHDVLVYKWFPLHFSLSSIGDDEQPTTMENNYLFYKVPFVL

SEQ ID NO: 168798 - protein, 63 aa, Oryza sativa
  unsure (1)..(63): unsure at all Xaa locations
  Clone ID: PAT_MRT4530_67278C.1.pep
NFXVWVWGLRTGHYWLCLGGXGCFVSPFSACGRKRKQLTTPELATLCQSCNWVVLGSTNNGTL

SEQ ID NO: 168799 - protein, 411 aa, Oryza sativa
  Clone ID: PAT_MRT4530_67279C.1.pep
MNALAATSRNFRQAARLLGLDSKLEKSLLIPFREIKVECTIPKDDGTLASFIGFRVQHDNARGPMKGGIRYHPEVDPDEVNALAQLMTWKTAVAAIPYGGAKGGIGCAPGELSTSELERLTRVFTQKIHDLIGAHTDVPAPDMGTNSQTMAWILDEYSKFHGHSPAVVTGKPIDLGGSLGRDAATGRGVMYATEALLAEHGKSISGSTFVIQGFGNVGSWAARIIHEKGGKVIALGDVTGSIRNKNGLDIPALMKHRNEGGALKDFHDAEVMDSSELLVHECDVLIPCALGGVLNRENAPDVKAKFIIEAANHPTDPEADEILAKKGVTILPDIYANSGGVIVSYFEWVQNIQGFMWDEEKVNMELHKYMNNSFQHIKAMCKSHDCNLRMGAFTLGVNRVARATLLRGWEA

SEQ ID NO: 168800 - protein, 375 aa, Oryza sativa
  unsure (1)..(375): unsure at all Xaa locations
  Clone ID: PAT_MRT4530_6727C.1.pep
LRFCLPRVNKPRERTRGPGPREVGPTRQPLGPRWSGRTRLSAFGSLGPALQPHSRARSAVGRAHLAAVRARPRAASPARRTGSXAPAPRWSPPATNGPRRSGTRERGGKGETKGTVHGSPRDSEGGGNGGRSGGRRRRGSGXTXRRRSDGRRAKRRRGRGRRRCGEADGGVAEPGGGPERRRRRTGARRRRRRERSTARARFRRRERAVSGGNGRAELGQRLYSNGRGRTRPGREETAAEFSGSIDAPATNTGLNPSESEGERERGNRGKRERESRGVIPLSLMRAGTAGCGAIRGGGGARARAXRRARREEGDDRWAPPVSESGGRARLSAARARAGSRWAAGEERERXEGSGPSRPKREGGGERELLLGFFFL

SEQ ID NO: 168801 - protein, 118 aa, Oryza sativa
  Clone ID: PAT_MRT4530_67280C.1.pep
TRPDKSGRFFVFYTCDRTQPASCSGRCGMLCDVCCDPGKLTAYNGAHTCQDQTVISEYTVNASFGSPATATVANPAEVKRIMTMGLPIRTHHGGLILCRMGDRLPYLKMGDQRSHGNP

SEQ ID NO: 168802 - protein, 618 aa, Oryza sativa
  unsure (1)..(618): unsure at all Xaa locations
  Clone ID: PAT_MRT4530_67281C.1.pep
PVFSQNVGFAQEEAAWNDVGGAAEWVDGGGDGLIGLSLGRQRSFADILQDNIGRRTPASEHPSRAVSRNSFLDNQELLNSADSQYSMHNDILEAQRAVGNVQXNVSGLPSINASASQTFASVLGSSISRNATPDSHYVPXVPSPGLPPVGVRINSNEKKLNCSSSFNTASSKAVEPDDILAGISNMNMSKDGPVGDSNSISQSKFQSEISDHQNISLDPKALQVNKNQHSLMLEADTDYLGIPPISQPSNPSFSDINKNVSGLANIRNSTNTRIDGHAEMQRSSTLSTRSYQKSPTSSNASPGGSPAQHQNIDNINSAFLNYGLGGYPLSPGLPSMMMNCMGSGNMPPLFESAAAASAIASFGADSRNLGNNILSSPTLSLSDVHNLGRTGNQTATGLLSPLSDPFYVQYLKATQYAAQGTANCSDPSLERGFMGSQYGDLTAVQKAYIEALLQQQKQYGMPLGKSTTSNHGYYGNLAFGMGMAYPGSPLGSPVASPSGPGSPLGRREPARGVPSNLRNLGGWNSDPSGYMNDNFPSSLLDEFKSNKARSFELAEIASHVVEFSADQYGSRFIQQKLETATVEEKDMVFKEIMPQALSLMTDVFGNYVVQKFFEHGSA

SEQ ID NO: 168803 - protein, 108 aa, Oryza sativa
  Clone ID: PAT_MRT4530_67282C.1.pep
SDKRFATVTPHAPNPRDQKPYPPSPGPGPTIVHVTCSALSHWWVRIVHSSMRGRSPPVKPRGSFDQSTVKRSKGYIMITGGVVVGRSSSHTHTHTRSILAFYSARSKR

SEQ ID NO: 168804 - protein, 70 aa, Oryza sativa
  Clone ID: PAT_MRT4530_67283C.1.pep
TGPKFTSLRMGAIEEATCRFWARLAQPMVRPNPPRRHSIQGSPGRLGLTPYGGWRVFPTIPTATTVILKL

SEQ ID NO: 168805 - protein, 75 aa, Oryza sativa
  Clone ID: PAT_MRT4530_67284C.1.pep
SHAFGKRSYLLEPNIGGMESMHVWREIVNLLLEHKVRKLYKLAFAGTGAVGKTSLAHKIYNAGNMKGRCTIKLWF

SEQ ID NO: 168806 - protein, 391 aa, Oryza sativa
  Clone ID: PAT_MRT4530_67285C.1.pep
MGQTVKFGRVPFKVGFSHSQSRPKDRWQGKSSEQRSIESYNKIPEFPNCHKLEEPEDNQQTALLLSGSQNLSSPDIFQLLSVDSTTACFGNGAFDQGKDAQGKHEENSVHNVNQEIKQTMDGIRMTVGGVAEFLKSKLANMVQRGCGRKREDIRLQTAQMHAALSVARLATAVARMVGNCQSESTNANNTIMTAIGKDEHRKMHVAIASAAALVAASCSEAAKLTGASREQISTVIHMGMETRSLGDLLMLTTSAATCLKGANAFKMRNRAISNYAFENLMSNQKDVRLPIRTPDGKIHIRMVSVHCKHDKIILNLGKEHSLRTSKEYIIFDEHGGTTDFSYPTDEHSYHAINLATSGGNIQLLFEEHEQYSAWKSFIRYLIINKRSRLSY

SEQ ID NO: 168807 - protein, 73 aa, Oryza sativa
  Clone ID: PAT_MRT4530_67286C.1.pep
MEHCQMNSMINACMADGWDPMLFEAAIDTASVGANGRGCEAFSGRMRPQGQIYCLVTPGSCPGSSVVNPLKFH

SEQ ID NO: 168808 - protein, 34 aa, Oryza sativa
  Clone ID: PAT_MRT4530_67287C.1.pep
WGFSIQWVVPLFYLPSSSTFRENKTRGSIVLIRY

SEQ ID NO: 168809 - protein, 87 aa, Oryza sativa
  unsure (1)..(87): unsure at all Xaa locations
  Clone ID: PAT_MRT4530_67288C.1.pep
MRLERPHSDFNCRTARKSIIASGRKESSQAGRLSACKLTTVKIADLRRRGGRPPAKIIFAGGRWLVRSACENRNSPXCKKENFRLRR

SEQ ID NO: 168810 - protein, 91 aa, Oryza sativa
  Clone ID: PAT_MRT4530_67289C.1.pep
MAPIFASSLIPPLVADGATIQYLHRPLLVVHMANVGRRREQAELAVRRWCLDGATDMEKMRTLTQSGRASLALLIGASHQDRLAAEVMAVK

SEQ ID NO: 168811 - protein, 140 aa, Oryza sativa
  unsure (1)..(140): unsure at all Xaa locations
  Clone ID: PAT_MRT4530_6728C.1.pep
GRCAAAGLGLGRRLLSSSVSXPXHRPLPAHLXPXPRPLPXXXRHHLLTPPLGLHXSXPPXMQWQTQQVRHFXVKDRSRXXRTXTXXKVKKYKIKXRFFMKFXXRVMNDGQVRXWRAXKXTMVXLKWKEVKRGFWKLELVN

SEQ ID NO: 168812 - protein, 57 aa, Oryza sativa
  Clone ID: PAT_MRT4530_67290C.1.pep
MERDGRSRRVVWAHINGPAKPTDVSDHMAPRSGTPRVLTRVPSHEAVTPRSVAHVPA

SEQ ID NO: 168813 - protein, 747 aa, Oryza sativa
  Clone ID: PAT_MRT4530_67291C.1.pep
MAFFARAIRYSSPYLRSRAPPPPAVAASCRWISPTAAAGSPEAGAAVAPADPETPPPREPVGGARVELPSNPEDALEVFVDGHAVRIPKGFTVLQACEVAGVDIPRFCYHSRLSIAGNCRMCLVEVEKSPKPVASCAMPALPGMKIKTNTPVAKKAREGVMEFLLMNHPLDCPICDQGGECDLQDQSMAFGADRGRFTEMKRSVVDKNLGPLVKTVMTRCIQCTRCVRFASEVAGVQDLGMLGRGSGEEIGTYVEKLMTSELSGNVIDICPVGALTSKPFAFKARNWELKGTETIDVTDAVGSNIRVDSRGPEVMRIVPRLNEDINEEWISDKTRFCYDGLKRQRLNDPMIRGTDGRFKAVTWRDALAVVAEVLQQVKPEEITGVAGKLSDAESMMALKDFVNKMGSDKVLCEGNGPSPPADLRSNYLMNTSIAGLEKADVFLLVGTQPRVEAAMVNARIRKTVRATQAKVAYIGPPTDFNYDHEHLGTGPQTLVEIAEGRHPFCSTLQSAKNPVIIAGAGLFDREDQDALFSTIETVAKKFNVVRPDWNGLNVLLLHAAQAAALDLGLVANPTESIKSTKFLYLMGADDVDLDKVPDDAFVVYQGHHGDKAVYRANVILPSSAFSEKEGTYENTEGCTQWTIPAVPTVGDARDDWKILRALSEVAGAQLPYDSLSGVRDRISMVAPNLVHVDEREPCTISSEVKPPVKQQVSSTPFKTVVENFYMTDAITRASKIMAQCSATLLKK

SEQ ID NO: 168814 - protein, 69 aa, Oryza sativa
  Clone ID: PAT_MRT4530_67292C.1.pep
MAASHSRPDRVSSGVRQASVELVACWPPRSSKEAADERQDVVVESPCTTRDARELMLRREVEAAYRRGD

SEQ ID NO: 168815 - protein, 149 aa, Oryza sativa
  Clone ID: PAT_MRT4530_67293C.1.pep
MAPDPATITRHMVFPDVAASQCRQELAVAATIGTLRTLTQQGHQHTEQSSHGCRCKLHQYRHSHVHALDMVVIGPPPAPLLNLTSLVGSTPAACQLLQDQRNENTEIFRGPATTIFATAWFPEAGSGGAEGKARMWTVVTWDECLHAII

SEQ ID NO: 168816 - protein, 152 aa, Oryza sativa
  Clone ID: PAT_MRT4530_67294C.1.pep
YKRLAKRILYLCTYLFPNHKIYLKIQSVCIPFPYLYICHFLITWPPKDDAVWCLPIHSQYLFPQPPHLIFQPLQKNGQKSAQQLNQHNPQPGITEQLRRTLDDSGYHLQALNPTAGVAFLITQLLLLFEYQMAKRSDRLLCKETEEASLGLL

SEQ ID NO: 168817 - protein, 120 aa, Oryza sativa
  Clone ID: PAT_MRT4530_67295C.1.pep
MGVYTFVCRNNGGEWTAKQHSGEIEASAATPYELQRRLVAAASVADSAYGVQSSFSMVTPSSVVFQVIVGAVGGGAMMVSGGGGGGAAASGGAAAEAPKEEKTEEEKAESDDDMGFFLFD

SEQ ID NO: 168818 - protein, 127 aa, Oryza sativa
  Clone ID: PAT_MRT4530_67296C.1.pep
VNSSVPRQTKSSGNNSMKYDHIHGCNLLTSDSTSDKTISSCLLMLVPWISWKIQPSLATGLLGGAERSGSPSSISSSMKFSRHSMLQKALSPLFTTVLDSQSAAPSSKSKIPSRPRRPAAPRQLVEG

SEQ ID NO: 168819 - protein, 152 aa, Oryza sativa
  unsure (1)..(152): unsure at all Xaa locations
  Clone ID: PAT_MRT4530_67297C.1.pep
KKRSTLAEVMSKISLNISFRRLIIGPKLVEXNDLISQLVNITLSDENDQFXVKSMYNAIINSNVRICKRILWKVKVSLKIEIFMWFLHXKGNLKKKINLTKRKWRGDKQCYFYNTQGTIQHLFSGYHEQYDIMRIDVTHLELVANELLFQFG

SEQ ID NO: 168820 - protein, 92 aa, Oryza sativa
  Clone ID: PAT_MRT4530_67298C.1.pep
PCAHTAVSRRQPPAPTSSPPSRPAPPPPSRRRGVRRSGCCSCGLDASAASAWQGGGKLGRLDVSLSPRLLVLRPLLSWVWGGCLGSRVVGEL

SEQ ID NO: 168821 - protein, 165 aa, Oryza sativa
  Clone ID: PAT_MRT4530_67299C.1.pep
GRELLYTPLLSPPLSLPFLLHRRVRNLLPPGSTANFTRGELATALRKNPYYVNVLLAGYDSDVGASLYYIDYIATFHKIEKGAFGYGSYFCLSLMDKLYRPDMSVEEAVDLVDKCIKEIRLRLVVAPQNFIIKIVDKEGAREYARRAYTDSPPEAATSEAATVAA

SEQ ID NO: 168822 - protein, 357 aa, Oryza sativa
  unsure (1)..(357): unsure at all Xaa locations
  Clone ID: PAT_MRT4530_6729C.1.pep
MDLLRQPRGGARGPGPREWGPRGSLTVHGGPGAPGXTPAGAVGPTRQPHPRARAADGRAPHGSRGARPKAATPAQPTGGGAPAPRCGARERGGKGETNRRSTAHPGSTATTGTATGAEKAGGAARVDGDGGVPAVGGRNGGVDEVGEVAVKPKEAAPKRKKVRGDDGGRPELGGDGGERERRRELDSGGERERRVAETVEGGTGSVYIGLGVREGGRMRGKRARKIRPPLMRRRGLGGKIPNESEGEREGKMGGKREGITGNISPLLIARGADGSGGICGGGGARARARRRERREEGDDGWAPPVSEGGGRARPSAARARGGGRMGRGERRXRGKEMGRAGPRGGGGEKDFLELFFL

SEQ ID NO: 168823 - protein, 68 aa, Oryza sativa
  unsure (1)..(68): unsure at all Xaa locations
  Clone ID: PAT_MRT4530_672C.1.pep
SFFYLNHYLTGIKYGLILLIHTTTTXSSYNLTKPIFIQPKDNELSSHKYIQPQLTTFKLHFPTLLVQY

SEQ ID NO: 168824 - protein, 212 aa, Oryza sativa
  Clone ID: PAT_MRT4530_67300C.1.pep
MECVIGVVGRDFAVVAADTSAVQSILVHKTDEDKVMVLDSHKLMGASGEPGDRVQFTEFIQKNLHLYQFRNNIPLSTAATANFTRGELATALRKNPYYVNVLLAGYDSDVGASLYYIDYIATFHKIEKGAFGYGSYFCLSLMDKLYRPDMSVEEAVDLVDKCIKEIRLRLVVAPQNFIIKIVDKEGAREYARRAYTDSPPEAATSEAATVAA

SEQ ID NO: 168825 - protein, 149 aa, Oryza sativa
  Clone ID: PAT_MRT4530_67301C.1.pep
MAQQTWLWSNGRGAIPTISSGTVGLATRWWPRSGSPGESSTAAGAAVWMRRLRCIGGGGDSSATAGMAVWMRRLCCIGGGGDSSGSEGNGLDATAALHRREAGDGWMPMKLMKFKDKRATLTTGWNALVGANLFEQADVCVFLFTEVPM

SEQ ID NO: 168826 - protein, 289 aa, Oryza sativa
  unsure (1)..(289): unsure at all Xaa locations
  Clone ID: PAT_MRT4530_67302C.1.pep
IILKRKRELLRHRLGFTVDRVHGGSSQKRTAEIYPSKRNSQDPSVHDRSTADGNDDVGDDVITGGVSASCARRRTTARRCERRAPTGCGHRGDLTSDLRRSGGDLRLGDGGDVPAVDGDDEGADEDGDGLATTTVSSXRAVTTTGATAAHGWSYGGDGDAKLHGARALSTTRDEGEGGDGGWKAXRRWDGKIRVRRRETIPIRAQIYGFPNRDRRXFQKRKDRGDREDHFPSIDFTGNGKERWDPPVSDRGRARVAAAAELGRLGQGRERXLGRLSAQSQKRILKTFFN

SEQ ID NO: 168827 - protein, 103 aa, Oryza sativa
  unsure (1)..(103): unsure at all Xaa locations
  Clone ID: PAT_MRT4530_67303C.1.pep
RCSQSIISMLDMRTPSSMFMCXPLELLQYQCCMQWWGIILQFRCCTCFRIMQSMQQVICFGLGHQQRMWMKIQMRCMFNMPPVKVPLSGCRGRPAPFLPCLYL

SEQ ID NO: 168828 - protein, 131 aa, Oryza sativa
  unsure (1)..(131): unsure at all Xaa locations
  Clone ID: PAT_MRT4530_67304C.1.pep
YPSKRNSQDPSVHDRSTADGNDDVGDDVITGGVSASCARRRTTARRCERRAPTGCGHRGDLTSDLNDGRRXPDNVGDEEEAAATFGLATAAMFRRSTATTKGRTRMATAWRPRRXAPRAVTTTGATAAHGA

SEQ ID NO: 168829 - protein, 841 aa, Oryza sativa
  Clone ID: PAT_MRT4530_67305C.1.pep
MGIPEVVVPPRAAGPRRYKGLVPWRFQPGFVRPPPVKPPAAAAAVAGGGVAGTPGGKGRGLGASGEGVGSSGGRGDPQSRRCTRSASAKGSGDARSVEEGGPRVAGDDGGSGKSGVAAEGSGFEGLRNGRGGGVGTAAAEDCGLEKSNPDGIVGDADVHLESGSDARDGECVSEGLKKPCVNNSNGSSAADCAPKVKKGNDSGNGGADECNAAAKSSNLACPGNNGDETNRKGRKVVLPWRFQVGFKRSFSKAFCSDSESSGPSGTQFYRAQDSSTPCTPATRSSVRCYASAHSGVRVSAMRDFSVKGEKETSTPYKKSKTGMDGPSQGMPKNGVVLARENIMGSLQNFRLIYRDLLDEEEEKSTEAVIRPDLQAYRIFRERFITDCDEKKYIGNVPGIKVGDIFHLRVELCVVGLHRPHRVGVDHIKQEDGTCIAVSIVSYAQSSDIKNNLDVLVYSGAMTAIANQKIEGTNLALKKSMDTNTPVRVIHGFVTHLNGNCQRKKIPTYIYGGLYIVEKYWREKEGNDRYVYMFRLRRMAGQKHIDIQDILNSGQAESYGGIIIKDISRGLEKIPVSVVNSISDEYPMPYRYIAHLQYPRNYQPAPPAGCGCVGGCSDSKRCACAVKNGGEIPFNDKGRILEAKPLVYECGPSCKCPPTCHNRVGQHGLRFRLQVFKTKLMGWGVRTLDFIPSGSFVCEYIGEVLEDEEAQKRSTDEYLFAIGHNYYDEALWEGLSRSIPSLQKGPDKDEEAGFAVDASKMGNFAKFINHSCTPNLYAQNVLYDHDDKSVPHIMFFACEDIPPRQELSYHYNYTIDQVHDANGNIKKKKCLCGSIECDGWLY

SEQ ID NO: 168830 - protein, 140 aa, Oryza sativa
  Clone ID: PAT_MRT4530_67306C.1.pep
TAGGRLALRAKGKARSGIGGEGDDEAEATDANGRDAKLPSSSSPPTTATPSCLSHPCTSPPSSAPPPSSLACLRRPRPLPPSLAPPPPFPLAVTAPREFPPPSLPATALICLSCPRPSPPSSTPSPLSPPAAAVLGSFFA

SEQ ID NO: 168831 - protein, 80 aa, Oryza sativa
  Clone ID: PAT_MRT4530_67307C.1.pep
MDDGRMVRFLLLLLLLLDMVMGGSRGEEEGSWGHGGVVKSWHDRGGIFGEGRRSNNFLEVTIVFVYVAVTLEEIVLSPSP

SEQ ID NO: 168832 - protein, 78 aa, Oryza sativa
  Clone ID: PAT_MRT4530_67308C.1.pep
LQSIYLAYGCITHMFQTHLFMLQTILFNLSQSFMYIAESSMLSGKYSLHWQIHSSLYLVMKPKLNCRLLIFLKYLILV

SEQ ID NO: 168833 - protein, 117 aa, Oryza sativa
  unsure (1)..(117): unsure at all Xaa locations
  Clone ID: PAT_MRT4530_67309C.1.pep
MEFGWVLRRSMRLPDSPRHERGLPAALRXVGVKPEVWCAWLEGVMRRILSRPLSDVDLYVNFVVCVPRPVLDRDFNAHYAWNSIREFLGVTNTDQATQPKRPSPLCCYRRRSPGSLS

SEQ ID NO: 168834 - protein, 131 aa, Oryza sativa
  Clone ID: PAT_MRT4530_6730C.1.pep
MSCGLLRCGGMPKPPPPPPNTCLNAAQRCRHAISLASDVLLGQGRHRRRLFPSATAVLRGGTLGCMPTGRGIPAPTPPDIGQDVGALPPVPSACDRTSCSAHLAATWQPGEGLGVVCSKGPRGVTRHPEAP

SEQ ID NO: 168835 - protein, 136 aa, Oryza sativa
  unsure (1)..(136): unsure at all Xaa locations
  Clone ID: PAT_MRT4530_67310C.1.pep
HPEKTLEVELNEGSSSNAFKKVNGAQGHRRCPFPPEDAPDLGKEPDPAVFLSTNASXCLEGRRRTPVAAAGSLRALATAGRRAAAGSGCATAGSAASSFTPTPRKAAGSPLSCLGESASDRGRRRARPAPSRPPLR

SEQ ID NO: 168836 - protein, 110 aa, Oryza sativa
  Clone ID: PAT_MRT4530_67311C.1.pep
RRSRPSSPPARRPPPPPPSSAGRTGPPPSPPPSPGAPPCPPPLRHAAAGRIASAEESINQQEERTKLTAAAAAAATASGGRCPPAVRLLDDLELGFGLVRRSGRSGGGRR

SEQ ID NO: 168837 - protein, 285 aa, Oryza sativa
  Clone ID: PAT_MRT4530_67312C.1.pep
MAAPNPSATMAAAAASTPARAWWRAAAPASASTAAVSCFRVGAKSLTGLQMTSTRANKVRTVHVKSGEAEGSPSTESITRDEETLQRDLQTAIQEENYAQAAKLRDELRVLQEDSRSAVLAANARFYNAFKNGDLVAMHSAWAKGDHVYVVHPSAGRISGYDMVMQSWEMVCDADYEFPLQIDLQDVEVHVRGDLGYVTCLELVKTKGSSSWGRQVATNVFEKMYFANRFLPVVTASNLFIALANVDLMMKLPKARDQGHQKESCTLQEAAVVGVAQVERQSNRF

SEQ ID NO: 168838 - protein, 619 aa, Oryza sativa
  Clone ID: PAT_MRT4530_67313C.1.pep
MAQYRYRVVVDDTSYEFSMLRTIPQSFTPWDDRAVQQSTSSSCEHKRYEQKNQLQDKIRKQLREVQLSPSSYDTAWVAMVPVQGSHQTPRFPQCIEWILQNQHDDGSWGTNLPGLNFIGKNFWVAMDEQTIAPVGFNITFSGLLNLATGTGLEFPVMQTDIDGIFHMRKIELERDAYGTASSRRAFMAYVSEGLGSLQDWDQLGMVDTLEKMGISNNFSCEISDILDMIYRLWIHNEEELMLDMGTCAMAFRLLRMHGYDISSDGMAQFVEQSSFDDSIHGYLNDTKALLELYRSSQIRCLEDDLILQDIGSCHAKEKAIISHNAIIILSQVEYALKFPVYATLERLEQKRNIEQFKTKEQLKIEGFKLLKSGYRWDGHGEIGFSSECVEILFYAIYNTSKQIAEKAVPLQKRNVVDHIAESWWFTVRGMLTEAEWRMDKYVPTTVEEYMSAAVDSFALGPTITSAALFVGPELSEEVFRSKEYIHLMNLANTIGRLLNDMQTYEKEIKMGKVNSVMLHALSHSGGGRGSPEASMEEAKREMRRVLQGSRCDLLRLVTRDGGVVPPPCRKLFWFMSKVLHFVYMEKDGYFTADGMMASANAVILDPLQVTLLPSGLGTL

SEQ ID NO: 168839 - protein, 97 aa, Oryza sativa
  Clone ID: PAT_MRT4530_67314C.1.pep
HLKRQEAANRSQIHNRRHMKRRRIHEHRELRPHLSLDDDLGRYSSTDTHGARRRALTSATCATSPRPACPTPASTPAAAAAVARTTTPFFPLSGVLS

SEQ ID NO: 168840 - protein, 297 aa, Oryza sativa
  unsure (1)..(297): unsure at all Xaa locations
  Clone ID: PAT_MRT4530_67315C.1.pep
RCLSPFPSPPPVIASEGGGASVSGDAGRGVSQRRGGRPRARRRCAPPTPPPMTAPSPPTFLRSSASTTLPPLPRPSSPCSSGDAVVGVVPATTPTGSPASCPPPPLWSSPAXPPSPPGPSGATDTANAAGGDATLAVPPPPPLLTGTAVPPPPPAAAQPQPQQATVAEGDPPPPATGSAEEVAGNGEPPQPPATDPASEPTAPPEPQRATEEKKGDEPPPPASTGVKEEVAGHGQPLPPPTSTPASEPPAPPEQPLELPPQPLPPPQGLTARRREGRRSHEAAEGGGGEEQEDRRAR

SEQ ID NO: 168841 - protein, 129 aa, Oryza sativa
  Clone ID: PAT_MRT4530_67316C.1.pep
MAERSITTARRAPTSSAGLRSTDAASHDRAISPNVFTLLRLDYFAATAEAKLPVLVWRRRRGCGSSNNADWIPRLLPAAAALVLARMPPSPPLWSSPTCRCRRRFGPCPHAAVATAVALARMPPSPSPL

SEQ ID NO: 168842 - protein, 956 aa, Oryza sativa
  Clone ID: PAT_MRT4530_67317C.1.pep
MDGPSGATDTANAAGGDATLAVPPPPPLLTGTAVPPPPPAAAQPQPQQATVAEGDPPPPATGSAEEVAGNGEPPQPPATDPASEPTAPPEPQRATEEKKGDEPPPPASTGVKEEVAGHGQPLPPPTSTPASEPPAPPEPKQQQQQQQAGDAAKQAAPSADDEDGGKKRHSRWNFLRNLFRRHKGSLRDAVKAAALTKPRKEEEEKSKKTAGPDEASKLPPPPAPPPAPDDDAASRSRSTRRRLVKVLRAVQFITRLKNWRNRPPEDGKAKEEQKPSPETKDKKPPETTGKDKKPADPELGQAKEKTPAPQQEEEKKEKEEETPEAKAQRLEEEKSRRRWKERGEALLQEILEAAFEALLAGEFNKLKDQWRQCLLTFSFFPVNHKVKKQAVTYWWAAQFGLPHRRAPSAAEPRGSEEIFAEFCASGFLEPITSRCSGASHGCRVNPLVHWMVKRTARGEFAGLDQHGHPTVDPGESRGEMKEQQNENDKINLKLELQKFQNIHVILNINAHVYRLPYCLLSFLGDRLVVLQLGRWWNSDNSTYLEVEGLEKLNAIGNLKKLRYLGIRGLSKLTELPKNVNKLQQLEVLDVRGCQNLTHVMSSTVRNLRQLTHLDLTECYMLEHIGWEITSLSELQVFKGFVFGIDAPRRYVFQCRDRHACHLQDLKAMKNLQKLSINVTTDANVDKNDMGQLKHLESLQSLTITWGELPSILTSAERENEKKQLLERWTSLVLPLSLVKLDVRCYPSEEIPFEWFEPKGAIKPKNLKKLYVRGGAVKKLNLPKDNNIKTLRLRYLKEFKMKWEEILGMMNNLHYVEVVYKDPKVMKSEKIKHQTDNVELQPHIIKEKEKKVKEEEEKCMAEIKKNMRIPDSTLDEHGVWKKDQKEADQKKAKEEEEKHMAEIKKNMGIPDSTLDEHRVSKNDQKEVDQNKKGKGCEGDGDGSKGTHFTYYLAFNKF

SEQ ID NO: 168843 - protein, 166 aa, Oryza sativa
  unsure (1)..(166): unsure at all Xaa locations
  Clone ID: PAT_MRT4530_67318C.1.pep
NLGEACKKMGPLREWAFVXATTVRSLPXGSXSTRRALPRRPARSRATPSFXNVSNGGRDXVALPGVCPXERHPXNFXXPLLPATRSPVGRTPEXXXNFLLRSKXGXPASXFXQSXDLSTRXKPQGXXGYYQRXXSGTMXENLPHCFGMHPXPPXVSPRNSKEGPXK

SEQ ID NO: 168844 - protein, 143 aa, Oryza sativa
  unsure (1)..(143): unsure at all Xaa locations
  Clone ID: PAT_MRT4530_67319C.1.pep
LAVRGRHASGDRSHRHRSRCCRTHHRASSHRATAVTGQPXTAAATGTAAVEPRAAVAAMLPLSLAPLPPGPAARAPSPAHMSSPRQLPPAAVQASSPPPPPXGRIRPGDGQIRRRWRRIRRLLAGMGRRRRSPNRRCSPPLHA

SEQ ID NO: 168845 - protein, 414 aa, Oryza sativa
  Clone ID: PAT_MRT4530_6731C.1.pep
MAPAILEKFSMNLRRRRWLELIKDYDVGIHYHPGKANVVADALSRKSRCNTLGVRGIPPELNQQLEALNQSIVSHGFLATLEAKPTLLDQIREAKKNDPDMHGILKNMKQGKAAGFTEDEHETLWNGNRVCVPDDKELKQLILQEAHESPYSIHPGSTKMYLDLKEKYWWVSMKREIAEFVALCDVCQRVKAEHQRPAGLLQPLQVPEWKWDEIGMDFITGLPKTQGGYDSIWVVVDRLTKVARFIPVKTTYGGNKLAELYFARIVSLHGVPKKIVSDRGSQFTSHFWKKLQEELDTRLNFSTAYHPQTGGQTERLNQILEDMLRACVLDFGKTWDKSLPYAEFSYNNSYQASIQMAPYEALYGRKCRTPLLWDQVGESQVFWTDILREAEAKVRTIRDNLKVAQSRQKSYADN

SEQ ID NO: 168846 - protein, 85 aa, Oryza sativa
  Clone ID: PAT_MRT4530_67320C.1.pep
CCHQFYQMKGLETWEQHARQAYEFFDKEGNRPIVIDELASELGLGPSVPLHVVLQDWIRHPDGKLSFLGFMKLLHGVSSRTIPKT

SEQ ID NO: 168847 - protein, 112 aa, Oryza sativa
  Clone ID: PAT_MRT4530_67321C.1.pep
GRWKAKEVYNVGSTLRLAKAGCKRDYIIPSMAGTLIEDGWRCETNQQRKETGNRLEELKQRKRQVFVAGRTKNGKIMGSSSFSCSFRLVKNCTSSSPSFCLVIAVCWCGDHT

SEQ ID NO: 168848 - protein, 757 aa, Oryza sativa
  Clone ID: PAT_MRT4530_67322C.1.pep
MVRGKQCQRSKVKSTHCPASSVTPAGLTKVVTMFGAVPNDVAMSLRKRARMMPQVYHQVGVLNRYKVYDVYPIIFRWCHTWVYGVEATSRYQLFKHALFRELSHECLTTNPLTQIPPNISSAGFEDKYLGFPTPEGRMNKGKFQSLQEKVWKRILLWGENHLSVGGKEILIKSVLQAIPVYVMGIFKIPDSVCDELTKAVRNFWWGADRGKRKTHWRAWDTLIKPKQCGGMGFRDFKLFNQALLARQAWRILDNLNSLCARVLKAKYFPNGSIIDTSFGGNSSPGWKGIEYGLELLKKGIIWRVGNGHSIRIWRDPWLPRDFSRRPITRKGNCRIKWVPDLLNDNGEWDLERIQQHFNQIDTDIILKIRPSRSQEADFVAWHPDKHGIFSVRSAYHLAVSLANVNSSSSSSGHDLSKAWKLVWNCNIPQKVKIFAWKAATNSLATLQNKKTRRLEPMAICSICGREEEDVAHALCRCPHATNLWLSLRSSKDISFEAGASWSGSGWILDQLGLIAKEEGAMFLMLLWRIWYNRNEIYHGKSAPPVSVSHRFIVSYVSSLREIKQFPRADFAKGKFVVSNLGCMKGTSQVPDPKVLNHWEKPNPGWMKLNVDGSFDARYGSGGIGAVLRNSAGSLIFCGNMSRCGGALEAELLACREGIIMALQWTLLPFIVETDSLELLKLVGAGSSDRSELAFLVKEVRDPLSGNREIIIRKIHRENNCVSDFLANKGGSESLTAFWPDNSCDCISHLVGVDSFVE

SEQ ID NO: 168849 - protein, 56 aa, Oryza sativa
  Clone ID: PAT_MRT4530_67323C.1.pep
MFGCTDSTQVLKELEKTKKTYPHAFVRIQGFNNVRQVKLISFIAYNPPDLMESGGN

SEQ ID NO: 168850 - protein, 188 aa, Oryza sativa
  Clone ID: PAT_MRT4530_67324C.1.pep
ARPIAMMGPFVPSRDRHGPRHRELQRQPARAPLLQSTPAEPPPWDPPRRRRPPARAAVQRNPSAVTSWRGSLPPPSRHEPAWKPPPSRLSGPSRPACSREAGGEAMRWGLGAGRGRRTRSPSAPPWHVVKAWEVSGKKREEGRTPCLRFAPPWRSVTPPWHAILRHRLDPPRLNELRRRRSGTPGTHV

SEQ ID NO: 168851 - protein, 373 aa, Oryza sativa
  Clone ID: PAT_MRT4530_67325C.1.pep
MQTWAPPESPSPAPGRFTPVPHWPSRLRRREPSPEFHTPTPSTIIYPIHPSILGENWSWDARFSGEHTISRRAHVHALASTSAAVKKPRGIPLPLPRLLRGHHPPPSCSAPSLLRLTRSSRRLRLRAAAAAAEEADVLPGPGAEGEMAAGGRLEEQPEGPIGGSQVDIGGLAFQGDMGGGGFAGGSGGAGAGGGDGNKMLDRGINTAIVLGASTYALTKLLTVDHDYWHGWTIFEILRYMPEHNWSAYEEALKTNPVLLGDWIAQCYEGKPIFEFDRARMFRSGLVGFTLHGSLSHYYYHFCEALFPFKDWWVVPAKVVFDQTAWSAIWNSIYFVVLGFLRLESPATISSELKSTFWPMLTESTDISFVIIMP

SEQ ID NO: 168852 - protein, 602 aa, Oryza sativa
  unsure (1)..(602): unsure at all Xaa locations
  Clone ID: PAT_MRT4530_67326C.1.pep
SPPPAPAPPLPPANPPPPMSPWKASPPMSTWLPPIGPSGCSSSLPPAAISPSAPGPGSTSASSAAAAAARSRSLRDDPVKVAAGVVGLVLGLYVLALWIRRWRRRRRRQQAQPLPLPPPMLYNPNPYYKDIHHTLVLAGDQPPLPFVFMQQQHHHPTAPQTSGGTFSDAGSERPHSISIDGGSLSYDQLAAATGGFSPDNVIGQGGFGCVYRGRLQDGTEVAIKKLKTESKQGDREFRAEADIITRVHHRNLVSLVGYCISGNDRLLVYEFVPNKTLDTHLHGDKWPPLDWQQRWKIAVGSARGLAYLHDDCSPKIIHRDVKASNILLDHGFEPKVADFGLAKXQPGNHTHVSTRIMGTFGYIAPEFLSSGKLTDKADVFAFGVVLLELITGRLPVQSSESYMDSTLVGWAKPLISEAMEEGNFDILVDPDIGDDYDENKMMRMMECAAAAVRQSAHLRPSMVQILKHLQGQTHGEDLNSIFRTTYAEDTYSSIMESGESIGPRSRRAPGSQGNTSSDYSSDRPSSYRQSQPTDTHPNTLIPFSLARETSAAEPSVASTINAGNSCAGVRWWTSWRRWGRPCIPAPGTRPSWASASGSGRAG

SEQ ID NO: 168853 - protein, 138 aa, Oryza sativa
  unsure (1)..(138): unsure at all Xaa locations
  Clone ID: PAT_MRT4530_67327C.1.pep
TPLDIDIRDEPRHTQYGACGSRQEGXCAISDLGEFVLEKEDYPVVDYVLMNXEQHRLRPTGXRAITYQIRGPNLYKNPCLYLFYLNLAYTLVPTMSIPCNYHSRNLKSRHMGINTSTLGGNGQTNKNQDKPRHKMHKS

SEQ ID NO: 168854 - protein, 611 aa, Oryza sativa
  unsure (1)..(611): unsure at all Xaa locations
  Clone ID: PAT_MRT4530_67328C.1.pep
MAVLMPRSSILLPSPPPAPAPPLPPANPPPPMSPWKASPPMSTWLPPXAPRVAPPASRPSPSPPRPQARGARRPPPPPPRRAAXPPAPTSRRRPRQPSATAGATRIDLPASTSCIATPRWTSIVLPPSGGLPSSTTPAYRRHWPLLAGAPLPPFSTDRTARACPPSMARPSYPPRTWPPARGQAPPPRRHLLRPRAESTPCRDRDXTTAPASDPAPAAPQTGSPSFLNSVAVKVAAGVVGLVLGLCVLALWIRRWRRRRRRQQAQPLPLPPPMVLAGDQPPLPFVFMQQHHHHPTAPQTSGGTFSDAGSERPHSISIDGGSLSYDQLAAATGGFSPDNVIGQGGFGCVYRGRLQDGTEVAIKKLKTESKQGDREFRAEADIITRVHHRNLVSLVGYCISGNDRLLVYEFVPNKTLDTHLHGDKWPPLDWQQRWKIAVGSARGLAYLHDDCSPKIIHRDVKASNILLDHGFEPKVADFGLAKYQPGNHTHVSTRIMGTFGYIAPEFLSSGKLTDKADVFAFGVVLLELITGRLPVQSSESYMDSTLVGWAKPLISEAMEEGNFDILVDPDIGDDYDENKMMRMMECAAAAVRQSAHLRPSMVQVGMFLVSNQ

SEQ ID NO: 168855 - protein, 44 aa, Oryza sativa
  Clone ID: PAT_MRT4530_67329C.1.pep
STKCAVQMHLLFIAMVVAVSGAVVLHLSSKVYLVNEFGLIMTIR

SEQ ID NO: 168856 - protein, 384 aa, Oryza sativa
  unsure (1)..(384): unsure at all Xaa locations
  Clone ID: PAT_MRT4530_6732C.1.pep
INRVSTSWGFVYSRVNKPRERXARTGSTGVGPTRQPLGPRWTGSTRLAAVGAVGPTRQPHPWARAADGRAHLAAARARPKAASPARPTGGGTTAPRWSPPATTGAAERRPRERRGEGSERAVFGSPRVDGDDGNGGRSGGRRRRGSGRRGRRCSGSRRAKRRGGRGRRGRGEADGGDAEWGGGPERRRRRTGARRRRRREGATVRARFRRGGEAASGGNGGEEHGGRLYSTGRRRARPEREETGAEISAALEDAGETCGIXLRTNPREREREKRGNRERESRGMIPPSLWRAGTAGCGGFGGGGGARARAXRRERREEGDDRWAPPVSEGGGRARLSAARARGRPMGRGGGEERERGGVGPSRPKRGXGGKRRLLGIFLFIKPF

SEQ ID NO: 168857 - protein, 97 aa, Oryza sativa
  unsure (1)..(97): unsure at all Xaa locations
  Clone ID: PAT_MRT4530_67330C.1.pep
SPAHDGDGAPGANLDGGGXDEWDLGRANPTAATARCGGECSGGGVADVDRRRRGVAVSAAVATWAGGRRLGKGPTGGPHQSATPRRGGRRPAWLGLG

SEQ ID NO: 168858 - protein, 358 aa, Oryza sativa
  Clone ID: PAT_MRT4530_67331C.1.pep
MAAMAAAVASSPSPSPASTRLLRGHHPPPSCSAPSLLRLTRSSRRLRLRAAAAAEEADVLPGPGAEGEMATGGRLEEQPEGPIGGSQVDIGGLAFQGDMGGGGFAGGSGGAGAGGGDGNKMLDRGINTAIVLGASTYALTKLLTVDHDYWHGWTIFEILRYMPEHNWSAYEEALKTNPVLAKMMISGVVYSLGDWIAQCYEGKPIFEFDRARMFRSGLVGFTLHGSLSHYYYHFCEALFPFKDWWVVPAKVVFDQTAWSAIWNSIYFVVLGFLRLESPATISSELKSTFWPMLTAGWKLWPFAHLVTYGLVPVEQRLLWVDCVELIWVTILSTYSNEKSEARNSEDASTSNASNDNSI

SEQ ID NO: 168859 - protein, 149 aa, Oryza sativa
  Clone ID: PAT_MRT4530_67332C.1.pep
MNHGDRKPRPKAAVEVVLTGVRGDEGSGDEPRRRRRDGGGWAHGAGAMEGTGESGGKRKKVEGSAGMLYRGSGETDVAGALPISPATWEVGGVADVDRRRWGATVSATVVTWAGGRRLGKGPTGGPHLSATPGRGGRRPAWLGLGLRPA

SEQ ID NO: 168860 - protein, 281 aa, Oryza sativa
  Clone ID: PAT_MRT4530_67333C.1.pep
MASGSIVKKEVGENHDVLRFGFNNSVKGDLAPQHPIQATVHKEAKFWADKKRFGAEAIYGSAFNIRKDLDAQILSKFQRPPGALPSSMLGYEALTGSLDDFGFEDYLNLPQDSDSFHAPDMHHGMEKNLLKIGICKKYIHTRSRGDSGGRGVRLPNLAPSRSDPACPALEADPQATTSGEVTARTWRWQSEDYGSPTRRGDARGRCRQVDAGGTSGSRRLAWTASGGWRDNDKEASLTDGVKVDARANGKEAGLTDGMEVNTVMTGSPMMVVCATRHAETD

SEQ ID NO: 168861 - protein, 326 aa, Oryza sativa
  unsure (1)..(326): unsure at all Xaa locations
  Clone ID: PAT_MRT4530_67334C.1.pep
MLQWYIRALADELLVVFTFVVETVVTPRSSPPKPVGPFPNLRPLAHVAHPPPKPPHPASSGPRRPRXRACAAPPAPTPPLSLAAPSTEMAGIQIXNPAALSLSPPPPTSHIAGEIGLASATSVSXSPYXSMPALPSTFFLFPPLSPVPSIAPAPCAHPPPPLPLLRPPLATATLAAAPRRRRRWVRAAEXHSSHPSSVEVLSELVRPPTSSSRGSSSTVAAVPFGEDSHPFPFLXPRSPVRRRRPRSPSPSVAAAIRCRRFRXSFCAVAPPPDAPPATHSRARRRRGRSAGLEPSRAGXPPPLFFPPAADQWAXRVPAPFLSLPSR

SEQ ID NO: 168862 - protein, 520 aa, Oryza sativa
  Clone ID: PAT_MRT4530_67335C.1.pep
MARPAAFVPPPPQYVPPEEPSAFARLYDVVDRAKAALVTITGGPTTVHGVVVISSGHGQRARRAVTEIITTAPASDPAPAAPQTGSPSFLNSVAVKVAAGVVGLVLGLCVLALWIRRWRRRRRRQQAQPLPLPPPMLYNPNPYYKGDQPPLPFVFMQQHHHHPTAPQTSGGTFSDAGSERPHSISIDGGSLSYDQLAAATGGFSPDNVIGQGGFGCVYRGRLQDGTEVAIKKLKTESKQGDREFRAEADIITRVHHRNLVSLVGYCISGNDRLLVYEFVPNKTLDTHLHGDKWPPLDWQQRWKIAVGSARGLAYLHDDCSPKIIHRDVKASNILLDHGFEPKVADFGLAKYQPGNHTHVSTRIMGTFGYIAPEFLSSGKLTDKADVFAFGVVLLELITGRLPVQSSESYMDSTLVGWAKPLISEAMEEGNFDILVDPDIGDDYDENKMMRMMECAAAAVRQSAHLRPSMVQILKHLQGQTHGEDLNSIFRTTYAEDTYSSIMESGLPRSDLFTKQPNNYR

SEQ ID NO: 168863 - protein, 391 aa, Oryza sativa
  Clone ID: PAT_MRT4530_67336C.1.pep
MASGGVVKKEIGGNHDVLRFGVNDSVKGDLAPPHPLQASVHKDAKFWADKKRFGAEAIYGSAFNIRKDLDAQILSKFQRPPGALPSSMLGYEALTGSLDDFGFEDYLNYAAASEDGWVLGRGALELLLGGTAYTQATSAPQISLSMQQVQRRELQLVAVSAMLIDCKYEEIWAPEVNDFIFISDSAYTREQILAMEKGILNKLQWNLTIPTPYVFIMMLSASADNKSDKENAEALKFKRLSQSRQQLIDWSVKIKVSKEHGGFMRFIQVSCLGASASSSRMLRAKAAGEESVLKEFPEPLRLLISHRQSMGTCILNFHSRIQPVYVVDVAAAIVNSLKDDGTSMGKSYGLGGPEIYTVHDLAELMYETICEWPRYIDVPLPIARAIASPES

SEQ ID NO: 168864 - protein, 94 aa, Oryza sativa
  unsure (1)..(94): unsure at all Xaa locations
  Clone ID: PAT_MRT4530_67337C.1.pep
CPTNIMQAFAPVRXMSPRAVSPGFFEVPNEQFQCTALSVDTRDIEPRGLLLSHDTNGASLPYIVWVTGISGPAFPGCPEAYQQQCLQSRRALLT

SEQ ID NO: 168865 - protein, 75 aa, Oryza sativa
  Clone ID: PAT_MRT4530_67338C.1.pep
EVSPCRCTDNLFIVYIKNIKEGISHQIHIFTIRTKEQPGDIKESIYIVKKKTINFDIFFRLYVNSYIIILRKHMI

SEQ ID NO: 168866 - protein, 330 aa, Oryza sativa
  Clone ID: PAT_MRT4530_67339C.1.pep
MVLVAPAASYHHHRAAAAAAAAAAAAAAAEPVFPLLGTGQCALDADTAKSSGAAAAAGVPPGSASAIHFWQSQPTTAAGAGGGSADKKPLPMLDYGGIGGPGGSGAATCHDCGNQAKKDCVHHRCRTCCKSRGFDCPTHVRSTWVPAARRRERQQLAGAASSPPTSSAFPAATTASAKKPRLLGSQTTTTTSRTSTSNATTPRSFDTSSSHQVASFRDALPRHVRAPAVFRCVRVRSVDDGDDEFAYQAAVTINGHMFRGFLYDQGADDGRGGMASTSNDESSHGAGAAVPSISDLHLGSASAAVPPHLYSGGSGGPLILGGLGYGNTMN

SEQ ID NO: 168867 - protein, 935 aa, Oryza sativa
  Clone ID: PAT_MRT4530_6733C.1.pep
MSFAIGFGTAPLYAQIPHDRQEEKCRVKVTLNSNREDIPSVMFEAGGGNYIHACQEGSDRGSYLETEGIENDATIRHLVEMLWAMDETRAEVVLAAQDRDDRNRGKICRLEDKVDRLEKELAALMGEAPPQKARIRLTATKRALFVPRYQLAPKVRVVEKEVTPALADPPVVNMVLTRSNGNGPNINNNNNNNGENPTLAQVLAQQAQLMNMMMQQLQNQQNQGNNHAPPQNKLAEFLRVRPPTFSSTTNPVEAGDWLHAIEKKLDLLQCTDQEKVSFASHQLHGPASEWWDHFRLNRTTAEPITWLEFTAAFRKTHIPSGVVSLKKKEFRSLTQGSRTVTEYLHEFNRLARYAPEDVRTDEERQERFLEGLNDELSYPLMTGDYHDFQKLVDKAIRQEDKYNRMEQKKRRIAHFKAQQGNSQRPRLTLGPQSMPQGGSSSVVRPQRQFFNNNAGNNIRNQAPRPVAAPTQQQPAKREQGSKPRACFNCGDPGYYADKCPKPRRVKVVPAQSNSTASASKARVNHVTAAEAQGAPDVILGTFLVNSVPATVLFDSGATHSFLSMSFAGNHGMEVEDLRRPLMVSTPSNQALSLQRSPSVRIEIQEVPFLANLILLESKDLDVILGMDWLARSSLNQMTLEEIPIVREYPNVFPDDLPGMPPKRDIEFRIDLVPGTTPIHKRPYRMAANELAEVKRQVDDLLQKGYIRPSSSPWRAPVIFVEKKDHTQRMCVDYRALNDVTIKNKYPLPRIDDLFDQLKGATVFSKIDLQSGYHQLRIKEEDIPKTAFTTRYGLFECTVMSFRTYQCPAFFMNLMNKVFMEYLDKFVVVFIDDILIYSRTKEEHEEHLRLALEKLREHQLYAKFSKCEFWMSEVKFLGHVISAGGVAVDPSNVESVTNWKQPKTVSEICSFLGLAGYYRRFIENFSKIAKPMTRLR

SEQ ID NO: 168868 - protein, 92 aa, Oryza sativa
  unsure (1)..(92): unsure at all Xaa locations
  Clone ID: PAT_MRT4530_67340C.1.pep
MWPVRPCYSATAGKLAVVALSEGPIXTWPVRPASARSDHHRFGLTEYDSVGSVSATLSNTIPASRGPGMPVRPPLCGRSDRPGQAEPSHYPA

SEQ ID NO: 168869 - protein, 178 aa, Oryza sativa
  Clone ID: PAT_MRT4530_67342C.1.pep
MYLLSPRNGDEEDEQEEIQELISDDEPPNLKLASCATAASSSSSSGSDMEKGRGKACGGGSTAPPPPPPSSSGKSGGGGGSNIREAAASGGGGGVWGKYFSVESLLLLVCVTASLVILPLVLPPLPPPPSMLMLVPVAMLVLLLALAFMPTTTSSSSSAGGGGGGGRNGATTGHAPYL

SEQ ID NO: 168870 - protein, 236 aa, Oryza sativa
  Clone ID: PAT_MRT4530_67343C.1.pep
MAALVGRSPADEGEPPVAEVGLVGHHDDEQREEHPDAPRRAAGAVDGVPLGHRQRQLPQLVHPAPLSVAAARQQPPRRAAARAATPSTTTRAWSEEDEQHHQEEAQVSGSSGACTYPAAAAGEPPLLYEFPIGSLESNFLACEVKKKRKEKKLAMEVIEHDSALIYRAEHRCHVAVTHRAASRLRPIGGRHGAADHAAMGPTAWIADTVGVTAPEEIRVLFGEFTTAEASSRIFIR

SEQ ID NO: 168871 - protein, 135 aa, Oryza sativa
  unsure (1)..(135): unsure at all Xaa locations
  Clone ID: PAT_MRT4530_67344C.1.pep
MPPDIDIRDMPRQTQSGACRGQREGSSSISDLAECGFEXENYPVVDYVMMNXEQHRLRPTGVGLLPXQIRGPNLYKNPCLHFFYFNLAYNLVPTIPIXAKYRSRDTKHQQYRYSTSPLGDHKRIVNSGNVCNLPK

SEQ ID NO: 168872 - protein, 139 aa, Oryza sativa
  Clone ID: PAT_MRT4530_67345C.1.pep
MGNSYSNGGSPAAAAGYVQAPELPLHLCFFLVVLLVFLGFSWYTSYGSAAERFADQARLLLMASPLALLLAVRLLSGGGDGERRGVDQLRQLSLPMPERDSIHRAGGSPWGVGVLLALLVVMVSYQSNFRDRWFPLVSR

SEQ ID NO: 168873 - protein, 46 aa, Oryza sativa
  Clone ID: PAT_MRT4530_67346C.1.pep
FRPLMLKLIIHRQGGNALGALYPRVDPYLDGVQSHRLGLSLPISDK

SEQ ID NO: 168874 - protein, 330 aa, Oryza sativa
  Clone ID: PAT_MRT4530_67347C.1.pep
MHFRKLSNNDWKVIEQRIERKLSSWKGDDHKKKYRLTRWDIICQPKDQGGLGVHNLEIQNKCLLSKWLYKLINEDGVWQDLLKRKYLHNKSITQVDRKQGDSYFWSGLMKIRFWDDKWLGNIAFKDKYPSLYAIVRRKSASIASVMGSVPLNVSFRRALVGQNLTLWYNLCASIAHIQLDDSTDCFRWNYHQNGHFSGVDKDKRKLILVGASALCWALWLCRNDRVFDKSPSVSYMQFYLELRLYKHIDNGLGVGGKLSVDYLTGGSEMVDKCDSNGGNNNGLCLNLIKPQNYALCMAKVILKSQLPMSLQERAPLDDLANSKCHDIIKL

SEQ ID NO: 168875 - protein, 380 aa, Oryza sativa
  Clone ID: PAT_MRT4530_67348C.1.pep
MARDDDPAKKLAVDGGVAAAARCCDFCGGLPAVVYCRADSARLCLPCDRHVHAANTVSTRHARAPLCSACRAAPAAAFHRGDGFLCSSCDFDERLRRGSIGGGGDELPLDDRAAVEGYTGCPSIGELAAILGVVGGDSDKPADDGWWSASWEEEAPQVLSLDDIIVPTTSCHGLRPLLTPPSPENQSSPDNGELDGEVVRQLGELARSEAAAQATFVAGDQLASWASPEFTSGHGDFGIEAASTTVPSCENETWIMSTDCTDPTDASKTDIAREEAPASSSAEPCLSSLVEISEICRSMSYSGSGIDNGGHDPSTLAIMPTQALPKKGVYDIAYPDRGTVISRYKEKRKNRRFDKQIRYESRKARADGRLRIKGRFAKSN

SEQ ID NO: 168876 - protein, 101 aa, Oryza sativa
  Clone ID: PAT_MRT4530_67349C.1.pep
LRRRTRRQLEKVKGGAHRGQRPSPSRVTIIPSSSRVEIVSRGSLESRSPRAIRPVIGVHRPRWHHELSSLWPWCVSCLMPSSGMKCNRNQAEKKEFESFVR

SEQ ID NO: 168877 - protein, 374 aa, Oryza sativa
  unsure (1)..(374): unsure at all Xaa locations
  Clone ID: PAT_MRT4530_6734C.1.pep
MSRVSTSWGFCXSRVNKPRGGGARTGSTGVGPTRXPHGPRWTGRTRXLAPAGAVGPTRQPHPRAGAADGRAPRRGHSARPKAATRRGRRXAVPAPLWSPAAAIGTAEWRPREEKGRGKRAVHGSPXVDGDDXKRRRGSGRRGRRRSGGRRTRRGGGRGRRRCGEAGGGDAGAGDGPGEQRRPAGGRRRRRRERATARAXFRRGDGAARGENGRGRRGEGLNRVGRGRERPEGKETGAGGPAAINGAGVICGGQIRPFEREREREKWGERERGSRGVIPPTLLHAGTAGGGGIRGGGGARARGRRRERREEGDDGWASPISEGGGRARLSAARARGEAEWAAGRXREREGGRRDGPGRPKGGKXTFRVFLFIKSF

SEQ ID NO: 168878 - protein, 264 aa, Oryza sativa
  unsure (1)..(264): unsure at all Xaa locations
  Clone ID: PAT_MRT4530_67350C.1.pep
HMCYLKLPITVIKAIGTARKNLLWRGNNANSTRKSLDSWELVCRPKEKCRLDIINVRIQNIALLIEHLAKFYRSADLSXVYHIWNSYYTTKPPHLGMNKSSYKLEFVKQICSKPLEDAFLLPLNADTYEEFLILQSELEQIHLQAGYGDHWNFIWNVDKFSTQRLYKLXFFSFLQPPRPFVCIXKTRCVMKIKVFAWLLSMDRFNTRDMLDRSHCAKEDDDSLXREMKLHLFFTCPFSLECWQHLGISWSSNLNFFQMIVLANV

SEQ ID NO: 168879 - protein, 484 aa, Oryza sativa
  Clone ID: PAT_MRT4530_67351C.1.pep
MASTDPLLGGKEEEEGGGEVRRARRWWVGRVVDTEEAWAQTRFAVPMVLTNMSYYAIPLVSVMFSGHLGDVHLAGATLGNSWATVTGYAFVVATGMSGALETLCGQAYGARMYRMLGLYLQSSLLMSAAVSVLVSALWCFTEPLLLLLRQDPAVSAAASAFVRAQVPGLFAFSFLQCLLRYLQTQSVVAPLVACSLAPFLLHVALAHLLVNALGLGLAGAGAAVSITFWASCLMLLAYVLRSERFAETWNGFSAEAFRFVVPTIKLATPSAVMVCLEYWAFELLVLIAGLLPNPTVSTSLIAMCSSTEAIAYMITYGFSAAVSTRVSNEIGAGNVEGAKNAVAVTLKLSVFLAAAFVLLLGFGHGLWAGLFSGSAIIAAEFAAVAPLMMASILLDSAQGVLSGVARGCGWQHLAAVTNLVAFYVIGMPLSIFFAFKLKWYTKGLWMGLICGLTCQTCTLMVITARTKWSKIVDAMQEKKASYVA

SEQ ID NO: 168880 - protein, 140 aa, Oryza sativa
  Clone ID: PAT_MRT4530_67352C.1.pep
ILFKCFCCWRKEDAGFRRIAPGTDYLAIPAGADDRPRWSVVVGLTAVDVPRHNLRLHRFRVAASGRILSGSDDVLETFRHVAPDDVAAEAFSTASAYLSNDGGHQMHLICRAVPLNADGRWTCNKTNLNKCYRSFSMDLG

SEQ ID NO: 168881 - protein, 53 aa, Oryza sativa
  unsure (1)..(53): unsure at all Xaa locations
  Clone ID: PAT_MRT4530_67353C.1.pep
MAAAXVANGXXGDSSKAAXGXIYSRLKEEMXEDPDFEFTXESXQWIDRMLDYN

SEQ ID NO: 168882 - protein, 95 aa, Oryza sativa
  unsure (1)..(95): unsure at all Xaa locations
  Clone ID: PAT_MRT4530_67354C.1.pep
SSFSSRCFSAPTCTLLLPLHVSIFPFLLRCPSTCWSRRRXSSPSSAAPRAPEAPPTSSPRARWCARQSARKLDGDLTKTKSGAKRSEQEQDPPPP

SEQ ID NO: 168883 - protein, 440 aa, Oryza sativa
  Clone ID: PAT_MRT4530_67355C.1.pep
MLSTAAPSSTSLVASFPSRARRRGLPGRRGVVVAAAGAGPGAGAAERFAASSSSITDYLRYRRPGSAGGGGGTGVCGGELQTAVVRYEKRLPWSLIHPFLHVDLVSTVHIADKEYFDRLQQALQDYDCVLYEMVTSRENLNNRKDPTFAKKLKSSRRGFSILGFIQKQMANILSLDYQLDCLDYGSEKWQHADLDFETFKQLQSERGESLFTFAVDMTLKSTKALVQPTLPDGLDFWRSKLLWASRVLPMPLVGLFLISGLCLPIDDQGGYPELEALSRLDFGAALKIFLAKQLTSDFTSMTSPIEEKSVIIGERNRVATEKIQEAINHGYKRIAVLYGGGHMPDLGRRLREELNMVPADVQWVTAWSIRSRELDRESLPFLKTMAEVSGWPLNRYETLALLIFSSVLAVDLWFWELLVGTAVNWASLAGSWIEQFNGPF

SEQ ID NO: 168884 - protein, 295 aa, Oryza sativa
  Clone ID: PAT_MRT4530_67356C.1.pep
MRQAANTMLPSHSPAATHQLPTSPRRSTRPAPPPPCPCPRAGAAPAAESLLPGCLRAESLPRHVAVVMDGNARWARARGLPSAAGHEAGRRALEETVRLSRAWGIRALTAFAFSNENWSRPKVEVDFLMRLFERVIHDSVAEFLREGIRLRVIGDSSRLPVSLQKIAREAEETTRNNSQLDLTLAISYSGRRDIVQACRKLAQKVQSKALAAEDIDEALFADELETSCAADEFPYPDLLIRTSGELRLSNFLLWQSAYSELFFTNTLWPDFGEADYLEALCSFQSRDRRFGVRKL

SEQ ID NO: 168885 - protein, 49 aa, Oryza sativa
  Clone ID: PAT_MRT4530_67357C.1.pep
LASSTGGARVRPHHVRCARRPPAELAAGRTSTRGGQDVTYSCEQQLLGC

SEQ ID NO: 168886 - protein, 201 aa, Oryza sativa
  Clone ID: PAT_MRT4530_67358C.1.pep
LTCSTQWRRSSSRSSRGRRSRRKGKGTRRRRRRGWRRSAGIAPRRSRTRWTPSATPRSGTPRLTGSTAARRGRPAPPWCRAWSARRSSRRRRRSTGRSTRRRRRDTEAARRRPAARRGRVLAPRTAPSRPARPRPRAPRTTPRPRAPRPKTPARTPRRPRRRRRRWPRGRPPTTPDRPPRRRRMSRSAPAGRRRRRPRTSR

SEQ ID NO: 168887 - protein, 287 aa, Oryza sativa
  unsure (1)..(287): unsure at all Xaa locations
  Clone ID: PAT_MRT4530_67359C.1.pep
CPCPRAGAXPAAESLLPGCLRAESLPRHVAVVMDGNARWARARGLPSAAGHEAGRRALEKTVRLSRAWGIRALTGFAFSNENWSRPKVHTPRADSFEISAFAELDASSPCWNSQVEVDFLMRLFERVIHDSVAEFLREGIRLRVIGDSSRLPVSLQKIAREAEETTRNNSQLDLTLAISYSGRRDIVQACRKLAQKVQSKALAAEDIDEALFADELETSCAADEFPYPDLLIRTSGELRLSNFLLWQSAYSELFFTNTLWPDFGEADYLEALCSFQSRDRRFGVRKL

SEQ ID NO: 168888 - protein, 108 aa, Oryza sativa
  Clone ID: PAT_MRT4530_6735C.1.pep
PDLSYGSTSKPFYIWERKLAKENNNPNRMTIYSLVNLVIWEASKCNDGTRARCHFRDLLQGRLMNPVLYLTNCRSDQRCRYAQEAMHQKLWHFYTTTTMSLTRLSITS

SEQ ID NO: 168889 - protein, 230 aa, Oryza sativa
  Clone ID: PAT_MRT4530_67360C.1.pep
MDAAAADLEARQLRILRRVADLELAAQQHRLGALSISAAPSGGEAETGATEARLSSILTARGVLDFTFRRVPADYYDRPLEERRDLLRADSVNQLCKSIVMVNTQAAADVVDCSNPKNSKYYVVVVQYMARLNADSIKNFIYSLNEKQIPKKRFNMRLAPEEESLKLTGFVHNAVTCIGMETDIPVIIDEAITKLDKDFFWLGGGEVDLKLGVRTSQFLNAFKPFVVKCS

SEQ ID NO: 168890 - protein, 119 aa, Oryza sativa
  Clone ID: PAT_MRT4530_67361C.1.pep
MGLLVFHFWDRVQVEKGPTQKIDPGDVSTSSFASARLLGRWRTVRPPPLRLTGGHVAMFGTFMLASGSATKSLSTLPSFHRHSGRHPCARRRLELVQALASLHVGMAPFQASEWPAMPR

SEQ ID NO: 168891 - protein, 476 aa, Oryza sativa
  unsure (1)..(476): unsure at all Xaa locations
  Clone ID: PAT_MRT4530_67362C.1.pep
MNWKRTSLEWGLRSRRKEPGFSRVRMRPSREGPRAKAASVAEALKRRSAAEGVKARVAAAVALSPSYLPFTVAFILASSDHFRPVAAAAYPPCASPLVGIVAAAVVLVFSWVSHPPPPTNPRPPPPPSAPXHAVPPDPXTPPWPAPPPTPPTPRTAPPPPPAPPPPPTCAPPPRTGTPPPPPPPRPAARCTPSAPPPATPTCPPPGTYTPAPAPAAAPPPPPRTPPDAAPPAAPAPPPPAPPGSPGTPPPRRPRPARTAARARSPCPRTLRASPRPPSPSNDRPPPPRPAAAARSCPTAPAPPPPIPAWWAAPTAPPSPPGTPPAGDPPTPRTNPPAAGDPCPPRPLLLSXPPPPFLPPPPPXPPDTPPPPRSTKPPPQSSFSPPRNPNPHLAGAQSPPLPKPPKSGLCRSPLRSSSCDLPLQSIPSVSSHFSPPSPSFPSSSSTAEMTSPISFVVGAARLSEAARERKAQKDEGG

SEQ ID NO: 168892 - protein, 295 aa, Oryza sativa
  unsure (1)..(295): unsure at all Xaa locations
  Clone ID: PAT_MRT4530_67363C.1.pep
MKLLISMIRSTTLLKSGNNSKAKYNHITQQETPMMQMCKGIQGWISPPLXLAAGSPLSCLGKFGSDKDRRRVHPAPSRPPLPGCVNQRKAILQVRQLPIPACGKRCISSASCEPVLNCHYDVSRGXRGGADKRTPPLGDSRGXGRTVDQVHDGRSSRTARPHRRSRKAAGRRAAAAAGPETTGDDTGGEWQRREGRREETKGTERKEGSSPSGQTAEGGGGGLLGVTMGGGGMARRGXLAGGRWLEAAVARVGGGGEVSAAVWGGKWWPGLLSRWQSRWWWRRDAAAAMAAVARG

SEQ ID NO: 168893 - protein, 342 aa, Oryza sativa
  Clone ID: PAT_MRT4530_67364C.1.pep
MKATVKGRYEGDKATAAATLAFTPSAADLRFKASATDAAFARGPSLEGLILTLEKPGSFLLDLKPHSKDVRFQFMNSALLLDRRVSLTYTHSTTLSPGPAKLPARTALDGSLTFDPANKLSLSHTLGSSGCRVKYSYAHGQDRLTTIEPCFDTANNAWDFAVTRKFQGGDAIKATYQASTKLLALDWTRDSKIGASFKCANMADSISELPIALKTARQPVLATSTSFTLRSRRLVLALRGSRRRRRLLLASLCEEPPSPPAARLTTPRATATAWCLHHCVEEPSSPPTARLATPRSHRRLLLLASPHRGAFVSVARQAGSPELPSVPPPRDLSTIWGWEQWG

SEQ ID NO: 168894 - protein, 197 aa, Oryza sativa
  Clone ID: PAT_MRT4530_67365C.1.pep
SRTPPWPAPPPTPPTPRTAPPPPPAPPPPPTCAPPPRTGTPPPPPPPRPAARCTPSAPPPATPTCPPPGTYTPAPAPAAAPPPPPRTPPDAAPPAAPAPPPPAPPGSPGTPPPRRPRPARTAARARSPCPRTLRASPRPPSPSNDRPPPPRPAAAARSCPTAPAPPPPIPAWWAAPTAPPSPPGTRGAEGCPRIRRT

SEQ ID NO: 168895 - protein, 67 aa, Oryza sativa
  unsure (1)..(67): unsure at all Xaa locations
  Clone ID: PAT_MRT4530_67366C.1.pep
MLTHPSTGTVQCSDHMKTAVADXYCKPFLGLFNVNGFSIELIMPEMLLLKAIDLILLAGRSYFKDID

SEQ ID NO: 168896 - protein, 47 aa, Oryza sativa
  Clone ID: PAT_MRT4530_67367C.1.pep
MLEKLWDDVVAGPRPETGLEKLRKAATTRPLVINKGSLCGCTDAYYS

SEQ ID NO: 168897 - protein, 51 aa, Oryza sativa
  Clone ID: PAT_MRT4530_67368C.1.pep
RTSSRRPNAGDVDVADVGLGILVVEVDGEVGKEGHHGRGGDEQHVALKPRA

SEQ ID NO: 168898 - protein, 181 aa, Oryza sativa
  Clone ID: PAT_MRT4530_67369C.1.pep
MEVVERAAADGVGFAGSSARAGAWWSVGRAGRRERGRWETAARRSSRDEQIERAPPSPGGEELRTNGNIGLVEIAIVLFVTLYFRLGQIDRNLGAGDIAHLYHMMHRQLLVAAQVRAAQPNEQQPNISSKSNSPIGGTLTQGTPCGVNGEHVDMALVVVHELGEVEVVELTNGDGGVVRDG

SEQ ID NO: 168899 - protein, 130 aa, Oryza sativa
  unsure (1)..(130): unsure at all Xaa locations
  Clone ID: PAT_MRT4530_6736C.1.pep
GGAAAERGEGRGKGGDGPTTHPGATAAMEEAAGTEGGGGAARVDGVDGVPDRVDGVDGVPAVGDRHGEVDEVGEDAANPXEAAPRWEVVRGDDGGGPELGGDGGERERRRELESGEEEGRREAETDGGAL

SEQ ID NO: 168900 - protein, 319 aa, Oryza sativa
  Clone ID: PAT_MRT4530_67370C.1.pep
MAGSSSLSTLSLCTQSPSPSPVASARLVAPAVLGFAGAPRFPTLRAAPRRLTARAVAGDAEDEWGKEPAADQGGAAAAVAEAPADVPVTSEVAELKAKLKEALYGTERGLRASSETRAEVVELITQLEARNPTPAPTEALTLLNGKWILAYTSFSQLFPLLGSGSLPQLVKVEEISQTIDSENFTVQNCIKFSGPLATTSVSTNAKFEVRSPKRVQIKFDEGIIGTPQLTDSIVLPEKFELFGQNIDLTPLKGIFSSIENAASSVARTISGQPPLKIPIRTDNAESWLLTTYLDDELRISRGDGSSIFVLFKEGSTLLY

SEQ ID NO: 168901 - protein, 185 aa, Oryza sativa
  Clone ID: PAT_MRT4530_67371C.1.pep
WGNLYAMDSSVQFYWKHLNTHQIQMWKPILGAGHLAKGHDKLAVIKEETNIEDLIKDEKAEDVELNMIVDEVVLVGNDLAGALQFCMKCSMHQMVEHFSEHQTKRPCWEQCLRHLQRDRRTEPAVDLTVWSRFRALTDSNDRARYQRHMTCGENFSDQRYLPMHMLSHEIAEPEPMVLSVTLLCV

SEQ ID NO: 168902 - protein, 70 aa, Oryza sativa
  Clone ID: PAT_MRT4530_67372C.1.pep
VDADDPDDAVVRRLVNLTQLRRLSHRVSTRVAGTFVYMPTDSRYGEVSPKVYVYAIDVVLYELLSANKLL

SEQ ID NO: 168903 - protein, 128 aa, Oryza sativa
  unsure (1)..(128): unsure at all Xaa locations
  Clone ID: PAT_MRT4530_67373C.1.pep
INTYFTLCSCYTKYTASLSGRCFGAGIMFAYAVTLCHDDDIGVVSGSLDVVSRLRDIIIWGYILRMRGGPLMVTAQYXFSTPIYNPKLIPXGEYSSIFSPGCMVMTGCRKELDSQGWLLKVPGGHRIE

SEQ ID NO: 168904 - protein, 267 aa, Oryza sativa
  unsure (1)..(267): unsure at all Xaa locations
  Clone ID: PAT_MRT4530_67374C.1.pep
MRAYDDVDPLDYLGGYNVEDIQLICCQPDASTMWLIPAPVQTRFIQSLEETEMIFGNMELILNWDFLRARPKGKELVKYESPVDRSPSVDDVKRVLNGTINSFRITDAYPRYFRVTGXGEVRRLEASMDSVSGELLLNNGTPPWWSFYDTNPSDLAGCQGLNGPMAIVVSEETPQGIIGETLSKFSIWSLYITFVLAVARFIRLQCSDLRMRIPYENLPSCDRLLDICEGIYAARAEGELEVEEVLYWTLVNIYRSPHMLLEYTKPD

SEQ ID NO: 168905 - protein, 137 aa, Oryza sativa
  unsure (1)..(137): unsure at all Xaa locations
  Clone ID: PAT_MRT4530_67375C.1.pep
MNAYFTLCSCYTKYTASLSGRCFGAGIMVAYAITLCHYDDIRVVSGSLDMVSRLRDIIIWGYMLRMRXGPLMVTAQYGYSSARVYNPKLISWGGYSSVFSPGCMVMVGCRKELGCXGWLLGVPGGHRIEDTSKRNNS

SEQ ID NO: 168906 - protein, 53 aa, Oryza sativa
  Clone ID: PAT_MRT4530_67376C.1.pep
VNLGLRELFTRLVSLRVCTTLRACLIQSAFLCQVASCLIVDHRPTSMVLFIHA

SEQ ID NO: 168907 - protein, 135 aa, Oryza sativa
  unsure (1)..(135): unsure at all Xaa locations
  Clone ID: PAT_MRT4530_67377C.1.pep
MNAYFTLCSCYTEYTTSLSGRCFSAGIMFAYAITLCHDDDIRVVSGSLYMVSRLRDIIIWGYMLRMRGGPLMVTAQYGYSSTCVYNPKLIPWXGYSSVFSPGCMVMTGCRKELGSQGWLLEVPGGHRIEGKGGRG

SEQ ID NO: 168908 - protein, 868 aa, Oryza sativa
  Clone ID: PAT_MRT4530_67378C.1.pep
MKLTAVQFIDRFLGGYEDPAQQIFLRAPEALMKYKRTSTLKGLSWWRRRGTQQQQQEPTRRTRGGRRHKEEKIWYLCSIYGCQALLGMTILAAVWLARVAAVVTVLALSWKRLKKQDYLNPGDIMNDQNQNITWSLNIFYSLVFAQGIMFVTILLNPLSYYFLFNAGIKYKLFDPSGLKIILNYKRCNYLEFIAGNVKATLQMHLVTFAKKLAVSNMADDKLLGVGAMDRILRSMEFRSLALRKLRAFMEPDELGKLVNMLGYDKSHKNKTTEEEDIRGHTARVVLKLSPDLLVQSYPQILYAISSSLLSTSKSNNKRVCKCNMDSDLVWFGLRILDKLTDNPENCRKATNDESGGDLLSTIIDLTIPCCHGHGHGRSMRSNTSTISDSWIEQEIIPLLQTENEIPLPFIDKLDQEIIVGMALNILSKLVAAPDEAGEKLRKETSKHVHFLTNTGMILDHVQATRVISCLAVDKEGREYIGKFPEIIKKLKDCLLSKTPYVNITKVAAKLLVLECTGDEQLLNQIQLFIEENRTVEDQSFSLPISAFIEELDFDQLHQPWIWNFVQSLDVEDALFAPRVNHSDAAAKALILLTTECASNVEAFLQGINKEELNKIVNALSSEDGDKEKRRALAQFEGRRNLDPETLRRVKKIILAEGEEQATGPKEFDEYMKLIDAALPKVLKAVVDAVATLEDPSSAENLDHVKDDMWIKQGKVLESFIGLAVQICRSPNKRSDFSTALKYANLTADTLIKKLKKILEVYMSPSTDFPCIRVSTLELITWMVEENNSYWEILLQCGVYEELNEVARTARKLESFKLFHCGIGIPTERTIECISSLATKLQEKLKKIPDFERRYRYGEHASRISVLIA

SEQ ID NO: 168909 - protein, 143 aa, Oryza sativa
  unsure (1)..(143): unsure at all Xaa locations
  Clone ID: PAT_MRT4530_67379C.1.pep
MSTYFTLCSYYTEYIASLSGRCFGAGIMLAYAITLCHDDDIRVVSGSLDVVSRLRDIIIWGYILRMRGGPLMVTAQYGYSSAPIYKSKLISWXGYSSVFSPGCIVMTGCRNELGSQGWLLEVLGGHRIEVQGSRFLVLKLRDM

SEQ ID NO: 168910 - protein, 536 aa, Oryza sativa
  Clone ID: PAT_MRT4530_6737C.1.pep
SFWDATLLQKDVKYKWSEECEQSFQELKNHLILAPILILPDPKKGFQVYCDASKLGLGCVLMQDGKVVAYASRQLRPHEKNYPTHDLELAAVIHALKIWRHYLFGTRTEVYTDHKSLKYIFTQPDLNMRQRRWLELIKDYDMGIHYHPGKANVVADALSRKGYCNATEGRQLPLELCKEFERLNLGIVSRGFVAALEAKPTLIDQVREAQINDPDIQEIKKNMRRGKAIGFLKDEQGTVWLGERICVPDNKDLKDAILKKAHDTLYSIHPGSTKMYQDLKERFWCASMKREIAEYVAVCDVCQRVKAEHQKPAGLLQPLKIPEWKWEEIGMDFITGLPRTSSGHDSIWVIVDRLTKVAHFIPTDGQTERVNQILEDMLRACALDFGGSWDKNLPYAEFSYNNSYQASLQMAPYEALYGRKCRTPYEVAYQLELPQSLAGVHNVFHVSQLKKCLRVPTEEANLEQIEVQEDLTYVEKPIRILETNERRTRNRVIRFCKVQWSNHSEEESTWEREDELKSAHPHLFTSSSESRGRDSV

SEQ ID NO: 168911 - protein, 386 aa, Oryza sativa
  Clone ID: PAT_MRT4530_67380C.1.pep
MALALRCPAAASPSPAKSTFPPSSSPPPSRLPRRPPASCRCYYYGDGGGFRKNYDHIPKQFREENLKDGLMDNYKNVPQFLYGLSPAQIEMFMNDDNPYDRQSQRVTEESISASRSYDEFGMYNLSGMHEGPAGYSMGMGMGTMSMGRAGRGYRRMRSSAPDLPSLLLDSRIIFLGMPIVPAVTELIAAQFLWLDYDDRTKPIYLYINSTGTMDENNELVASETDAFAIADFINRSKSKVYTINLSMAYGQAAMLLSLGVKGKRGVLPNSITKLYLPKVHKSGGAAIDMWIKAKELDTNTDYYLELLSKGVGKPKEELAEFLKGPRYFRAQEAIDYGLADTILHSLDGSFKPKDLTAQLAKAQEMRQSGKRPAAGAGRWSTPSVPR

SEQ ID NO: 168912 - protein, 55 aa, Oryza sativa
  Clone ID: PAT_MRT4530_67381C.1.pep
YQASTKNYVKSTNCQVVSSSSNKRCLLHIIYLMIVISYDTYNSVYRFPKIKNGEQ

SEQ ID NO: 168913 - protein, 133 aa, Oryza sativa
  Clone ID: PAT_MRT4530_67382C.1.pep
FTLCSCYTKYTASLSGRCFGAYTITLCHDDDIRVVSASLDVVSRLRDIIIWGYILRMRGGPLMVTAQYGYSSAPVYNPKLIPWGGYFSVFSPGCMVMTGCRKELGSQGWLLEVPGGHRIEEGHRLPSAAAAET

SEQ ID NO: 168914 - protein, 134 aa, Oryza sativa
  unsure (1)..(134): unsure at all Xaa locations
  Clone ID: PAT_MRT4530_67383C.1.pep
MNANFTLCSCYTEYTASLSGRXFGTGIVFDYAITLCHDDDIRVVSGSLGVVSRLRDIIIXGYMLRMRGGPLMVTDQXGYSFARVYSPKLISRGGYSSVFSPGCMVMMGCRKELDSQGWLLEVPGGHRIEETGRR

SEQ ID NO: 168915 - protein, 132 aa, Oryza sativa
  unsure (1)..(132): unsure at all Xaa locations
  Clone ID: PAT_MRT4530_67384C.1.pep
MNAYFTLCSCYTDYTASLSSLSERYFGAGIMFAYAITLCHDDDIRVVSGSLNVVSRLRDIIIWGYMLRMRGGPLMVTAQYGYFSARVYSPKLIPXGGYSSVFSPGCMVMMGCRKELSSQGWLLEVPGEYRIE

SEQ ID NO: 168916 - protein, 144 aa, Oryza sativa
  unsure (1)..(144): unsure at all Xaa locations
  Clone ID: PAT_MRT4530_67385C.1.pep
MNTNFTLCXCYTDYTASLFRRCIGTGIMFAIVITLCHNDDIRVVSGSLGVVSKLSGIIIWGYMLRMRGGPLMVIAQYGNSSTRVYSPKLISWXNVFSSGCMVMTGCRKELNSXGWLLEVLGGHRKEGISYLMEVVSTQFFLSNS

SEQ ID NO: 168917 - protein, 105 aa, Oryza sativa
  unsure (1)..(105): unsure at all Xaa locations
  Clone ID: PAT_MRT4530_67386C.1.pep
MFAFAITLCHDDDIRVLSGNLGVVSKLRDIIIWGYILRMRGGPLMVTTQYGYSFAPIYNPKLISXGGYSSVFSPGCMVMTGCRKELGSQGWLLEVPGGHRIEGIS

SEQ ID NO: 168918 - protein, 502 aa, Oryza sativa
  Clone ID: PAT_MRT4530_67387C.1.pep
MAVSSLVPKPALRPSALPLPPPVVAAATPPDLVGNDVDLGKGSVAANLSRRRRHHHLALPPTATPSDSFWNVNMEDKTILLSLALSMLLAILLSKLVSISKKPRLNLPPGPWTLPVIGSIHHLASNPNTHRALRALSQKHGPLMQLWLGEVPAVVASTPEAAREILRNQDLRFADRHVTSTVATVSFDASDIFFSPYGERWRQLRKLCTQELLTATRVRSFSRVREDEVARLVRELAGGGGAAVDLTERLGRLVNDVVMRCSVGGRCRYRDEFLGALHEAKNQLTWLTVADLFPSSRLARMLGAAPRRGLASRKRIERIIADIVREHEGYMGSGGDGGDEAAAAAAGKDCFLSVLLGLQKEGGTPIPITNEIIVVLLDPKYWEDPEEFMPERFENSDMDYKGNTFEYLPFGSGRRICPVGAEVDHGKMELLLSQLAGKDITEIIASGREKFASVPCGGGGVAVAAAAPAAGGGAAPQSEAKKEEKVEEKEESDDDMGFSLFD

SEQ ID NO: 168919 - protein, 217 aa, Oryza sativa
  Clone ID: PAT_MRT4530_67388C.1.pep
WIPRAAGEIAVLKSQLLQLSLDADETRRSLDRGDGSGKIFPGFDSLMSHSRNSQPREQSNGPKPPIAKLFEQVGLQKILSLLESEEPDVRVHAVKVVANLAAEEANQEKIVEAGGLTSLLMLLRSSEDETIRRVAAGAIANLAMNETNQDLIMAQGGVSLLSMTASDAEDPQTLRMVAGAIANLCGNDKLQTRLRGEGGIKALLGMVKCGHPDVLAQ

SEQ ID NO: 168920 - protein, 63 aa, Oryza sativa
  Clone ID: PAT_MRT4530_67389C.1.pep
MTGFCQRHTVAPTVRFPRPVTGRRGGHTGAVTAANAAGQSQDPVTMDKCPGSARCKSTYQLLD

SEQ ID NO: 168921 - protein, 94 aa, Oryza sativa
  unsure (1)..(94): unsure at all Xaa locations
  Clone ID: PAT_MRT4530_6738C.1.pep
TEYRCSTSPSGDPKRISNSGNVCNLPRAKTIQGQQLXCGSGYSSMMYPNMEDYXDGIQGCHHLPSTSDKSVGYTTNKAEPKNSPPGLSFGREVG

SEQ ID NO: 168922 - protein, 131 aa, Oryza sativa
  Clone ID: PAT_MRT4530_67390C.1.pep
MRKQRATASSRPGAPGRQRDVPRRAHMPGRVAGQGGQDQQLPEGKAVGTDKFPVTPISQEVLIVWGEQDQLFPVEKAYAVQSSLDGKARVEIISKTGHAPQLEDPTRFNKILLDFLLATHKPDPSSNGASQ

SEQ ID NO: 168923 - protein, 63 aa, Oryza sativa
  Clone ID: PAT_MRT4530_67391C.1.pep
MAHQEFSRLGPHDPALRVAIAQLCSALPGSDEWTGRERQASWVPRIEWHRASCAKILLRMWSI

SEQ ID NO: 168924 - protein, 55 aa, Oryza sativa
  Clone ID: PAT_MRT4530_67392C.1.pep
HFSAFTCFKKSSTLQLFLMGPKHKVEMKGSRHPSGVSTAMLKYLEIVEVKCEVVY

SEQ ID NO: 168925 - protein, 78 aa, Oryza sativa
  unsure (1)..(78): unsure at all Xaa locations
  Clone ID: PAT_MRT4530_67393C.1.pep
LNHQPPPPPPPLNWPMAGGGGSGSGGGGQLXLLPQRHCLYLSKFYYNNFQLNLTGIRQYTRTFKVFDHLINLSLDEAL

SEQ ID NO: 168926 - protein, 39 aa, Oryza sativa
  Clone ID: PAT_MRT4530_67394C.1.pep
LIPGIKNINPPFPRCPPNTLFSFHPSSIQPNFFPTNSPN

SEQ ID NO: 168927 - protein, 518 aa, Oryza sativa
  unsure (1)..(518): unsure at all Xaa locations
  Clone ID: PAT_MRT4530_67395C.1.pep
MGNCCPGSGDAEFPGRPTRPSSGNGSSSXKAGASPSSAPAQNKPPAPIGPVLGRPMEDVRSIYTIGKELGRGQFGVTSLCTHKATGQKFACXKTIAKRKLSTKEDVEDVRREVQIMYHLAGQPNVVELKGAYEDKQSVHLVMELCAGGELFDRIIAKGHYTERAAASLLRTIVEIIHTCHSLGVIHRDLKPENFLLLSKDEDAPLKATDFGLSVFFKQGEVFKDIVGSAYYIAPEVLKRSYGPEADIWSVGVILYILLCGVPPFWAESEHGIFNSILRGQVDFTSDPWPRISASAKDLVRKMLNSDPKKRISAYEVLNHPWIKEDGEAPDTPLDNAVMNRLKQFRAMNQFKKAALRVIAGCLSEEEIRGLKEMFKSMDSDNSGTITVDELRKGLSKQGTKLTEAEVQQLMEAADADGNGTIDYDEFITATMHMNRMDREEHLYTAFQYFDKDNSGCISKEELEQALREKGLLDGRDIKDIISEVDADNDGRIDYSEFAAMMRKGNPEANPKKRRDVVI

SEQ ID NO: 168928 - protein, 53 aa, Oryza sativa
  unsure (1)..(53): unsure at all Xaa locations
  Clone ID: PAT_MRT4530_67396C.1.pep
LLLRWLPSQVNFLRYDHLGLSSHTGXHAFRLARSRQHHTAETRGVDMKLPLLC

SEQ ID NO: 168929 - protein, 63 aa, Oryza sativa
  Clone ID: PAT_MRT4530_67397C.1.pep
VVSSLSNFQTFLELECYPQIGFSFHVRCVDQLFFCPGCFLRLAFYSISLFICEYIFLYLFFFN

SEQ ID NO: 168930 - protein, 67 aa, Oryza sativa
  unsure (1)..(67): unsure at all Xaa locations
  Clone ID: PAT_MRT4530_67398C.1.pep
GRPGVRHDLDLICRAHQVXEDGYEPSADRGRVTILSGPNYRCEFDNASAMMSVDETLMCAFQIFKVA

SEQ ID NO: 168931 - protein, 186 aa, Oryza sativa
  unsure (1)..(186): unsure at all Xaa locations
  Clone ID: PAT_MRT4530_67399C.1.pep
RRRRRKTAASLAAASGGRSSXKRRRRVVARRGDDWELGRGRRNGEKERGGGEEREAGFGFRIPAISGAGASGRERGMGAEGAAHARTWPTWPEEGGDVGAAAVSGAAARRDRREEGDGTDRWAPPVGDPERGGGGRPGLPDWASACGRPSKEEGEEKGNGPAAHSXKKMKKGGKRKRKRKKDFPWN

SEQ ID NO: 168932 - protein, 78 aa, Oryza sativa
  Clone ID: PAT_MRT4530_6739C.1.pep
DGFSTLSRHQLPEGDMLIIKHSGSRRANYSICHAPPLLSAVKRAEDSLLMRHTLFPPLYMASQGCPCELSIVLPWHVE

SEQ ID NO: 168933 - protein, 272 aa, Oryza sativa
  Clone ID: PAT_MRT4530_673C.1.pep
MADAAAPGEDDAAWERAIAAAVKNAPFSAPKTLTLDGAVKSTTGRLPSPSLLGRYPSLEELSVAGARLSSLAGLPRLPALRRLSLPDNRLSGAASLAAVAESCGATLRHLDLGNNRFADVAELAPLAPHGVESLDLYQCPVTKAKGYRDKVFALIPSLKFLDGMDAEGNDCLDSDDEEDEEEDEGEEGEGEGDEEEEEEGGEEGEGDEDDEEEGDEEEDEEEGEEEAEDEEDEAGADEEDESKVANGSKGSSGSAQPNKRKRDSEDDANGDN

SEQ ID NO: 168934 - protein, 94 aa, Oryza sativa
  Clone ID: PAT_MRT4530_67400C.1.pep
PSVLTLRKHLSLMDKGHEITQGWQICWPVGFQSLNLASESFSTQCTRQPLPTIWSLLEIEISFVKAGLTPYPCYNQCTYPSPFSQSPTERVSGM

SEQ ID NO: 168935 - protein, 53 aa, Oryza sativa
  Clone ID: PAT_MRT4530_67401C.1.pep
GGCYFGGFFFFFLKVGKKLPWYQMLKRIQASINPIDREPRWVENTNSVLIQGT

SEQ ID NO: 168936 - protein, 125 aa, Oryza sativa
  Clone ID: PAT_MRT4530_67402C.1.pep
MDISRANEGYTSYGPVVEMSWHRADVLLLGAQSCLPVPGVPAVGGVGSADGSGGSTPTFRPCQAEWGQRPSAVPPRAAVVAVALAVLRRRSSCASPSLQPSPSLGKVAIVVAVVSPSSSAPSPPL

SEQ ID NO: 168937 - protein, 403 aa, Oryza sativa
  Clone ID: PAT_MRT4530_67403C.1.pep
MRRCGGAQGGAHDGARARGVVAGPNGDGTGRAAGREATVTRGDAAARASEWRRDGRAARRGARHGARRDRRAARGATRAARQGRGERGGAARGATRGRRRQRARRGGARDDATDDGDGDVGGDATAIGQRTAAWGSGLEGAAARRRWLAARGDGDGARRGSGDGTAWRGTGLGARRWRQGGAGLETTATRRTRCAGVGWRDSGGARREAVTATARSAAAATRRAGGAATERGGKRRGWDVTQPKSGGQVDRHGDSVISGWRIFAKVEFVRIVRRAVDAHEATVDVAAPAMSSSRRHRPATRSVSTSTTSNTETSPHADGDVDDLVYFHDSIPRRRVAAEADGGPMEHAVPISEAAAAAAGRPNVTVRSLAHQPWATQVTWACSTIGPIGTTQVTLALLHHRPN

SEQ ID NO: 168938 - protein, 109 aa, Oryza sativa
  unsure (1)..(109): unsure at all Xaa locations
  Clone ID: PAT_MRT4530_67404C.1.pep
PPRSSWEGVTTAPPRARPHSGGATWVWGRPDPKLGGGSRRNTPGSSPLGGSHVGGGSCRATXGLDPPRGEPRGFXGRPDPKLRGGSRRNTPGSTPLGASHVGLRAASSL

SEQ ID NO: 168939 - protein, 110 aa, Oryza sativa
  Clone ID: PAT_MRT4530_67405C.1.pep
MVAPTGESVGSGYGRIHRMPWQWLPRLDPPNAPTATPTGGSGGSGGGGSHDSDGSRAWGSSRGNLHVPSKLILKISLPFAKVCLNTIKDQVISPTPEMPATDCQNFIKKG

SEQ ID NO: 168940 - protein, 279 aa, Oryza sativa
  Clone ID: PAT_MRT4530_67406C.1.pep
MVWPYFCHGEHVLTTDVRMRRRSAHAHRLHRLRDGSRLALANLGTADTAAAPMYDVQAFPYVGTTEPLGEIVRPETQVTSLRVYMVFGVTWVNVTGEIVRPEAQTRGPGNKSSGHMSSEQFSWVTWVNVTGEIVRPEAQVTSLFGVTWGQCDLGSSDWTYGRAGPCDLGGPRLVGQAAHCNIRLPQRPALPAGAWKRAPATSRLSTQPPFHGLTRPAAAAAASEIGTACSIGPPSASAATLRRGMESWKYTRSSTSPSACGEVSVFDVVDVLTLRVAGR

SEQ ID NO: 168941 - protein, 217 aa, Oryza sativa
  Clone ID: PAT_MRT4530_67407C.1.pep
MAREISLAPTAAVEEPAAAPARVRRRRQLHLFSVAAEVHENYDTSNVSHDLPKISSVKHDNTIHDTEEDHDTSQVSHIMILCSIMYETFRSYPCKTRFRGCFMGKQKSQRTARLPLERSEESRAAIPRRFHWDVEELADDARAGGRKRGITRFLGGFAMMRRSRRTVRVPAGGSKESRAKARASEEVSLRCREAGVWRALVVVHVLLQCTQVADDSC

SEQ ID NO: 168942 - protein, 68 aa, Oryza sativa
  unsure (1)..(68): unsure at all Xaa locations
  Clone ID: PAT_MRT4530_67408C.1.pep
LXGAVKPCGQKSSAXIAXSYXSRLSVGDPEXGXIVXRCNQXXSDDLRVDXPFATXFVIXSIGXXDVPN

SEQ ID NO: 168943 - protein, 104 aa, Oryza sativa
  Clone ID: PAT_MRT4530_67409C.1.pep
MAKQATAAVLAVALVLAASAGLAHGICNLSDAGLQACKPAAAVRNPADTPSSECCDALAAADLPCLCRYKGSAGARVWVRFYGIDLNRAMTLPGKCGLTLPAHC

SEQ ID NO: 168944 - protein, 117 aa, Oryza sativa
  Clone ID: PAT_MRT4530_6740C.1.pep
PKILKDRNRGKISKLENKVDRLEKKLAALKGEAPPQKARIRLTARKRALFVPRYQLAPKVRVVEKEVAPAQADPPVIIISSDKEEESKRNHSKIEWVATQDDEDEPSIDLRCLEELE

SEQ ID NO: 168945 - protein, 577 aa, Oryza sativa
  Clone ID: PAT_MRT4530_67410C.1.pep
MAREISLASTAAVEEPAAAPARVRRRRQLHLFSVAAEVHEEVLHFLALSSVKKIGDMNWNHDTSHDTKKNHDTSLVSHDPSKNHDTSHVSHDLPKVSSVKPDNTIHDTEEDHDTSQTGPSQHVVLPLVSSSLMQALVSSSLMQAFSAKPCIVLIARSYPCKTRFRGCFIGKQKSRRTARVPLERSEESRAAIPRRFHWDVEELADDARAGGRKRGITRFLGGFAMMRRSRRTECRWARSTQLPTDPAHELWGKHYMGQPTWANMGRPAGGEEVGEEVRRLATGDTATTSSRGGGCRGRMLGGSRRLDGGEIDGVPLEPHERQHSVALGVTSEDRLSALLDDILLEILQRLADDLRSVVRASALSRRWRHLPHMLPDIRLHARDFTQPDIGSGGRHNNAAGYTVDQTMAAYTATARWLLEPTITTPQRVTKKSIDLAFFLRDPYLHSIGRAVGHAIDGGGGTEELDLTVEADIAVADLTDEHKVSLGRRFWSFFQACPVVFRWLTRLTVDDCLSGPDDIPTLVNTCGRLRFLELRHSDVVDDAVLEIDAPRSQLVCLKLHHCNFRRVDLIRVPKLRRV

SEQ ID NO: 168946 - protein, 178 aa, Oryza sativa
  unsure (1)..(178): unsure at all Xaa locations
  Clone ID: PAT_MRT4530_67411C.1.pep
SGTRKAANESQKKREKTKKAGEKKGKKXKRARARNPTNGRGEKGEKKEGPEPKEPVQRGXKPQQGGPQEKKQQRKRGKRQKAKRWKEERLPPERGGETQGITREKRGAKKKAINLKKEANEKKVRLNKPPPVNLEPQKRQPFFFYIRFFFFFIFFFFYFFFFYIFFFFFFFFFFTTRP

SEQ ID NO: 168947 - protein, 41 aa, Oryza sativa
  Clone ID: PAT_MRT4530_67412C.1.pep
PTASYATDPFLHNLSIVSDEPTYNLADLGDLIHESPNHKHN

SEQ ID NO: 168948 - protein, 72 aa, Oryza sativa
  Clone ID: PAT_MRT4530_67413C.1.pep
MTHASHSEITDLIGCLGAQERIDAAAGELTWPYVRGIAATESEEVAVLLPLPPYGSMAVGCGSIAMHAYADG

SEQ ID NO: 168949 - protein, 250 aa, Oryza sativa
  unsure (1)..(250): unsure at all Xaa locations
  Clone ID: PAT_MRT4530_67414C.1.pep
LVAYVPKLLSQLHIEGLCHGNLSEDEAMNISKNIPKHIXAQTLPDEAGHEERVLCIPDDTNFVRSVRVKNDXEENSVVEVYFPVEQDIGKDATKLRAITDLFSNIMEEPCFDQLRTKEQLGYTVDSSPRMTYRVLAYCFRVMSSKYSPVYLQSRIDSFIDGVSALLDGLDEETFEHHRSGLIADKLEKDPSLSYQTGDYWSQIVDKRYMFDMSKLEAEELRTVRKEDVISWYNTYIKPSSPKRRRLAIHV

SEQ ID NO: 168950 - protein, 96 aa, Oryza sativa
  Clone ID: PAT_MRT4530_67415C.1.pep
EGPPKEGYAGKKTTATTPPASGNPRRFEVLNVTKAIMLRADGPPGAAIAKRWQKNIVSDCLPWCMPGPVDMWNEILLQRLPEISPLDQDASIFEAP

SEQ ID NO: 168951 - protein, 79 aa, Oryza sativa
  Clone ID: PAT_MRT4530_67416C.1.pep
CILPQKTTTFTHIWVGMVQNVHLSRNDQRPSPVNQLNTNRMLQLTSVHGYLLLCICEVNGALRAIKFITVSPDQLKGWP

SEQ ID NO: 168952 - protein, 1276 aa, Oryza sativa
  unsure (1)..(1276): unsure at all Xaa locations
  Clone ID: PAT_MRT4530_67417C.1.pep
MSTSSATSAATDNSTASASTNSVATVFVNPYATISVKTHVPISLELRNPNFNKWKTFFRSMCGKFGLLDHLDDSAPPAAPDTSWEQADFCIRSWLFGSVTDDVLDLAMEPDQTARALWLAIADLFQANKEPRAIFLHHEFRSMIQGDLSITAYCQRMKTAADALRDVGHPVTESQLVLNLLRGVNSNFTSTADNIASAPVLPSFASARNTLVLKELRLANDAKVQTETALVAASSAAASCPSGSCSSTGGGGKGGNKKKNGGRNYNRNGGGNNSGNNSGSGGGNRQGGGGGTFSFAVPRPPTGPWVCVSQWAGQQQQQQWRAPGILGPFPQAHTAFAGPYSSPTTSAAQPAWDQARLVAALNQMTVHSPNSWVLDTGATSHMSSTDGILVTRLPNSHTYITVGNGHTIPVLCRGSSFLPIGTTKFDLKHVLVAPSLADNGAEFVNRSTTSFLASRGCLLRLSCPYTSPQNGKAERVLRTINNSVRTLLLQASMPPAYWAEGLATATYLLNRRPSSSIQNSIPFQLLHNKIXTTPYCVCLDVFATLTLVPPLXHKLAPRSAACVFLGYPTSHKGYRCFDLSTRRIIISRHVVFDETCFPFARHPVDVSSFDFLLQEVTTPTVVAPPVTGVEQPRPSLPRATDDPVRSSLVAAPSAEVEQPLLPYTMVVPAAGLAWPAAGDPVPTTRTATGPLLPTTARLVEPFPHVYRRRQATPPPRLDAAPAPPLVVPPPPSRMVTRSQTGSLRPVDRLILAASHSAISPVLTNYRSALADPNWRAAMADEYKALIDNGTWRLVPRPPGANIVMGKWIFKHKFHSDGSLARYKACWVVRGYSQQHGIDYDETFSPIVKPSTIRVVLSIATSRSWPIHQLDAKNAFLHGTLDETVYCQQPSGFVDPAAPDAVCLLQRSLYGLKQAPRAWYQRFATYIRQLGFVASTSDTSLFVYKDRDRIAYLLLYVDDIILTASSTDLLRLITTRLHSEFAMTDLGDLHFFLGISVRRSSDGLFLSQRQYAIDLLQRAGMSECHPTATPVDARAKLSASDGAPVKDPTEYRSLAGALQYLTLTRPELAYAVQQVCLFMHDPREPHLALVTRILRYVKGSLSAGLHIGTGPVKSLTAYSDADWAGCPDSRRSTSGYCVFLGDNLISWSSKRQTTVSRSSAEAEYRAVAHAVAECCWLRQLLQELHAPIASATVVYCDNVSAVYMTANPVHHRRTKHIEIDIHFVREKVALGQVCVLHVPSSHQFVDIMTKGLPVQLFTDFRSSPCVRDPPVATAGGY

SEQ ID NO: 168953 - protein, 443 aa, Oryza sativa
  Clone ID: PAT_MRT4530_67418C.1.pep
MAALRSWSKTKVKNVGRELAKARKKLGDLIASDADNSQIRFATDQMNELLYKEEMLWLQWSRVNWHKEGDKNTKFFHSRAVWRAKKNRITKLKDLQGTVHRTTTAMESMATDYFQEMFAADPTLNPESVTRLFQAKVTAEMNDLLCADFKDEEIAQALFQIGPLKAPGPDGFPARFYQRNWGIIKEDIISAVSKFFQTGCMPEGVNNTTIVLIPKIEQPMELKDFRPISLCNVLYKVVSKCLVNRLRPMLNELVSEEQSAFVRGRMITDNALLAFECFHYIQKNRKANKAACAYDRVDWRFLDMAMNRLGFAHRWVNWIMTCVTTGTGQLINPAKCSILCDDASPIEITEVIKQILQLEKSNFEDKYLGFPTPEGRMNKGRLQSLQSKIWKRLIQWGEKFLSSGGKEVLVKAVIQAIPVYVMGLFKLPDSVCDDLTKLTRNFW

SEQ ID NO: 168954 - protein, 111 aa, Oryza sativa
  Clone ID: PAT_MRT4530_67419C.1.pep
PREPPFPRIPRGSIGPRFRVPGSPPGSGSGFPGSPQGSGFFDQFFFNRGPWVNIHGLNPVLRGYTPFPFHVNPRSSPFSFPVSPVRSPGPHPLPPFLRFFLPNPPVFLRVS

SEQ ID NO: 168955 - protein, 261 aa, Oryza sativa
  unsure (1)..(261): unsure at all Xaa locations
  Clone ID: PAT_MRT4530_6741C.1.pep
AAATGAGGDVARRGGGEGGRGKGRERGREEEEGLEREDEREEMMEKGKSELRIAMEELSLPCPGDDEDEQQQRQKRSSTMDLLCVSKHIIHVLXIGPTLLVLRQDIQQNVQRLQDVLARDPSKYSSLTAIVTEEVEEGTSKKANSCTRAILWLASINFSKHLLEGLLNTCDQSSLREIVEKAYITTLKPWHGWISSAAYRVAQKLIPEKEIFIALLMGNCQEFEVFAKDVKVLLSIVQPLIEEANAVLVRAPMIAHLSVNI

SEQ ID NO: 168956 - protein, 407 aa, Oryza sativa
  Clone ID: PAT_MRT4530_67420C.1.pep
MAAQASPPTKKVLVPIVAGTEPVEAAVPIDVLRRAGADVTVASADDGELVVEVMYGVRIVADALVAGGDCAAAHFDLIVLPGGVPGAANLGGCAALEAMVRRHAATGGLYAAICAAPPLALASWGMLNGLKVAKASKCGSLAITIQNSGKTVATAHPLFVDKFPPEVAAVDASVVVDASAVTSRGPATSTEFALALVEQLYSKNKAEQIAKEMLVRYDAGYTIDEVNSVQWKCNGTPKVLVPVANGTEEMELITIIDVLRRADADVVVASAENAGVEIVARHGMRIITERLNTFSPRLKQQGGTPGAKTMSSNEKLVTLLKKQAAASKPYGAIGAATAHVLEPHGLLEGKKAADQDGGDECESRVVVDGNVITSGGTGTAMEFAVAAVEKLLGRDVAQRVAEGLLFA

SEQ ID NO: 168957 - protein, 170 aa, Oryza sativa
  Clone ID: PAT_MRT4530_67421C.1.pep
MTAAVGGWGRGGDSRRYGVEEEIPAYNSMIYPNVEDYEGRTEPSPPAAYLYNPWSTQQAKRCRVVFINCMTGFNLSKNFQDNPEGFFGSIKPRVVPPQKTLSVEKSAIPAPTTFKTMADKTLCEFVAPSADSVPIGPRVNVDFDLKTGLITMAQASPFCGKPNEDASAHL

SEQ ID NO: 168958 - protein, 264 aa, Oryza sativa
  Clone ID: PAT_MRT4530_67422C.1.pep
MEEVGVREHSRVLEAAVVRWKKIWEGGREGSRRLPVRPAHDATPHRRSALRRRPPASPLTPPPRSGREGEGSRRQSNLRHQPPASPSLLWPDLRGRKGGEPPLAAPRAMQEGGREGTPHWTPRAAPLPVHGIRRRREPGATAASGRGEEERGGEGRGEVWRDLLDSQIRLERRGERALVAAAIGGGSGSIYLDAAPLPSLRPRSGQRGEGEDGGGGGSPPSLPPRSGRRERGRTVAVTAMAPFPPPRFGQREREGGDSGGSPPS

SEQ ID NO: 168959 - protein, 115 aa, Oryza sativa
  unsure (1)..(115): unsure at all Xaa locations
  Clone ID: PAT_MRT4530_67423C.1.pep
PSLLQMHILDPPYPHNSPXSGILLINDTIGHTPLPTLLHLGNAQPPTIEGRSSPQALLLHEWAXQHCSATYLATXLRDXPNHTYLNERTNILSLAYTLYAITYTVSPLKYALSES

SEQ ID NO: 168960 - protein, 434 aa, Oryza sativa
  unsure (1)..(434): unsure at all Xaa locations
  Clone ID: PAT_MRT4530_67424C.1.pep
MTSRLPGRSSCSLHLPWRCPSTPDFVHLHPCTFVYNQTEPQTKPYPLDMWKYASTLQQRPEDRSLYGRGATIKTMHPEPSLKPLLGILNRGGGVNPIPQYSNNSKVSSRGEGRADRVHGGGAHAAAPRSTVDRAHPGSHRPAPWVPRVSRTRGRGRLTAGPHAAAARCARRRPRRRXRREAARPHPYGRRRRPXARRSGGRERGXGKGEKKRRSTAHPGSTATTETATGAEEGGGAARVDGVDGAPAVGERNGGVDEVAGDAVEPKVATPRREVVRGDDGGGPELGGDGGERERRRELDSDGERGRRVAETVEGGTGKQQMLSPSGEFVRQQCSTVATPFFQSPVFQLRNCQVMQQQCCQQLRMIAQQSHCQAISSVQAIVQQLQLQQFAGVYFDQTQAQAQAMLALNLPSICGIYPSYNTAPYSIPTVGSIWY

SEQ ID NO: 168961 - protein, 115 aa, Oryza sativa
  unsure (1)..(115): unsure at all Xaa locations
  Clone ID: PAT_MRT4530_67425C.1.pep
MTSRLPGRSSCSLHLPWRCPSTPDFVHLHPCTFVYNQTGPRGWGPRGSPTAHGGPGAPGLAPAGAVGPTRQPHLRARAADSRAPHGSRTVRPKVATPAQXAGGGAPAPLWSPAAA

SEQ ID NO: 168962 - protein, 386 aa, Oryza sativa
  unsure (1)..(386): unsure at all Xaa locations
  Clone ID: PAT_MRT4530_67426C.1.pep
RGRCESNFTILQQFQSVQPRGGARGPGQRGWGPXRGSPTVHGGPGAPGLTPAGAVGPTRQPHPRMRAADSRAPRGSRTVRPKAATPAQRREAARPXPMVAGGGHRHGGAAAERGEGKGEKKRRSTAHPGSTATTETATGAEEGGGAARVDGVDGAPAVGERNGGVDEVAGDAVEPKVATPRREVVRGDDGGGPELGGDGGERERRRELDSDGERGRRVAETVEGGTGKVYIGLGGGGSCRTRGKRARKIRSPLMAPARVVLGRDIMLQQQMLSPSGEFVRQQCSTVATPFFQSPVFQLRNCQVMQQQCCQQLRMIAQQSHCQAISSVQAIVQQLQLQQFAGVLLRSDSSSSPSYVGPKLAVQYAVSTQATTLLPIAFPPRSVGIWY

SEQ ID NO: 168963 - protein, 60 aa, Oryza sativa
  Clone ID: PAT_MRT4530_67427C.1.pep
HGPDACRAQTTSTHSCHTVQILQVKLVSHNTCTSMYFWRTYTAYRYGQYSLCTHPVTGIA

SEQ ID NO: 168964 - protein, 69 aa, Oryza sativa
  Clone ID: PAT_MRT4530_67428C.1.pep
KLNSGLKTFNSNLKTSFNSNLKTFTSKFKIFDLDLKTSILKFQNIQLKFKKLSTQIQTLIDIEGERLNL

SEQ ID NO: 168965 - protein, 148 aa, Oryza sativa
  Clone ID: PAT_MRT4530_67429C.1.pep
MSAPTGGTSRTPRRTGHRLSPSPPRPRRRQLVVQRIVKEGGSVSYPTLTRSNYSDWAVLMRVNLQAQGLWDAVDTGDVPYQEDRQALSAILRAVPAEIVRPLAEKDSAKDAWDALKSMRVGADRVKDLRLQGVVSDLRLLGDDLSEEK

SEQ ID NO: 168966 - protein, 207 aa, Oryza sativa
  Clone ID: PAT_MRT4530_6742C.1.pep
MALIRVDLREEETRVHGREREKLGGRRTTTGRWDPRGGDRRRARAPMVAGGGHRHGGAAAERREGKEETRRRSTAHPRSTATTKKAAGAEEGSGAARVDGVDGVPAVGERNGGVDEVGEDAAEPKEAAPRREMVRGDDGGGPELGGDGGERERRRELDSDGERGRRVAETEVGSSGRVYIGLGVREGGRTRGKRARKIRPPLMAPAR

SEQ ID NO: 168967 - protein, 67 aa, Oryza sativa
  Clone ID: PAT_MRT4530_67430C.1.pep
GWVFSSPKSVRIRPLKVFISTPVSHSSLFNVTLVLPTIKPSSNLHYKSFNSSKRPPNNNLDIYDFLR

SEQ ID NO: 168968 - protein, 35 aa, Oryza sativa
  Clone ID: PAT_MRT4530_67431C.1.pep
MGIRDCLTIGGSVFMALRKTLQLESMDVEKDPAGL

SEQ ID NO: 168969 - protein, 73 aa, Oryza sativa
  unsure (1)..(73): unsure at all Xaa locations
  Clone ID: PAT_MRT4530_67432C.1.pep
PLSYXXDSPXQRRXDEEEDGGXDCMPHSTTHLTXGAXRXRRHGEGQSDRRLAGDAAAEPSWQTLPCTNFKRIH

SEQ ID NO: 168970 - protein, 153 aa, Oryza sativa
  Clone ID: PAT_MRT4530_67433C.1.pep
MNKHGFPRVFRFVASCPTTWRRLELLDILNDKLRSRRACTVVTRARQGSRQGVGAEERVFDGGKNPVVFERGHGGTGRRARTRCGRSARLRAASGKSSATAAAVGLGVRIGETIWLAPPPPPPQCIDVPGPGGDELDQLLYGYEESPGVLVQG

SEQ ID NO: 168971 - protein, 101 aa, Oryza sativa
  Clone ID: PAT_MRT4530_67434C.1.pep
MTISGHITNTSLVKLYQIRMMPAARMPQVVLADRRWRVCDRGRVSPMGRRTQSSALSEMQDGDQDWRRRCMDEADSVKPDIRRANDMGCTAQFGSRSGRVV

SEQ ID NO: 168972 - protein, 128 aa, Oryza sativa
  Clone ID: PAT_MRT4530_67435C.1.pep
KKFFGGKSPKKLKTNPKKNPPIKTPQGKPPKPGKKKRKKSKKKGAKALANERVTLRENPKTHPIKKTKQGDAPFPINVPNFLKKPKVPAFLLINQPGKKRNSANPINLENPRFFPTSHILKTRPMKIN

SEQ ID NO: 168973 - protein, 22 aa, Oryza sativa
  Clone ID: PAT_MRT4530_67436C.1.pep
NMTRADPTKLNTQLPSYLFPYR

SEQ ID NO: 168974 - protein, 41 aa, Oryza sativa
  Clone ID: PAT_MRT4530_67437C.1.pep
MGRPRHEDRLLFVGIVGAKVSASGNPPASSSGQRYLRGTKV

SEQ ID NO: 168975 - protein, 90 aa, Oryza sativa
  Clone ID: PAT_MRT4530_67438C.1.pep
MDSPATPVGLSPPLLSLVLRNEPCYTKDPDDVSGDVISGGGSAARARKLAGERRRFGTNGGHQDIENVAANSPVTKEAAEEQRTATAARR

SEQ ID NO: 168976 - protein, 279 aa, Oryza sativa
  Clone ID: PAT_MRT4530_67439C.1.pep
LLFCEKKKKKSSLLMELAALSSKGICTDDTHSSMEWSLTIAEQSQNTEADDEMSSLVTSQGSPSQVSESHKTKPEIFLMFEGFWLIARSPYLMYISLFLWLSAVVSSFFYFQGRILTIAGVTVAICASPFIATLNMVALALWPTWVAVAVTETIRKVTTYVLTRPGRELLFTVVSQDEKYKAKAWRKRPPFGILPILCRQRFLLSVLGLIDVVVQRLGDATAAGIYSLLFSSLEKKASMVTLYALPLCFVWLLTAFHLGRLQTNLVKVQVASFASSIPR

SEQ ID NO: 168977 - protein, 112 aa, Oryza sativa
  unsure (1)..(112): unsure at all Xaa locations
  Clone ID: PAT_MRT4530_6743C.1.pep
IETQYLVANEDEIGPTLLVLRQDIQQNVQRLQDVLARDPSKYSSLTAIVTEEVEEGTSKKANSCTRAILWLARSINFSKHLLEXLLNTCDQSSLREIVEKAYITTLKPWHGW

SEQ ID NO: 168978 - protein, 206 aa, Oryza sativa
  unsure (1)..(206): unsure at all Xaa locations
  Clone ID: PAT_MRT4530_67440C.1.pep
MDFKVASFLLLLLIVTCGAAQGQGNDFVVLDLKTTEIGEDASPMYKEQIALTKIPVTLLRSKHSSLCSACENITSEAVNFLSEKQIQDKIMTILHDTCSQTFSFEQKCLETMDSYATLVFAKIAEIKPAAFCKQYGLCRDMALLSAVKSESTCLFCHHIIDEITSKLKDPDAEFEIIQLLLKECXKIEGHQQQCKTMVLQYDGSAV

SEQ ID NO: 168979 - protein, 412 aa, Oryza sativa
  Clone ID: PAT_MRT4530_67441C.1.pep
MERRRGDQPRFGNKRRPDERDQERWDELAARREEEDLRDKLRREFERRKEENPTKADEDAKRQDQQYPAAMKKGKWVNDPRGENLFRLDSQKRPVDSRDVRDGKEEEFAKKCYKCGKKGKSSHISTNYPDLNKEEGLKLCGDGMLGQVFHCLHIAISDEEEVWVRAKGVPSIARSEKIMMKIAHLIGDPVEVDAISLIRETVRVKITCNPEGVKQSFPPEDPEPGYKKDFRRRKEDDDGDNQEEEEFMESEDEDGKVDIPDYFPKLSEDVSSDKEMQTYPQQKGIEEKTPILSKRDLLTEETVINRCGRDRAPSDNKCGAPKRSCSVSREDNTPLETGMIDNVRSTPGGDKGPIQTNRSGEDQDLMDEDLRQLEVIAGEEKIQTRTDDAEGFTQSRTKKLKKKKKSLVVATR

SEQ ID NO: 168980 - protein, 467 aa, Oryza sativa
  unsure (1)..(467): unsure at all Xaa locations
  Clone ID: PAT_MRT4530_67442C.1.pep
PPLPHNPWTPLPHNPWIPPPWEHPPPPPPQPHIHHLHHPPHEQSRHNPVLHWTPPPPRPPRGQPDLAWPPDSRPPQRDRRPQPRMGRSPPRPRAPPRSRPVPPPPPIPPPAPPPRRRYSPPPPPPLPPXRPDPTRENTIIRSKPPNPPPPPPPPGLREPASSAIPAPAPPPALHESASSILPVPAPSPAFREPVSSVLPTLAPSPAVYVPAPPPPSPXPTRSPALAVARHPPFVCRSSLPPRAYTPPPPGLHALXAPAPPPVLLEPTSSRAAARPPPPPLPXPPCAXPPPSLHAPPAAAIWPPHAGELPRLTGPPFLPSPTRWPPPPSPGSPPPPRPTPPGTPHPRRLPRRTPPLPPPPSARSAPTAPPPSSPSPXPPLHGRYYQPPPPLPVVRTPAPPPPPPSPGSPPPPRPTPPGTPPPRRLPRRTPTSPPPPSARSAPTAPPPSSPSPXPPPYERHHQPPPPLP

SEQ ID NO: 168981 - protein, 79 aa, Oryza sativa
  Clone ID: PAT_MRT4530_67443C.1.pep
KLSSGGRPLRLKAKGGTLRPLAGGSTQQRPFWLGRLENFPYYRGPSLVHSAPVPSSWGFTWDLDLAKPPGGPGPPACLV

SEQ ID NO: 168982 - protein, 140 aa, Oryza sativa
  unsure (1)..(140): unsure at all Xaa locations
  Clone ID: PAT_MRT4530_67444C.1.pep
GVAFSLLPLLRGGSPGRRRRRRRSTHARIARVRPADLTPAAEAXLVIASVKWRYKGTARKEAALSELIERKVAEATEACAGEAAGDAGCRVAWDEVEEVSQAKADLRRRIAQGADDPLEPFCSHNPLADDCAVVYDDDDE

SEQ ID NO: 168983 - protein, 1440 aa, Oryza sativa
  Clone ID: PAT_MRT4530_67445C.1.pep
MAAEAAASSGGGVEVREAELAVEEAPAATSEGRVGEAVSDPFVVAGGDLSGEASNLEAKPDPAVLGEGGEAVESNAAPGCAETVHEEDGVDGGCEAGAVEEEDAPMAIGHVLTEAPVANGHVHSEAAPATETAEIAGSVEDGMNGRIADEHDHPDTSIAESKGCVVEESKGCVVEEVNGKEAAPEIADSSVLVEEGVDGWELEGVDDRIAGEHDHTYTSTVESEVHDDSLIKQVDADATGLMEQEAISSEQDGSDVPIENGHTHVGVSADCGEGAKSDVQVDQSNVEEANANSAKPVEEVAALIQDGLGGPVSNGHGHVDASGHGYVTGADLDVKGSNSKGEDTETFEELVTATVDYDRSDIAMANGHDQVERSFDSGEVETKSEVCDSKEKSGECATDAMELVKQEATTGEQGTEAVSVVNGCDHPNTNADSDEAPMQILVTSKESGIVQSVVEVVESVHLEGTLKIDQQIEGDQKVANKKVTEEEILTNGYEQGDAKVANKEVPEEEILTNGHEHVEESAGITSVLEPLVGDGQQDFIAVNLLENRADDNREDALEDAFTSGIDEAAITSGVDEAAMEADASTVEKNDDTAIDGTETKEKHEKTNDDILQGLDLSKDNVECGVNGDEVSTFQPVESISCSTVEIEREEISDQQQTSASLQDAEQALSATNGNHLSDKSELKQESDMEDIDGANLCADPGVVPALHGETTSSDLADNDGAEVENSTPACDLGASSGAPTGDNDSKENSAAAVAQVEEDVPSQDDAQVEEDVPSQDDDNCPADGAPGEICSENANAFTTSSCVAETEYVQDIASTTVDIIHDKHNDDDENINTDITGNHSEPKLETNVDNEDRGDIQVIKPYPVYLMKVPRFMSESHWEKIQDAQICLDELTQKRDAINVLRQKKKALCDDYREKLEAARQEERGARTAHGDKRNDLNSVQSMIGRMNRANSIQEIDDMIAMKEKIIAHESISLKEEKRLLQDIKELKAQKKQLSSNMGSKAEMGEAFEQKEHIHEQQKILKKDSDVLLTNLKSLEDKTRFIKKAFDDERDALRKLTEEHQAAHEVRQKAYDEWFELKKEPGRKNKFFFMYRKDSRAAKEYVDNGDMKGLVLFCNNQVESFMVLWNKDDDFRRQYVESNKNSTLRRLGTSDGRKLGPDEVPPEIPRYSNRMQSNPPLLPVPSTHASVSASEATPAKPASPVTVVEEKTFPVLQSSQSSKPFKPKVVGNSSSKDTPGAPIPEREDVEKSEKEKKRRTEQELELSRQAAELAIREEELRQEKAAAEKERLRLEQKAKAKEAEERKRRKAEKALERAEFRAKKEAELMEKRRAKRDRTRGSTSADSGSGSGEANAEATVTNDADSSTIENSRGVDLSQHRALKKRPPTLKQLNKMEPMPLPLRNKGRRKMRQYIMVAVAAVISVLALVVASKYVPSNFRASSS

SEQ ID NO: 168984 - protein, 270 aa, Oryza sativa
  Clone ID: PAT_MRT4530_67446C.1.pep
MAVSNNITACVTLMALICAVPVIASGVWFASAQGEECARLARWPVAILGGLILLAALAGFVGAYWNRRRLLAFYLFAMASLIALLIALLVFAFAVTRGSGAYPVLGRAYDEYHLDGFSMWLRGYVSDDPARWERIKACLVVSDTCKKLARQAGFLTADQFYQSRLSPLQSGCCKPPAVCGYNYVSPTVWAGPAARPAADADCGAWGNDPSQLCYECESCRAGLLAALRAQWHRANVALVVATVALVFLYLVGCSAYKNAQAEALFRRYKW

SEQ ID NO: 168985 - protein, 159 aa, Oryza sativa
  unsure (1)..(159): unsure at all Xaa locations
  Clone ID: PAT_MRT4530_67447C.1.pep
EWLYTENMTTKLCYRQMKHIAWISDIRPLSGRQKGTHWMCFVLVXAPRXQQLSLLVFGKXICLXSTXXSGSQTDLLPISVMRXARRTKXSXVRVWEXFLFXIXMPNLXIVGNSPTFQTXMGXXSNFAXPXKXLWXXLPQXXXXNFLGXPSXNLGGGIQX

SEQ ID NO: 168986 - protein, 61 aa, Oryza sativa
  Clone ID: PAT_MRT4530_67448C.1.pep
MRYDPTARETCQQQPPPSRVTPLYHRHSADETRSSSIPPRRPEVHGGGRQQGDDGKGLHRG

SEQ ID NO: 168987 - protein, 168 aa, Oryza sativa
  Clone ID: PAT_MRT4530_67449C.1.pep
PTRPQNIVLHGDVKSGNILLDNVFMPVGSDFGISRLISIQKHHTSFVIGDMNYMDPVYMKTGMLTEKSDVYSFGVVLLELITRKKPRYDENNSLPINFVKYYMTDSRAREMFDDEIKSPEVNIDCLDMIGKIAVQSLKDDVEERPTMKQVLEHLNLVRNKLMDTEISI

SEQ ID NO: 168988 - protein, 215 aa, Oryza sativa
  Clone ID: PAT_MRT4530_6744C.1.pep
MSWHRKRSPWKMKALVSSSCLPSSACGRRPSLLLFNVVFECAGPSLPIDTGAMELRVVLTVKFGKPGVVIGLESIQFGASPPFTFSTLFYRSGGTWHPTWGCIVFDLRRRDKSNVQPVQAIASFISASFKAASVDNKSALALAKNLVFHERSKHIRVRYHFIRDCLEEGSIKASYINSRDHLADLLTKPLGRIKFLELCSRARMARLFHKTMYKT

SEQ ID NO: 168989 - protein, 376 aa, Oryza sativa
  unsure (1)..(376): unsure at all Xaa locations
  Clone ID: PAT_MRT4530_67450C.1.pep
HSTHAAAIQQPPIVDWENLHIDESLDVVGRLKIVDGDLLHXFLGLRDEDEAAEYARAVAQATTENDDQARGTDANGAKNANDDENEGVVDXSKVAGERMMVYDVNNSSLVKGTMYPNMKVFTLAVRQFAINGEFKLWVKARDRTRFVGGCKGAIDCPWHVNGRKQADEWTTKVTKFINNHTCTSGGRRKTTTPTSDXVASKAMHILRKDSSMGPEELQTKLEEDQKYKINYDTVAKGGTLAMIXLHGSWEDNFHLLYRWRVAIMERSPGSVIEIDTKEACIIGLLIGCRPYLSIDSTAXNGFIDAFGFIDAETSDNWTWFINQLHKTTGNVSPLAICTNACKGLEHAVHRVFHWAEHRDLFEHKLKQMKGRPGINS

SEQ ID NO: 168990 - protein, 69 aa, Oryza sativa
  unsure (1)..(69): unsure at all Xaa locations
  Clone ID: PAT_MRT4530_67451C.1.pep
LPKIATDRVASLAAADKYLMALARGSPFRMKPPNALPKXQSFPRKKPLSVSISLQRILLNKQSNANPRA

SEQ ID NO: 168991 - protein, 59 aa, Oryza sativa
  Clone ID: PAT_MRT4530_67452C.1.pep
GGAAHYKEGEEFTNCSIVGDERAIAAPLHLLKARNRTEEEKVKRGRRSQSTQREHELFP

SEQ ID NO: 168992 - protein, 83 aa, Oryza sativa
  unsure (1)..(83): unsure at all Xaa locations
  Clone ID: PAT_MRT4530_67453C.1.pep
LEFILEIQPIFILADLKASKESLEVLDKQRREDXFLWAGNETITGGKCKVNWTWTFLSTASGGLGILSLEKFARALRLRWLWH

SEQ ID NO: 168993 - protein, 199 aa, Oryza sativa
  unsure (1)..(199): unsure at all Xaa locations
  Clone ID: PAT_MRT4530_67454C.1.pep
MKLDEGALGWWRQQMAVMEHESATGGGWRWQRDRAWHWAEASPQQAGPASPQPVGPTAAPDARCKRRSNQRDQSPLQGCRTPPKPPLDRLRIDAASTPPSRPRRETPPTPPLQRRRWCPSLPTISRSMPPAXNALAPAATSPQATTLRSASPPXPPLLLPASPSPPXTPLPHPPPRCTPSRSQPLPHSPPRCTPARWGS

SEQ ID NO: 168994 - protein, 208 aa, Oryza sativa
  Clone ID: PAT_MRT4530_67455C.1.pep
MAGTAAALGLSVVSSVSIVVCNKALMSTLGFVFEILMKLFENKDLDPKTIIGFGILNGISIGLLNLSLGFNSIGFYQVFIVLSCLISVSVNFSTFLVIGKTSPVTYQVVGHLKTCIILGFGYVLFNDPFSWRNILGILLALLGMILYSFFCLMENKQKAPELSAPFFHTKVKGGEAGTLLLVQNGSAKVADGVVTEGPMWRSNRDLDA

SEQ ID NO: 168995 - protein, 2649 aa, Oryza sativa
  Clone ID: PAT_MRT4530_67456C.1.pep
MALEALEGPIHAVSRAQRNLMRKLGLVPERGPVTAEAVAAYNALFSKPLSQEHIIALSSLFSSSLPPAKAAEELVETIMDVIPSRTILEMLGLDFDYSFLSAEEPDKLRFLDELRSLRSSRTGPWAVVGDFNLILEAQDKNNLNLNRRMMGRFRRLIDELELRELPLDGRRFTWSNERESPTLVKLDRVLFSADWEELFPSCLLQAASSIASDHCALLLHTCVTSPKAHRFRFEAFWPKFDGFLQLQMAKELVFRLDVAQESRSLSPLETWLRRDLKLKCLGLASLERTIARQRSRLVWLKEGDANTKFFHLHARARRRKNFITRLYDEDEVWAVIKSLPSDKAPGPDGFTGRFYKSCWPVIKVEILAALNSLFLTNGQGFASLNDALISLLPKKDEAVDVKDFRPISLIHSFGKLFSKILASRLSPRLDELVAPNQSAFIKGRSLHDNFRYVQLAARALHAKRVPRLLLKVDIAKAFDTVSWPFLLEVLAQLGFSQRWRDWISLILSASSSRVLVNGVPGPRFPHRRGLRQGDPLSPMLFILVMDVLNAMLRKASDSGGFLPLNDRSIRHRASLYADDLVLFLSPVRQDLEFIQGILSVFGAASGLRTNFTKCSITPIRCSVLDLELVQSSFPCSISEFPCTYLGIPLSVRKLPKAALQPLVDKVSHWLPPWKGCLTTLAGRSVLVQSVLSSIPVHVSMAIGLPSWVIKAIDKKRRAFLWTGTDSANGGQCRVSWTRVCRPRDLGGLGIPDLRVAGFALRVRWLWLQRSGHPYWSDLKAPVERSVSDMFVASTFSILGDGQSTLFWTDRWIDGRSIASIAPDLLHVVPPRFRGSRTVAAGLANNSWVGDIRGALTVPRCWTADLLQKRGIDSHSACPFCAQELETANHILIDCVFARQVWLRVLSPPGWAALSPPRGSWLQDWLSSSRITYIKIRHFTTGNVSHESHVDKNLLYRVVVIDLLGYILSGYPAEAMQAIDLFGCAMLSLQIAKHFLRALLAKTIVCIPFMSGVLELGTTDPLLPLSPMAERAVAHSLSPNASGDDGEQNPRRRARTPPSPSRRNLGRGEALGEVGGSATSPPAGDGGGRRDGARRRLVYGDGGTPQGALQAAGALLRHPPVVPDPETPARRWLDDVADLVMTAQQSLGAGGRSSATEASGAAAAGSTSSRRRARRAAAVTRRSSAIPSSTPPTQEDVRGGSDARLDIEHRRDARRAAHATEGASSSGAPLRSGHGGRPPVSPVGGAGCRAFVASLRNVRWPPRFRPTITEKYDGSVNPAEFLQIYTTGIEAAGGDDRVMANFFPMALKGQAREDLYQQFTTNFQSTYPRPGEEADLHAVQRRDDESLRSYIQRFCQVRNTIPCIPAHAVIYAFRGGVRHNRMLEKIAFKEPQTTAQLFELADRVARREEAWTWNSSGSGVAAPAVPGSAARSGRRDRRRKKGSARSDDEGHVLAIEGASRAPRKGRPASDKKKEAGAPSRERPTGKWCTVHNTSLHDLADCRAVKSLAERTRKWEEEKRQERREGKAPAAPAGNRRGETKQKATAEDIDDGDDDLGFQEPEATVATVDGGACAHASRRSLKSMKRELLAAAPTHEATRRARWSEVALTFDQTDHPPCVARGGQIAMVVSPTVCNVKLGRVLIDGGAALNILSPAAFDAIKAPRMVLRLSQPIIGVTPGHTWPLGHIDLPVTFGSSANFRTDRVDFDVVDLSLPYNAVLGRPALVKFMAAVHYAYLQMKMPGPGGPITVHGDLKVALACMEQRADHLAAASKPAGGDERLSTSVPAAPRQRMVTCDEVPEDALVSFLRANADVFAWRPADMPGVPREVIEHRLAVRPGARPVRQKVRRQAPERQAFIREEVARLLEAGFIREVIHPEWLANPVVVPKANGKLRMCIDYTDLNKACPKDPYPLPRIDQIVDSTAGCDLLCFLDAYSGYHQIRMAREDEEKTAFITPIGTYCYTTMPFGLKNAGPTFQLTTRISLGSQIGRNVEAYVDDLVVKTCNQETLLSDLAETFESLRSARIKLNPDKCVFGVPAGKLLGFLVSARGIEANPEKIRAIERMRPPSKLRDVQCVTGCMAALSRFISRLGEKAVPLFKLLKRSGPFTWTEEAERALTQLKAYLSSPPVLVAPEPDEPLLLYLAATPQVVSAALVVERDEDNPHSAHAYPVSTRPGREQGGEAPEPNGGPRPPTAGVGPPPACPTVPGAPDPQDGPGATAGRPRLSPSDPEVVGTEAECAPRGLLDQERHGDAAPGEEDRPRRKVQRPVYFVSEALRDAKTRYPQAQKMLYAILMASRKLRHYFQAHRVTVVTSYPLGQILHNREGTGRVVKWAIELSEFDLRFEPRHAIKSQALADFVAEWTPAPEPVSAPEASSGPSQLPHTAFWVMQFDGSLSLQGADKTLPEDREGSERVRRISKRYVLVEGTLYRRAANGVLLKCIPREQGVELLADVHEGECGAHSASRTLVGKAFRQGFYWPTALNDAVDLVRRCRACQFHARQTHQPAQALQTIPLSWPFAVWGLDILGPFRRTPGGFEYLYVAVDKFTKWPEAYPVIKIDKHSALKFIRGITARFGVPNRIITDNGTQFTSELFGDYCEDMGIKLCFASPAHPRSNGQVERANAEILKGLKTKTFNILKKHGYSWIEELPAVL

SEQ ID NO: 168996 - protein, 162 aa, Oryza sativa
  unsure (1)..(162): unsure at all Xaa locations
  Clone ID: PAT_MRT4530_67457C.1.pep
MGAISGAHLSESRERFRDRQCQRDMQEGGGDACLQVLDRQLTGREXFQPMFRQPGALGLRMQCCQQLQDVSRKCRCAAIRQMARSYEESIPMPLEQGWPSSSSHYYSGQGSSFEQGYYRXGSSEEGYYCEQQQQPAMTRLRLTIARHYAPQLPSMCRVEPQH

SEQ ID NO: 168997 - protein, 1747 aa, Oryza sativa
  Clone ID: PAT_MRT4530_67458C.1.pep
MAERAVAHNLSPSASGDDGEQNPRRRARTPPSPSRRNLGRGEALEGVERSATSPPAGDGGGRRDGARRRLVYGDGGTPQGALQAAGALLRHPPVVPDPETPARRWLDDVADLVMTAQQRLGAGGQSSANKASGAAAAGSTSSRRRARRTAAVTRRSSAIPSSTPPTQEDVHGGPDARLDIERRRDDSRAAHATEGASSSGAPLRSGHGGRPPVSPVDGAGCRAFVASLRNVRWPPRFRPTITEKYDGSVNPAEFLQIYTTGIEAAGGDDRVMANFFPMALKGQARGGGVRHNRMLEKIASKEPQTTAQLFELADRVARKEEAWTWNSSGSGVAAPAAPGSAAQPGRRDRRRKKKSARSDDEGHVLAVEGASRAPRKGRPASDKKKEAGAPSRERPTGKWCTVHNTSLHDLADYRAVKSLAERTRKWEEEKRQERREGKAPAAPAGNRRGEAKQKATAEDIDDGNDDLGFQEPEATVATVDGGACAHASRRSLKAMKRELLAAALTHEATRRARWSEVALTFDQIDHPPCVARGGQIAMVVSPTVCNVKLGRVLIDGGAALNILSPVAFDAIKAPGMVLRPSQPIIGVTPGHTWPLGHIDLPVTFGGSANFRTERVDFDVADLSLPYNAVLGRPALVKFMAAVHYAYLQMKMPGPGGPITVHGDLKVALACMEQRADHLAVASKPAGGDERLSTSVPATPRQRMVTCDEVPEDALVSFLRANADVFAWRPADMPGVPREVIEHRLAVRPGARPVRQKVRRQAPERQAFICEEVARLLEAGFIREVIHPEWLANPVVVPKANGKLRMCIDYTDLNKACPKDPYPLPRIDQIVDSTAGCDLLCFLDAYSGYHQIRMAREDEEKTAFITPIGTYCYTTMPFGLKNAGPTFQRTTRISLGSQLGRNVEAYVDDLVVKTRNQETLLSDLAETFETLRSARIKLNPNKCVFGVPAGKLLGFLVSARGIEANPEKIRAIERMRPPSKLRDVQCVTGCMAALSRFISRLGEKALPLFKLLKRSGPFTWTEEAERAFTQLKAYLSSPPVLVAPEPDEPLLLYLAATPQVVSAALVVERDEDNPHSAHPHPVSTRPGREQGGEAPEPNGGPRPPTAGAGPPPACPTVPGAPDPKDGPGATAGRPHLLPSDPEVVGTEAECAPRGLSDEEHPVSTRPGREQGGEAPEPNGGPRPPTAGAGPLPACLTVPGAPDPQDGPGATAGRPRLSPSDPEVVGTEAECAPRGLSDEEHPVSTRPGREQGGEAPSRTAAQGPRRPELALCPLVRRCQEPPTPRMAPGPLREGRACRPPTPRSSTQKPSAPRAASRTKSTLEMRLAKRIGPAERCSGPSTSLAHRVTVVTSYPLGQILHNREGTGRVVKWAIELSEFDLHFEPRHAIKSQALADFVAEWTPAPEPVSVPEASSGPSQLPHTAYWVMQFDGSLSLQGAGAGVTLTSPSGDVLRYLVRLDFRATNNMAEYEGLLAGLRVATGLGIRRLLVLGDSQLVVNQTLPEDREGSERVQRISKRYVLVEGTLYRRAANGVLLKCILREQGVELLADIHEDECGAHSASRTLVGKAFRQGFYWPTALNDAVDLVRRCRACQFHARQPHQPAQALQTIPLSWPFAVWGLDILGPFRRAPDGFEYLYVAIDKFTKWPEAYPVIKIDKHSALKFIRGITARFWVPNRIITDNGTQFTSELFGDYCEDMGIKLCFASPAHPRSNGQVERANAEILKGLKTKTFNILKKHGDLWIEELPAVL

SEQ ID NO: 168998 - protein, 1789 aa, Oryza sativa
  unsure (1)..(1789): unsure at all Xaa locations
  Clone ID: PAT_MRT4530_67459C.1.pep
MAERAVAHSLSPNASGDDGEQNPRRRARTPPSPSRRNLGRGEALGEVEGSATSPPAGDGGGRRDGARRRLVYGDGGTPQGALQAAGALLRHPPVVPDPETPARRWLDDVADLVMTAQQRLGAGGRSSATEASGAAAAGSMSSRRRARRAAAVTRRSSAIPSSTPPTQEDVRGGPDARLDIERRRDARRAAHATEGASSSGAPLRSGHGGRPPVSPVGGAGCRAFVASLRNVRWPPRFRPTITEKYDGSVNPAEFLQIYTTGIEAAGGDDRVMANFFPMALKGQARGWLMNLPPASVHSWEDLCQQFTTNFQGIYPRPGEEADLHAVQRRDDESLRSYIQRFCQVRNTIPCIPAHAVIYAFRGGMRHNRMLEKIASKEPQTTAQLFELADSVARKEEAWTWNSSGSGVVAPAAPGSAARSGWRDRRRKKGSARSDDEGHVLAVEGASRAPRKGRPASDKKKEAGAPSRERPTGKWCTVHNTSLHDLADCRVVKSLAERTRKWEEEKRHERCEGKTPAAPAGNRRGEAKQKATAEDIDDGDDDLGFQEPEATVATIDGGACAHASRRSLKAMKRELLAAAPTHEATRRVRWSEVALTFDQTDHPPCVARGGQIAMVVSPTVCNVKLGRVLIDGGAALNILSPAAFDAIKAPGMVLRPSQPIIGVTPGHTWPLGHIDLPVTFGGSANFRTEQVDFDVADLSMPYNAVLGRPALVKFMAVVHYAYLQMKMPGPGGPITVHGDLKVALACMEQRADHLAAASKPAGGDERLATSFPAAPRQRMVTCDEVPEDALVSFLRANADVFAWRPADMPGVPREVIEHRLAVRPGARPVRQKVRRQAPERQAFIREEVARLLEAGFIREVIHPEWLANPVVVSKANGKLRMCIDYTDLNKACPKDPYPLPRIDQIVDSTAGCDLLCFLDAYSGYHQIRMAREDEEKTAFITLIGTYCYTTMPFGLKNAGPTFQRTTRISLGSQIGRNVEAYVDDLVVKTRNQETLLSDLAKTFESLRSARIKLNPDKCVFGVPAGKLLGFLVSARGIEANPEKIRAIERMRPPSKLRDVQCVTGCMAALSRFISRLGEKALPLFKLLKRSGPFTWTEEAERAFTQLKAYLSSPPVLVAPEPDEPLLLYLPATPQVVSAALVVERDEDNPHSAHPHPASTRPGREQGGEAPEPNGGPRPPTAGAGPPPACPTVPGAPDPQDGPGATAGRPRLSPSDPEVVGTEAECAPRGLSDEERPGDAAPSEEDRPRRKVQRPVYFVSEALRDAKTRYPQAQKMLYAILMASRKLRHYFQAHRVTMVTSYPLGQILHNREGTGRVVRWAIELSEFDLRFEPRHAIKSQALADFVAEWTPAPEPVSAPEASSGPSQLPRTAYWVMQFDGSLSLQGAGAGVTLTSSSGDVLRYLVRLDFRATNNMAEYEGLLAGLRVAARLGIRRLLVLGDSQLVVNXDKTLPEDREGSERVRRISKRYVLVEGTLYRRAANGXCQFHARQTHQPAQALQTIPLSWPFAVWGLDILGPFRRAPGGFEYLYVAVDKFTKWPEAYPVIKIDKHSALKFIRDITARFGVPNRIITDNGTQFTSELFGDYCEGMGIKLCFASPAHPRSNGQVEHANAEILKGLKTKTFNILKKHGDSWIEELPAVLWANRTTPSRATGETPFFLVYGAEAVLPSELTLRSPRVTMYCEADQDQLRRDDLDYLEERRRRAALRAARYQQSLRRYHQRHVRARSLCVDDLVLRRVQTRAVLSKLSPMWEGPYRVIGVPRPGSIRLATGDGTELPNPWNIEHLRRFYP

SEQ ID NO: 168999 - protein, 153 aa, Oryza sativa
  Clone ID: PAT_MRT4530_6745C.1.pep
LSVARAPRTSAAVPRALGAGAGVARDQRERGTLLPSRSGVRQGHTAHGPRRGVHIRRMSCMLFICICFPVAAVPSLKQNKWFYYFFFGGREYEFRICIRCYVLGRNILSRVCSSIGLVVSVALSLGPSRPRCNVVMLHSVVATFRLVFFSWTW

SEQ ID NO: 169000 - protein, 305 aa, Oryza sativa
  Clone ID: PAT_MRT4530_67460C.1.pep
MMRPPPPPSAPPPSPPRAVFPSARCCLPSPHRFLPSTRRKRLVTVAKLAFPAELKAHTLHLVDNGGELMLVHHCFGTTRRGAGGGGFNLFNDRLTSFYYTHRVDLDAKRRRALRVGHDEAFSPKRTVSCRGLGVRRRAAFLGRNRTLSVSAEVRLMLQLWMNSFVCSQRFSVIAMKKQLQDEIQQHEEAHAGAGLEAWKWKGRPRGARAVNSKYHGLEWAMGKRGEFAGFRGMAVGGGSLAAGGGAAEAAGLEDGGGGKAERVGRRRPGGLAGAVDTIRPAGEAGRWRAGAAAAAVAEALRSGGA

SEQ ID NO: 169001 - protein, 58 aa, Oryza sativa
  Clone ID: PAT_MRT4530_67461C.1.pep
IEKYKSFGGVRIESDVYVTAHGCKNLTNCPRETWEIEAVMAGAPWPVRATNNSLSKAS

SEQ ID NO: 169002 - protein, 208 aa, Oryza sativa
  Clone ID: PAT_MRT4530_67462C.1.pep
MVTAAAARRRPSLGRQKIEIRRIESEEARQVCFSKRRAGFFKKASELSILCSADVAAVVFSPAGKAYSFGHPSVEFLLDRFLSSSLPATAGKEEGSSVSVVAELNRQYGELRAMVDAHKARRERAEKTMEKQRQRQPAAWMDPEAEVGRMAPEELMALGTKLVAVQGGVAARADQMLRDALLLGRRPNTTTTTTTRAPPGFFHLHPHF

SEQ ID NO: 169003 - protein, 716 aa, Oryza sativa
  Clone ID: PAT_MRT4530_67463C.1.pep
MRRWKRKLGRTLTRFLSKPPFKPKPTNPSPPPPPPPPGIQPPPPALPGMPHGRPPPPFPGGRDAFPQAASTVVPDPARFFAPALLSSPLPTNSFFQNFVLKNGDQPEYIHPYSTFVEDLTVSAASDAAAAAAGQRHRVAAFDDLSVTLDVSPSLRAFLVRGCPFVTVATADAAGPVDISVASVHAFIEVASCDDALTKWRLRMNSGQTFLLYASAPIRLAQSSVTQLSAPGFSGVIRVAYLPDPSMEAVLDQYSRCFPTAGEASLNRPFCVEYTWRKQGWGDLLMLAHPLHLRLLSEDCCVRVLDDFRYRSIDGDMVGVVGDSWVLRTDPVSPTWHSMRGISDDGVGEVAAALRKDVDALASSSITTTSSYFYGKAIARAARFAVIAEEVGCPDVIPAVQRFLKATVTPWLDGSFQGNGFLYEPKWGGLVTLQGSKDTGADFGFGIYNDHHYHLGYFLYAIAVLAKIDPSWGRKYMPQAYSMVADFMTLSRKHGASYTRLRMFDLWKLHSWAGGLTEFADGRNQESTSEAVNAYYSAALLGLSYGDTHLVSIGATLTALEMLAAQTWWHVREGDTIYEDDFTGNNRVVGVLWANKRDSGLWFAPPEWKECRLGIQLLPVLPISEALFPDISFVKELVDWTMPALSREGVGEGWKGFVYALEGIYNKESALQKTRALTGHDDGNSLTNLLWWLHSRGTADDGVVGFSRCCWYRQYCH

SEQ ID NO: 169004 - protein, 740 aa, Oryza sativa
  Clone ID: PAT_MRT4530_67464C.1.pep
MRRWKRKLGRTLTRFLSKPPFKPKPTNPSPPPPPPPPGIQPPPPALPGMPHGRPPPPFPGGRDAFPQAASTVVPDPARFFAPALLSSPLPTNSFFQNFVLKNGDQPEYIHPYSVRSAAAALTLCYPARNHSPSFVIQTFVEDLTVSAASDAAAAAAGQRHRVAAFDDLSVTLDVSPSLRAFLVRGCPFVTVATADAAGPVDISVASVHAFIEVASCDDALTKWRLRMNSGQTFLLYASAPIRLAQSSVTQLSAPGFSGVIRVAYLPDPSMEAVLDQYSRCFPTAGEASLNRPFCVEYTWRKQGWGDLLMLAHPLHLRLLSEDCCVRVLDDFRYRSIDGDMVGVVGDSWVLRTDPVSPTWHSMRGISDDGVGEVAAALRKDVDALASSSITTTSSYFYGKAIARAARFAVIAEEVGCPDVIPAVQRFLKATVTPWLDGSFQGNGFLYEPKWGGLVTLQGSKDTGADFGFGIYNDHHYHLGYFLYAIAVLAKIDPSWGRKYMPQAYSMVADFMTLSRKHGASYTRLRMFDLWKLHSWAGGLTEFADGRNQESTSEAVNAYYSAALLGLSYGDTHLVSIGATLTALEMLAAQTWWHVREGDTIYEDDFTGNNRVVGVLWANKRDSGLWFAPPEWKECRLGIQLLPVLPISEALFPDISFVKELVDWTMPALSREGVGEGWKGFVYALEGIYNKESALQKTRALTGHDDGNSLTNLLWWLHSRGTADDGVVGFSRCCWYRQYCH

SEQ ID NO: 169005 - protein, 54 aa, Oryza sativa
  unsure (1)..(54): unsure at all Xaa locations
  Clone ID: PAT_MRT4530_67465C.1.pep
ILNIQNLKXECMVRDKLIYILGTXMKGGAFHREASGVGATVCDLIRSRAVSEQT

SEQ ID NO: 169006 - protein, 40 aa, Oryza sativa
  Clone ID: PAT_MRT4530_67466C.1.pep
MPDWIRDALVPVICACRISDWDCVALAHDLKIEDVFVKTM

SEQ ID NO: 169007 - protein, 138 aa, Oryza sativa
  unsure (1)..(138): unsure at all Xaa locations
  Clone ID: PAT_MRT4530_67467C.1.pep
VRGLAAALPLVLRGPLLTVDGIVLTCVARLDRCPFLVTFTADATHXIGGELHTGXDSLSSPTVTGYLDLCWCRPKMDVTHWTVAHPLEKTLYPNSDLYWMXYTDLYLFSCRMPSDWNRMHHAGFXLSMTFEADAGQPD

SEQ ID NO: 169008 - protein, 38 aa, Oryza sativa
  Clone ID: PAT_MRT4530_67468C.1.pep
CTRLLTRALTRSCTHSSWVPTTSVLHYGLIRAGLTKSC

SEQ ID NO: 169009 - protein, 51 aa, Oryza sativa
  unsure (1)..(51): unsure at all Xaa locations
  Clone ID: PAT_MRT4530_67469C.1.pep
AVATPDCWKXNEIFLTGVALGXYMGLVTVLFFYLAHDTNFFMDVHGVTPVR

SEQ ID NO: 169010 - protein, 1417 aa, Oryza sativa
  unsure (1)..(1417): unsure at all Xaa locations
  Clone ID: PAT_MRT4530_6746C.1.pep
MAEKPPLSPSSASPGTVKEKIQKLGLTDVNEGNVVPIDPEKFTPDQKKDFDAMMQQARNQFLNSFMQTRKGTLVQKYKVKVVADDPGTSSSKGEDGKQAPDGSAQPSDKGATDGSLGSQGDNSQGVHGVQGEGGGNFNQDGNASQEFFNNFQDRVDYAVHNALINQSGVLVNTLSNMMKSMVDGTIAEYQAAGPVYLQGGVFPNYRPLITNTHPPVQAAPSIAPSAQPMAPASAPAPTQQPIQQTPPRQQVPMPQQPQGTPQQRPWADLIADVIKEQFGLRPKDAGNLYRQPYPEWFERVPLPNRFKVLDFSKFSGQDSTSTYEHSSRFLAHCGEASAVDALRVRLFRLSLAGSAYTWFSSLPYGSINSWANLKKQFHSCFYSGIHEMKLSDLTSIKQKHDEPVHEYIQRFREMRNKCYSLSLTDAQLADLAFQGMIAPIREKFSSEDFESLSHLTKKVALHEQRYAEARKNSKKVNHVCPYIYGSDDEGDDSEIDAVEWVRSKKVIPCQWVKSSGKEEKYDFDITKADKIFDLLLREKHIQLHASHTIPSAEELGKKRYCKWHNSRSHTTNDCKVFRQQIQAAIEGGKIKFDDSKRPXRLMAILFLLIXGSMTSSRRSIMKKMMMVLILIGMKXRLPSIEDCPGCSDIAESSSRSYSRGNRLRQTRVPVHERLGPVNQDHSQEDNEIRKNQWCPSEQAVFEKPEGTENRHLKPLYINGYVNGRPMSKMMVDGGAAVNLMPYATFRKLGRNVEDLIKTNMVLKDFGGDPSEXGVLNVELTVSNKTIPTTFCHRCXRWQGDKIEINLSAEFRTKLIELLREFRDCFAWEYYEMPGLSRSIVEHRLPIKPGVRPHQQPPRRCKANMLKPVKAEIKRLYDAGFIRPCRYAEWVSSIVPVIKKNGNVRVCIDFRDLNKAIPKDEYPMPVADQLVGAASGKKILSFMDGNAGYNQIFMAKEDIHKTAFRCPGAIDLFEWVVMTFSLKSAGATYQRAMNYIYHDLIGWLVEVYIDDVVVKSKEIDDHIADLRKVFERTRKYGLKMIPTKCAFGVSAGQFLGFLVHARGVEAEYEAVLKGLQLLKEVEADAFEIMGDSLLVISQLAGEYECKNDTLMVYNEKYQELMKEFRLGALGYKPMIKDVKVEIAAMTADDWRYDVHQYLQNPSQSASRKLRYKALKYTLLDDELYYQTIDGVLLKCLSADQAKVAIGEVHEGICANGQAEASNKSLIKFIKRKISDYPRQWHTRLAEALWSYWMACHGSIQVPPYKLVYGHEAVLPWEVRIGSRRTELQNDLTADEYYNLMADEREDLVQSRLRALAKFIKDKERVARHYNKKVVPKDFSEGELVWKLILPIGTRDSKFGKWSPNWEEPFQIYKVVSKGAYMLQGLDGEVSGRALNGKYLKKYYPSVWVNARSADVADT

SEQ ID NO: 169011 - protein, 170 aa, Oryza sativa
  unsure (1)..(170): unsure at all Xaa locations
  Clone ID: PAT_MRT4530_67470C.1.pep
MSEVSVMAEVEETAAAAPLDLPPGFRFHPTDEEIVSHYLTPKALNHRFSSGVIGDVDLNKCEPWHLPAMAKMGEKEWYFFCHKDRKYPTGTRTNRATESGYWKXATGKDKEIFRGRGILVGMKKTLVFYLGRAPRGEKTGWVMYEFRLEGKLPSQAXRAPAKDQWAVCKV

SEQ ID NO: 169012 - protein, 132 aa, Oryza sativa
  Clone ID: PAT_MRT4530_67471C.1.pep
MHGQAQVNPFTIHEGHLQPGLPADEFRFRRGQLLDSLPDNSALIVNAASTKYMTHDIPYEFRQNSNFMYLTGLEEPDAVAVFLKTQQKTAFILFVLPRDAHSEQWDGARVGLDGAKSKYGADDAFQLGDMEQ

SEQ ID NO: 169013 - protein, 79 aa, Oryza sativa
  unsure (1)..(79): unsure at all Xaa locations
  Clone ID: PAT_MRT4530_67472C.1.pep
GNVCEFAVGLIHFQLYLDPHMAGVTIVAFRSQNLVAVTKAKVVHGSXPPVSDVVLPKAFQVDKGTIDWAQVQFWENNHV

SEQ ID NO: 169014 - protein, 66 aa, Oryza sativa
  Clone ID: PAT_MRT4530_67473C.1.pep
TSINWHVCLVYYFTHMENSYVACRHVESYTFSNSHMLQTGTSLLQKLSLKCELNTHFLTTWQTHIA

SEQ ID NO: 169015 - protein, 91 aa, Oryza sativa
  Clone ID: PAT_MRT4530_67474C.1.pep
IGAGFVRRGTLTTDSGAESAREQASGAAAGTIWDAACSSGQDLASGDSAPETVVNVPQPSRTSRQHRTTRHEGITTKTKAQTNQHPGQLRG

SEQ ID NO: 169016 - protein, 463 aa, Oryza sativa
  Clone ID: PAT_MRT4530_67475C.1.pep
MDDGWSANMVNAQKRRRKEIELKLAELDNIEERRDLFPQEWEIRYELEREVENIYLQEEIWWQRRGGEQWLLRGGKRKSHIFSLQQGGDTILDFNQIQHHIYEYYKKLFGREEIRNIHLDQGVWRDKLRVSDSENEYLQKPFDLAEIDRVMKSMKSNTAPGPDGFPVGFYKKLWPEFRGLIKEMLDDLHKGVLDSDRINYGVISLLPKIKDANIINHYRPICLQNVILKIITKAITLRISEIIGWVINWTQSAFIPGRYILDGCVILHEVLHDLNLRQEAGIIFKIDFEKAYDRVHWGFLYEVMRLKNFHSTFIEWVRKITKGGGLTHLQYADDTILFTKASEENVLALKFLLYCFEEMSGMKINYQKSAVYVLGVPKETEEKFADMLNCKVGSLPFTYLGLPMGFEKIGFFRKWKRDWNLGTVGICHMEGEKSGLILVCPASPCTPWVSLSSEKNFTRRWTV

SEQ ID NO: 169017 - protein, 114 aa, Oryza sativa
  Clone ID: PAT_MRT4530_67476C.1.pep
KLMICNTLISKTYLLQPLLLLKPATRSKFCCCMLAALQRKIFLGNPKIRGKIKFSPNKNNTERLHTPLLFTLSAHSCTKLAGARRSPLLGPSTNGPMGLPSLIAPRTLFSSSPG

SEQ ID NO: 169018 - protein, 95 aa, Oryza sativa
  Clone ID: PAT_MRT4530_67477C.1.pep
YQYIYIYIYIYIYIYIYIYICVCVYIYIYIYIYIYIYIYIYIYIYIYIYIYIYIYIYIYIYIYIYIYIYIYIYIYIYIYIYIYIYIYIYIYYYIV

SEQ ID NO: 169019 - protein, 71 aa, Oryza sativa
  Clone ID: PAT_MRT4530_67478C.1.pep
RAQVLRSPIVATSKAVHWRGVFTPFMAAEIPGVPHFNRLGGRSPFPQLASSRFGPLRSSLPAVAQPALPMG

SEQ ID NO: 169020 - protein, 62 aa, Oryza sativa
  Clone ID: PAT_MRT4530_67479C.1.pep
RRLTIGIQAFEDRTGFVVAFAVGIAPVDFPSELVAEVRTPVSESALALRDNLSPIRYRGTRR

SEQ ID NO: 169021 - protein, 61 aa, Oryza sativa
  Clone ID: PAT_MRT4530_6747C.1.pep
ISFFSSSPASRRMPPLMTSWEALAGGAIFLLPRQVAPHAAHFRSSQPLELHTRQSLLTRLL

SEQ ID NO: 169022 - protein, 99 aa, Oryza sativa
  unsure (1)..(99): unsure at all Xaa locations
  Clone ID: PAT_MRT4530_67480C.1.pep
QLVAADGSRLLPAXVKDRMLLLRGDLEEVAAYLADLSELENPPLTAKHWMREFPKRYPAQRWVEEDKADDLDWGLFGDANDRCGELCVLVVSHNMFTYL

SEQ ID NO: 169023 - protein, 386 aa, Oryza sativa
  Clone ID: PAT_MRT4530_67481C.1.pep
MVSPIRFSSSQENVVWFASGSGSEAEHGNPREHTGGKSNSGFYFLLTPRNRDWWWSTSWSCWRKACRKSGGDRLRILTEYGRGNHGLGFPALERTQPNYFLRFTMGGEGRGGALISISSGEGRGGDPEDTLTFSDTMIALQLMRTQFPKLEKVVTEPFILQSQLYSSVKDRTQVDRDLESLKKDKVLRVFKLNTGQDDHAIMFMDDYLKQFGETPCIEIDIMVLHGIIPPFAMMALAVKRSRGKDQDGTEVFGWFERYVIHLKLEVSIDQRDLFSLLSLGGDVTDKHITLLMNAGLLTRQLIDPNMYWFSIPSIGPVLKGLTQGRKEILSLLNRKKYKEMLLSSLEKTRLRFSPLDVRFHIRDLIGSGHIKTVQTPTGLLVRISKD

SEQ ID NO: 169024 - protein, 159 aa, Oryza sativa
  Clone ID: PAT_MRT4530_67482C.1.pep
CRKRHAPLFSTPRELKPSMENGGEEDDRASRCKRITRESDATKNGAATKLQALRLVEDLSLPSVQVVVMSANMGCSHCRQRVTKVVSKMNGLLDYMVDFGKKEVTVRGTMVHTKKKRKQHKKQHEENKKGIAANWEKKSSSQSNDSARTLAWLLRCYSS

SEQ ID NO: 169025 - protein, 223 aa, Oryza sativa
  Clone ID: PAT_MRT4530_67483C.1.pep
MAAIRASFLLAAAALLALWCSDHGGVVASDPSHLQDLCVADKASTVRVNGVACKDGEDVAAEDFFFSGLHMAGNTTNKQGSAVTAVNVAQVPGLNTLGISLARIDYALHGLNPPHTHPRATEILTVLEGSLYVGFVTSNPENKLFTKVINKGDVFVFPKGLVHFQFNYGTTDAVAIVALSSQNPGVITVANAVFGSKPSITDDILAKAFQVEKTVVDQIQAKF

SEQ ID NO: 169026 - protein, 197 aa, Oryza sativa
  Clone ID: PAT_MRT4530_67484C.1.pep
MENGGEEDDRASRCKRITRESDATKNGAATKLQALRLVEDLSLPSVEYWNCLAWMSYTLRLQLRRNILLSMDVNDFGHPTIGYERPHAVAHHAEDDNEELMVQVVVMSANMGCSHCRQRVTKVVSKMNGLLDYMVDFGKKEVTVRGTMVHTKKKRKQHKKKHEENKKGIAANWEKKSSSQSNDSARTLAWFLRCYSS

SEQ ID NO: 169027 - protein, 97 aa, Oryza sativa
  unsure (1)..(97): unsure at all Xaa locations
  Clone ID: PAT_MRT4530_67485C.1.pep
PRSSLSLIFPPSPSFPSPPSLSLRRSRALPIAGDPRAGRHSRSHLCRAAPLPPKAVSRHAAPRHPLRAPLSTPQHHPHHEAKLPPPXTASSRTSPPS

SEQ ID NO: 169028 - protein, 71 aa, Oryza sativa
  Clone ID: PAT_MRT4530_67486C.1.pep
MYYQNKKKKKKKKKKKKKKQKKKKKKKKKTPPKKKKKKKKKKKNKNRGAPFMETTFSPRGSASQIFFFGPP

SEQ ID NO: 169029 - protein, 37 aa, Oryza sativa
  Clone ID: PAT_MRT4530_67487C.1.pep
NCAKLARMSGLLGSSDTASSYRCSVRVYYSVALLVPN

SEQ ID NO: 169030 - protein, 94 aa, Oryza sativa
  Clone ID: PAT_MRT4530_67488C.1.pep
MLVVGRVNVTSGVKKDRMMITRMHTVSDIFCVGCGSIVGWKYEAAHEKSQRYKEGKFILERYKVSGPDGSHYFVTHDAHVGGSDVDDVALMLIT

SEQ ID NO: 169031 - protein, 52 aa, Oryza sativa
  unsure (1)..(52): unsure at all Xaa locations
  Clone ID: PAT_MRT4530_67489C.1.pep
XQARNDLQINTKWADNVLGAVMEEICGLLQMEFXGHTPADVKVNGCTRGDFW

SEQ ID NO: 169032 - protein, 91 aa, Oryza sativa
  unsure (1)..(91): unsure at all Xaa locations
  Clone ID: PAT_MRT4530_6748C.1.pep
XRXXXEEVNHRGRARICRYHLLPACAGFAFLPIPIFQSSSSPLLLFPPPPILPRILPPPPDLEKISSRWLAPRDHPCSFDPXIPPLAPLGF

SEQ ID NO: 169033 - protein, 197 aa, Oryza sativa
  Clone ID: PAT_MRT4530_67490C.1.pep
MVVSRGSSSRRSLERSSRAAPFPPREAAAAAANAAPSSAAAAATFALPLPRTGTRATLLPHGAPSAPPSPLRFSARRNRRRSSLFPEAATVATAASFLRVYHQLLRRHHSLPPQVSAAPPCDRATLSGGAGGRRRLFGAFRRLRVRWLAALYRRRSGGSRRARRAERRWRASATTTSAAAAAALESRERKNERGRKG

SEQ ID NO: 169034 - protein, 89 aa, Oryza sativa
  Clone ID: PAT_MRT4530_67491C.1.pep
MARRGGVIPASGPDATRVARSAPGPHLRGPHGVENEAVGRGQQQPMGAGCVGQSRPAADGQVDAGGTNSPQGHSLISGTHSDPGPRVSD

SEQ ID NO: 169035 - protein, 1246 aa, Oryza sativa
  unsure (1)..(1246): unsure at all Xaa locations
  Clone ID: PAT_MRT4530_67492C.1.pep
MASRIFEYFVVCGMGPEIRTLDGVKGYHGVDDMYMPAFLDQLPPSSHALYPPPPPQLPTCVLPAGVRIYSSGLDANDFSTYPREXIPIVLTEGDGSKIYVSCIAFRDPICEDILEAYQIPANSFADKCIWCVSRSPTTTXSYGMASPRALDVSDESQQPAEASGLGRNWVQSMFSRDRSLRAXLFAIENCLLSVEAPPKEWLPHADISFQPLVQCLDVDKLIQLFTAVLLERRILLRSNKYTLLTLVSEAICHLIYPLRWQHVYIPIIFSSGVDYIDAPTPYMMGLHSGVDTSTVTMDGNACLNPYLDLFTSKHCHNILLMNKTRLIMSKVVVVDLEYNRITTSEEIPPIPETEHNFLRGEILKLLQPNVMGIDYMKINLGSMGDHSLRTGTKSWGQEHDFQLRLIFLRFFALIMSGYRNFIDNASPSGFNTQAFLKKRSLAQYSVLSTHPQIKEXITGSSDGLIRFWENEGGIRCVKNLTLHSASVLSISASDHWLGIGAADNSMSLFHRPQERFGGFSNTGSKVAGWQLYRTXPENCCYGEMCSIGPGSEKNLQRWSQRTSSALGCHHEYLSYTRTHVHVKKMSIALLCLLYVINFLVALCINNXELYISSIHFCNLXKTCPDTSSGILCIFRRKFIVLAQKKKITDEQFIAVKELLKTAITRANSRNDMLTIRDALEVSAEMYKKDPNNVQDYVQRHLLSLPVWEELRFWDGYFEYLMENCSNKSTNYVTLVTAQLIVMATHMAGLGLSDIDSWNMIEKIAERNNLGYKQLIKLRALLTHLQQLRIGYWGVATGKGQQPPSYGMASPRALDVSDESQQPAEASGLGRNWVQSMFSRDRSLRASSFNRTNEVKVGATAGKTDLPAAQKKIQTNMRTLRGHTGAITALHCVTRKEVWDLVGDREDAGFFISGSTDCTLLVEHGMPQPCKSVVHSKQKLGLPRNEAKISMLPRTIRAISSDRGKIVSGADDQSVIVWDKQTFKLLEELKGHDAPVSSVRMLSGERVLTASHDGTVKMWDVRTDTCVATVGRCQSAVLCMEYDDSTGILAAAGRDVVAHVWDIRSSKQMFKLQGHTKWIRSMRMTGETIITGSDDWTARVWSLTRGTCDAVLACHAGPILCVEYSPSDKGIITGSSDGLIRFWENEGGIRCVKNLTLHSASVLSISASDHWLGIGAADNSMSLFHRPQERFGGFSNTGSKVAGWQLYRTPQKTAAMVRCVASDLDRKRICSGGRNGLLRLWDATTSI

SEQ ID NO: 169036 - protein, 59 aa, Oryza sativa
  Clone ID: PAT_MRT4530_67493C.1.pep
LTRNPQIESPALPADLPTPPLTSGRRPSKPIRRLDMMVNWSRQHNYLWSRILGGLEIGA

SEQ ID NO: 169037 - protein, 100 aa, Oryza sativa
  unsure (1)..(100): unsure at all Xaa locations
  Clone ID: PAT_MRT4530_67494C.1.pep
LKSRVHHRSLNLYCCVILVPKLANRPFRSSNLFDCVIPVSKLAYHSFSSFNLFSCVTLVSKLGFEYHLGQNGXDRDDTTEQVREPKRVIYKFRDRDDTVE

SEQ ID NO: 169038 - protein, 66 aa, Oryza sativa
  Clone ID: PAT_MRT4530_67495C.1.pep
NLEPPSAPRGTAASGRTEPSPWRPPPPPSPSPSSAPPPPPRAFLRPPLVRKWPRVPTPNPAGGEDS

SEQ ID NO: 169039 - protein, 1085 aa, Oryza sativa
  Clone ID: PAT_MRT4530_67496C.1.pep
MAPAAAPASVSAGSAEADGAPRMAKFLCSFGGSILPRPLDGRLRYVGGETRIVMLPRDVSYTDLAARMRELYEDADIIKYQQPDEDLDALVSVVNDDDVVNMMEEYDKLIAAGEGFTRLRIFLFSQHLDDEAAAAAVHYNGDERETERRYVDALNSLGDVRTPSSPVSVEQLFGIGGNESGIPDIAGLRHLNVPRPSHSQRYGEMDSPWSPAYISPGHYGVHDPRDFPISPRFQVGAEDFDERIPDDFVRHSPKYRHYEVHSPQHVDNLVWLPPGAVIQQNAGFPGNLGRPGNFLDGSSMYDHCRSPFHKGQGDPRYVDPRWRPIQHFDQTSMTNEYSGHPTNSCPDCNRPGERFVLNQDVRLENGVYVKEQTGGHPPPMFYNESHSHDRAWHAHANQSHQRYEDPRLHMPGSARAMEPYIVDNSSVTSLSRSSHESPHYFHGSSEHVSDTYHNQQVGVGGPYVQTPGFEESTGQHYSHSSTYGADPFYQMQQNLPPLQSLRRRANSPVHTGSPYESPHLPIPNGNFVRNTGDVSPRIPGMPAYDRIPNPWPSPNGSIPYRVVGHDIPAVVENRSNPNSGQYVQPLFAPESVQNQPGAPLMEIHPERACGGSVLSSQVDGRVAALPLTDQLSRMDINPLKKLEGPEHEKFTRNANETTSLHAMNDPSALTHHIGVVPEVDPKQRKPVEYETVTSKVHEGGATALQECGDISEDRLNFLPELAASVKKAALEDSEEKEKAQQDAGPTLLPTCDEEGNGKKLEETPAGNTGTDQDSDVHGSGEQQKSSGIEATTAEAEALSKGLQTIKNDDLEEIRELGSGTYGAVYHGKWRGCDVAIKRIKASCFAGRPSERERLIADFWKEAQILSSLHHPNVVSFYGVVRDGPDGSLATVTEFMINGSLKQFLRKKDRTIDRRKRVILAMDAAFGMEYLHGKNIVHFDLKSLASNGCYLTVIPPPFSAQIGDLGLSKVKQHTLVSGGVRGTLPWMAPELLSGKSNMVSEKIDVYSFGIVMWELLTGEEPYSDMRAAAIIGGIVNNSLRPQIPSWCDPEWKSLMENCWASEPADRPSFTEISQRLRKMAAAMNVK

SEQ ID NO: 169040 - protein, 308 aa, Oryza sativa
  Clone ID: PAT_MRT4530_67497C.1.pep
MTKFLRSSLLAPLRTPTQLNLKRICRLKWQLLRIMQGREKGESAMAVVEAAGGRRGVAAGERRKAKAKEAAVGAMARALFYPTLLYNVVRSKVQAEFRWWDEVDQFILLGAVPFRRDVPRLQKLGVYGVITLNEPFETLSRGIDHLVIPTRDYMFAPSLVDISRAVDFIHRNASCGRMTYIHCKAGRGRSTTIVLCYLVKYKNMTPSTAFEHVRSKRARVLLTRSQWRVVQDFSKKNAEAELPTVTSHSAAASPAGNVVSVTEADLESSEVTAANIPDITEHASLSSHKTTPTKPMTNMLSCLIPSLK

SEQ ID NO: 169041 - protein, 135 aa, Oryza sativa
  Clone ID: PAT_MRT4530_67498C.1.pep
RPRVRDVLVMVDHEDYPALLEYLQGKQDDQQFRKMLAWKAFQHVASYDSAVSEWLWKQSNKGDVFPPNFTVPLSLKSTLRYGENPHQKAAFYGDKSLSVVNAGGIATAIQHHGKEMSYNNYLDADAAWNCVSKFE

SEQ ID NO: 169042 - protein, 47 aa, Oryza sativa
  Clone ID: PAT_MRT4530_67499C.1.pep
RSSPLSRQGQRIYKRYTTLPVKLLHLLNDADFKLDGCYLLETTRTIH

SEQ ID NO: 169043 - protein, 43 aa, Oryza sativa
  Clone ID: PAT_MRT4530_6749C.1.pep
MIKDVKVEIAAMSADDWRMACHGSIQVPPYKLVYGHEAVLPWE

SEQ ID NO: 169044 - protein, 956 aa, Oryza sativa
  Clone ID: PAT_MRT4530_674C.1.pep
MAASTGVVSSLLSKLATLAEQKYGDVRRIRREITFLTDELSSMNALLLKLADMEELDSQLKEWRNKVRELAYDVEDCIDAFAHHHRLSRGDADPGGLIRRAARNMKKLRASYRAADQIHELKARIMEVSDRRLRYKLDEAASAAPAPALAIDPRLPALFAESKGLVGIEGPRSTLVSWLMDGEGQLKVISIVGFGGLGKTTLAKEVNHAVGAHFQLKAFVSVSRNLNPKKLICDVLSQIMDQKDYGKKDYGKLEVEQLIPILREHLADKRYLIIIDDIWRIQAWDLVKSALHDNSCQSRIITTTRISTVAESCCSTLKDRIYYIEPLNEVESRELFFKRIFATEHGCPPHLEEVSNEILKKCGGLPLAILSIASSLANKPDIKEQWEMVKKSIGFALEGTPTLEGMNKILLFSYYDLPTHLKACLLYLSIFPEDQVIESDKLVWRWMSEGLIVGEMGKNLEQAGQIYFNELINRSMIESVGVRYDGKVLACRVHDMVLDMIISLSAQENFVTILHGHEDKFAGEKIRRLSLRCNRPDVEVTQVTSKKFAQARSISLFGYKEMLDLQGFQALRVLDLGKNVLFKQVKNIGKCYQLKYLDLSDTDIVELPEEIGNVQSLETLDLRNCRRLTLPSTISGLRKLVRLLVDYTAALPEEISGLVALQVLSCASYNSVKFMQALGQLTELRSLAFKCWNPDWYFDAGMYKEVSVASLRELGKHKLQYLDICDDDAIPDALMCSSSESDCPFPHLQKLVLSNHNIQRIPRWIGSLVNLCHLEIVVKTTRQNDLGTLGNLPCLLYLKICRLYEPVESQQLIVPNRGFRCLKELCFQCWCPLGLEFAPGAMPWVQTFRLWFMPCWKSCDHGVSVGLGIEHLLELKLVDVKTGYGCGKREVKSFEAAITAVVANHPRRPALVLRRSGERSAVRKENWTAVETNMNKSLFDSSTVRQRLQKQSRFQT

SEQ ID NO: 169045 - protein, 68 aa, Oryza sativa
  Clone ID: PAT_MRT4530_67500C.1.pep
MSSSGGFKNGGKQKPLKAPKAAKKDYDETDLENMKKKKEEEKALKELRAKAAQKGALGGAGLKKSGKK

SEQ ID NO: 169046 - protein, 70 aa, Oryza sativa
  Clone ID: PAT_MRT4530_67501C.1.pep
FGENFSPARAKGYQFGMVAVFDSVEGLDAVDGDGKVEAAKAIVRPLLDDVLELEFVVGPAAAEAPAPANL

SEQ ID NO: 169047 - protein, 226 aa, Oryza sativa
  Clone ID: PAT_MRT4530_67502C.1.pep
MEGGGTRTRRRAATASPGRNKVWVEPPGKTHHLRSPPPPPSPSSSKRVAVVYYLCRNRHLEHPHFIEVPLASPDGLYLRDVINRLNVLRGKGMAAMYSWSCKRSYKNGFVWHDLSEDDLVLPAQGNEYILKGSELLDRSPPDRQQNGVGEPKVETLKHPPEESPHSRGSQEGCSSSSSPSAATKGGSPSAASPQAQQQAKSLCPNGCKVQACQFAHAADHLWLYFC

SEQ ID NO: 169048 - protein, 491 aa, Oryza sativa
  Clone ID: PAT_MRT4530_67503C.1.pep
MEGGGTRTRRRAATASPGRNKVWVEPPGKTHHLRSPPPPPSPSSSKRVAVVYYLCRNRHLEHPHFIEVPLASPDGLYLRVFFFFPFSIPTNDAGGVDADVINRLNVLRGKGMAAMYSWSCKSFSRSYKNGFVWHDLSEDDLVLPAQGNEYILKGSELLDRSPPDRQQNGVGEPKVETLKHPPEESPHSRGSQEGCSSSSSPSAVTKEASPPPPTPQPQQQAQSATLLPSSSASTNREDDQCRTPRSGSSGNMSPEPAGRVAPPLSEASSPGPLEYRVCKPIGAQDASTQTDDSERDAPERNSRMAGVCTENSTSDSEIQECHPRSTQPSPKGPGVVRESPPVCSSDASPGGRVETLESLIRAEASRRSSFRALEEEHLFAPMGVKFKPANLLMQLITCGSISVKDHRSFGLIPTYRPRFTQVEFPSPMFSTPLALRHLDNIPCNARTIGMRIPESEYFSGSLVETKKQDESGKGGTPTLKRSSSCSEDSIS

SEQ ID NO: 169049 - protein, 37 aa, Oryza sativa
  unsure (1)..(37): unsure at all Xaa locations
  Clone ID: PAT_MRT4530_67504C.1.pep
SSPRSCTPXCTSAXPPPPPPSPRTPPPPPSSPPTSSA

SEQ ID NO: 169050 - protein, 129 aa, Oryza sativa
  Clone ID: PAT_MRT4530_67505C.1.pep
MVGRGFGEHLRVEDIETNPMVLTTTTTDARQRPATRKKAAAARVGRRRRAPVVGGEGGRTAEVPHLRAHLTAATASGGDDGGGGATWPKTAGGDGELGARGGDATRHRRGRERGQTEEDDEGKLYISLD

SEQ ID NO: 169051 - protein, 45 aa, Oryza sativa
  Clone ID: PAT_MRT4530_67506C.1.pep
MEGLEGGPYSITSFTDDAGNGPSSSSSPALVPISSILGEASRRCL

SEQ ID NO: 169052 - protein, 245 aa, Oryza sativa
  Clone ID: PAT_MRT4530_67507C.1.pep
KNGVVPLVILSPSLISLLQLSDAGVGGGRSGVRRPRRHSPRRAKWVLVGRSGTPRARCPRVTQQESQRSSPQRHLPLTVRKKGARAGEPRVPMPTWIDIYIETERLGASGQRRRRRRADRSSRGSLSASTPIDPLSRINGRPSLQNLNGAMKVDWARVGERAVAVVDLHSGAALVLFAGIAGWTVGGERGWRIQKQPALDLEILKSYSFHPRGTLLYGYWFSRRICKMQAKNENNREVSPIGSLA

SEQ ID NO: 169053 - protein, 158 aa, Oryza sativa
  Clone ID: PAT_MRT4530_67508C.1.pep
MDEAEAAFFARRGRRCCCFPWPSSASSHQRVGGAEEESWWQRAVDAVLKVREWSELVAGPRWKTFIRRFGRGGGGGGGGGGPRPHNYGRKLNYDALSYALNFDEGHGASPEGDYTGYRDFSARFAAPPASAKSSMDLGGRDAPPLFNPPPPHDGAGRA

SEQ ID NO: 169054 - protein, 53 aa, Oryza sativa
  unsure (1)..(53): unsure at all Xaa locations
  Clone ID: PAT_MRT4530_67509C.1.pep
QQXXLSXLLADRVRDSRRRRPXRSTTTKTRSYTRERPLCVSQEWLPCPSALAG

SEQ ID NO: 169055 - protein, 787 aa, Oryza sativa
  Clone ID: PAT_MRT4530_6750C.1.pep
MKPGKNRVAPPPRSTPTCAVASLGFARVRATPATRSLAPNLAGIALPALAFSLHLRLPLQQPRAVAVVVAFGRRCRRWVREEEKKTGLHFPVVEDPGKPVVTVKPICSIFSRAVRRRPSPPSFTVATLGIAGASGDGRVDDDGGLPAILGDDGGVNEVGDGLAIPMATFPSDDNDRSDGGARLNSRRRRWRTGERGDGATSGDELRRGWRRVEEGGGGAAQLGFGREEDDESDSFLCCTHNSADDASVDSFACHTSYDARTAAAADSADTTNPAGCTTSSANTTKAAASATDSADATKAAASPADPTGSVETADRSADSAPGPYPEWFERVPLPNRFKVPDFSKFSGQEGMSTYEHISRFLAQCAGQAADRVRAKGFQVNSAKIINKYQRKYDKQQEMHYEEYDDGFDPHWGCEFFRLCWNEGMRLPSIENCPRCSDVVESSSRSYSRGNRLRQARLPVHQRLGPMNQDRGQEDEEVEEEINHRLRKPKPRQEWRVKNQVPVADDAAADEAKRLAKGKSVVAAPINMVFTLPAEFGIDQADVDEVEEESAKLVPSPEQAVFDKPEGTENRHLKPLYINGYVNGKPMSKMMVDGGAAVNLMPYATFRKLGRNAEDLIKTNMVLKDFGGNPSETIGVLNVELTVGSKTIPTTFFVIDRKGHPVNRSLTAMGATSKTMHPQPTMRGLHVSGARVAGLPCTGTTRVVHHRSTGPTAQIGPEPIGRCGGGLARLSSAQSRPAGHGKGGGAHACVAGDGNQRRKGGGARPGRRLDPARLGRRGRGIEEEGCLI

SEQ ID NO: 169056 - protein, 157 aa, Oryza sativa
  unsure (1)..(157): unsure at all Xaa locations
  Clone ID: PAT_MRT4530_67510C.1.pep
PNPASAPEVPGHSRFRDNKVPPPTAAGGDEVQQGPPPRRHXQEKGRKKPQRQRRESRTGVTSSRTTTGGGSEEPARPRRRPGEREDAGDPPPPVAMEPQAPQAGEEAEQEQPRPQAEPAASAPATCAPAGRTASRAGRTPGAAPATRGPGTSRTRRG

SEQ ID NO: 169057 - protein, 91 aa, Oryza sativa
  Clone ID: PAT_MRT4530_67511C.1.pep
YSRYLSKSVSLYASSSELTTSSSSDVTPVEESSSAPTASLAVAPPGRSPSTAATSAAVLPDLPSSSSLSPEESTGEASSTGAAASLLKSST

SEQ ID NO: 169058 - protein, 113 aa, Oryza sativa
  Clone ID: PAT_MRT4530_67512C.1.pep
DRGYTTTRPLAVRVAVRLAPCLEVPELPAPVLAVHVTRFVGCGGGGGVSVGVCVHHAVAYGQSFWRFMDAWSAAARGRPSPPAPAFDRSAIVHPMAADMARRILRKKAPELPL

SEQ ID NO: 169059 - protein, 183 aa, Oryza sativa
  unsure (1)..(183): unsure at all Xaa locations
  Clone ID: PAT_MRT4530_67513C.1.pep
SGRIPIIYHLMEVDLXGAHVPGTRSRACPERSSRLWTVERRWANHHRDGMGHTCRTAAXPPDTRPKRAWLXAAVSSIIXPVTHRSXVSQVRSTPHLMWHGASALPALNVVRWVLRGVHLTSLAWRPCGDRPEEXTPRAREGRLQPIHGPDPLGGXRHVDIGGRLLPFKHGTPDPYHRHIYINY

SEQ ID NO: 169060 - protein, 494 aa, Oryza sativa
  Clone ID: PAT_MRT4530_67514C.1.pep
RAAGSIQIHADLLNNLIGAPVPGCGHRPGGRILNRLSSDLYAIDDSLPLILNIFVANFFSLLGTLVVLSYSQVSFLLILVPLWLIYRKVQFYYRSTSREVRRLDSVARSPIYSSFTETLDGSSTIRAFQKEGFFLERFIQHVTLYQKTSYCELVAGLWLSLRLQLLAGFIILFIAIMAIVGFNSKSVINFGTPGLVGLALSYAAPVVPLLNGFLTTFTETEKEMISVERVVEYVGIPQEELHGSESPHSGWPTEGNIEFERVTLRYKEDLPPALNDVSFFISSGMQVGIIGRTGAGKSSILNALLRLAPICNGRILVDDFDVAKLAVRDLRGHFAVVPQSPFLFDGSLRENLDPFNRTTDLRIWEALDKCHMKTEIESIGGLDIHVKESGASFSVGQRQLLCLARAILKSSKILCLDECTANVDNQTASLLQNTISAECKGMTVLTIAHRISTVMKMDSILVLDQGKLVEEGNPEVLVDDKFSRFSRFAKASNM

SEQ ID NO: 169061 - protein, 53 aa, Oryza sativa
  Clone ID: PAT_MRT4530_67515C.1.pep
MSRTRHIYEWAKNSELTRQNGPKFTSLWRRITEEATCRFWARDAPDPLLMAVA

SEQ ID NO: 169062 - protein, 101 aa, Oryza sativa
  Clone ID: PAT_MRT4530_67516C.1.pep
MGRAKPGRPKHDRTVEGPGPAQHAGLWAVPARPVYPCRVWADAIARGPARHGTHTAHVAPSGRAAEGSRGARRREAHVAAWRVASGVATCRWGWEAGSLSL

SEQ ID NO: 169063 - protein, 192 aa, Oryza sativa
  Clone ID: PAT_MRT4530_67517C.1.pep
MALGALLRRARALPRLPQGTAARSFSAPNVGHFSASNTKHAIQRCQEALLEELIWNEVYAKHNEARVRRLINSLVRSLGDVPKQKGFTKTFSQEFGMVVKELEKDMNMSFKSFKVPLRRLILRTLDKYQQQGSDALLKNSLESKVHSSHWGDAHANPNFWTRAFGLSLLLSFFSFEVGQQYEILNGEGELPK

SEQ ID NO: 169064 - protein, 140 aa, Oryza sativa
  Clone ID: PAT_MRT4530_67518C.1.pep
MGRAKPGRPKHDHTVEGPGPAQHAGLWAVPARPVYPCRVWADAIACTPRTWRQAAEPPRAAAGPGGGKRASLCSRVARGKRRRDVSLGLGGWVALALTASVTPCLVGSSRDGDRRLSETPYGGRTASQTTNARVPRVPNG

SEQ ID NO: 169065 - protein, 71 aa, Oryza sativa
  Clone ID: PAT_MRT4530_67519C.1.pep
LGGTLVLVKGGIDHNIVRHAYYAGKIMSFPLPCSSVQLKPSKEIKQNLQLRQYGEMMKLVDVEIEFISVNP

SEQ ID NO: 169066 - protein, 67 aa, Oryza sativa
  unsure (1)..(67): unsure at all Xaa locations
  Clone ID: PAT_MRT4530_6751C.1.pep
MAYLRSIAFKFYLKTKVIQGIKGTPPEGSRSSNHKANTTTTVAYNLEDVKCTHQEISSKXSQQGSRR

SEQ ID NO: 169067 - protein, 66 aa, Oryza sativa
  Clone ID: PAT_MRT4530_67520C.1.pep
TYKTVRTKSFDTDFIWRLSQHRTHVGPTCQDATSSRQPLPSSSPLLLPPAKQDICLCVSPPCLYAL

SEQ ID NO: 169068 - protein, 110 aa, Oryza sativa
  Clone ID: PAT_MRT4530_67521C.1.pep
MARPARRPHRLTDAATDDVDLAALGCFLHCLQLSNINGAEITVTSIADQLPALVTGLPKLSQRRIRRQLLEVNLEAPIRSRMMGGRQQGGNDDFPSLPSSPYLGSLLHRK

SEQ ID NO: 169069 - protein, 43 aa, Oryza sativa
  Clone ID: PAT_MRT4530_67522C.1.pep
DAWGSNGWTNTKGGDEENKTDAAESIEEDVMVIAEKATGPSAG

SEQ ID NO: 169070 - protein, 57 aa, Oryza sativa
  Clone ID: PAT_MRT4530_67523C.1.pep
MPAHKKIRVRLNPISVLPHPNPGKKSASPEVWKKKNPHNGSREATRKRNTLRRRHNY

SEQ ID NO: 169071 - protein, 41 aa, Oryza sativa
  Clone ID: PAT_MRT4530_67524C.1.pep
SLLVVKGRVPVLRVLTHHVEAAKVCRVGVSPVDGKVLGFRC

SEQ ID NO: 169072 - protein, 104 aa, Oryza sativa
  unsure (1)..(104): unsure at all Xaa locations
  Clone ID: PAT_MRT4530_67525C.1.pep
KKARREQIAEKKLQLLCLQIYRMQTRKLIGSYFTIINTTNYMIMQALNLIRDAIGRTVRAVVSYCRRRRXRRLYCCWRGGGPLAWPSSLVLSSWRPGELWLLLV

SEQ ID NO: 169073 - protein, 496 aa, Oryza sativa
  Clone ID: PAT_MRT4530_67526C.1.pep
MKFSTLDEACKFWEYYEGQIGFSVRKRKHATLCHHNERFLKSRLSKLKWPMIQDKVTENPSFHYAVQLDCEDQITNIFWADAKMIVDYAHFGDVITFDTTFETNREYRPFGVFTGFNNFRETAIFGAALLYDETFESFKWLFDTFLATHNQKQHRTIYTDQDIAMGKAIEHVFTEAWHGLCTFHIMQNATKHLPSNRNSETNMLTEFSSCMYDHDDKVKFEEAFDAMRKKVQKQTWLDSIYKVREKWAECYMRDVFTLGMRSTQLSESLNNDLKIHLKSNLDIIRFFNHFERVVKGKRDNELKSEYESREKLPRIKMRSPMLLQARYERSTVACTNVLDGNYQFTVAIGILSDDPIFEEEYNVIGNISTETASCSCGQFERIGILCAHRWARPARSGTIQDCRGKNIIENPNLAAILRYKVLSHKFVNLATEAANSEECCILIENTLDSLSKQVKGRMNACQSNHDAECDEQMILEAPKVHLRAARLKKNQFRIKA

SEQ ID NO: 169074 - protein, 103 aa, Oryza sativa
  unsure (1)..(103): unsure at all Xaa locations
  Clone ID: PAT_MRT4530_67527C.1.pep
MPIRTISMESHQEVYHPGALKEELDEFMYTLIFFLPGQVFRMAFSKLTGXGATTPARLIEEEVVHAFALFEAVLVGANIFGGHVNPVVTLSAFIMRNISLFQG

SEQ ID NO: 169075 - protein, 294 aa, Oryza sativa
  Clone ID: PAT_MRT4530_67528C.1.pep
MASLLPSPVFPTAAAAAASTSSSSRCRCRCRITTSSSAHGWSNCQGWRLHHRVWAAQAADQQGGVQQQQQQEENEDGVVDSNAFYYDKKAVMSNEEFDNLKEELMWEGSSVVMLRKRENDCPDEQRLLEASMAYVAGNPIMTDAEFDELKLRLRVYSDLTVDYFKMFLLNVPAAVLALTLFRLHRFFFLDDLTGFEITYLLELPEPFSFIFTWFAALPLIFWVAQAITSAIVKDFLILKGPCPNCGNENLSFFGTILSVPSGGARNSVKCANCSSSLVYDSASRLITLPETAEA

SEQ ID NO: 169076 - protein, 145 aa, Oryza sativa
  unsure (1)..(145): unsure at all Xaa locations
  Clone ID: PAT_MRT4530_67529C.1.pep
SSPLFLPSTPPMKVPYPFVPPPFGSAPXEPYPQPPDRQIKPLLRPGSASPAAAPWVPAAPFSARCTTGGAPSPPSSLQXSPPVTPPPNALCTRPTPSATAPARRRPGPQAPLPPPGSGGPKAAAAAPSIAPPPPPPPASNTQRRK

SEQ ID NO: 169077 - protein, 1426 aa, Oryza sativa
  unsure (1)..(1426): unsure at all Xaa locations
  Clone ID: PAT_MRT4530_6752C.1.pep
MAEKLPPSPSSASPGTVKEKIQRPGLSEVNEGNIVAIDPEKLTPDQKKDFEAMMQQAREQFFKSFTQTRKGKFPETSTFKEGEGKRVLDGSAQENQGDDSQGAHAVQGDGAHEPQRGNLNQNGETAQDFFNNFQDRVDYAVHNALINQSGVEQFGLKPKDTGKLYRQPYPKWFEKVPLPNRFKIPDFSKFSGQDDFDSLSHLVQKITLHEQRFAEARRSSKRVNHVCPYMYGSDDDDDDSEIAAAEWVRSKKVIPCQWEKNSGKEERYDFXLPKLTRFLICYSGRSKFNSPLVFRQQIQVAIEGGKIKFDDSKKPMKVDGNPFLVNMVHTVGRTADVGRARGFCVNSARIINKYQRKYDKQQERHYEEDNDGFDPYWNCEFFRFYWNEGMRLPSIEDCPECSDITESSSRSYNRGNRLKQARVPVHQRLGPANQNDYLEEDENAKTQWCPSDIFTKNQKRRVQRLRNRERFQEVEQEIGHRLRKAKPRKEWRVKNQVLGADDIAADEAKRLAKGKSIVTAPINMVFTLPAEFGIDQADVDELEEELAKLVLSPERAVFEKPEGTENRHLKPLYINGYVNGKPMSKMMVDGGAAVNLMPYTTFRKLGRTTEDLIKTNMVLKDFGGNQSETKGVLNVELTVGSKTIPTTFFVIDGKGSYSLLLGRDWIHANCCIPSTMHQCLIQWQGDKVEIVPADSRLKMKNPSYYFEGVVEGSSVYAKDTVDDLDDKQEFRTKLMELLKEFRDCFAWEYYEMPGLSRSIVEHRLPLKPGIRPHQQPPRRCKADMLEPVKAEIKRLYDAGFIRPYRYAEWVSGIVPVIKKNGKVRVCIDFRDLNKATPKDEYPMPVADQLVDAASGHKILSFMDGNAGYNQIFMAEEDIHKTAFRKLEPFTPLLRLRADQQFTWGAKQQKALDNIKEYLSSPPVLIPPQKGIPFRLYLSAGDKSIGLVLIQELEGKERVVFYLSRRLLDAETSHGYGIGLVIIAPWGASFEFAYAIKHRVTNHQAEYEAVLKGLQLLQEVAADAIEIMGDSLLVISQLAGEYECKDDTLMVYYEKCRTLISEFRMVTLKHIYREQNIEANDLAQRASGYKPMTKDIEIEIATITADDWRYDVFQYLQNPSQSASQKLRYKALKYTLLDDDLYYRMIDGVLLKCLSADQAKVAIGEVHEGICGTHQSAHKMKWLLRRAGYFWPTILEDCLRYYKGCQDCQKFGAIQRAPASAMNPIIKPWPFRGWGIDMIGMINPPSSKGHKFILVATDYFTKWVEAIPLKKVDSGDAIQFVQEHIIYQFGIPQTITTDQGSIFVSDEFVQFADSMGIKLLNSSPYYAQANGQAEASNKSLIKLIKRKISDYPRQWHTRLAEALWSYRMACHGSIQVPPYKLVYGHEAVLPWEVRIGSRRTELQNTLTADEYYNLMADEREDLVQSRL

SEQ ID NO: 169078 - protein, 243 aa, Oryza sativa
  unsure (1)..(243): unsure at all Xaa locations
  Clone ID: PAT_MRT4530_67530C.1.pep
GFDHLEKEIIWEVGRVVLLAPHALYYDEKAVMSNEEFDNLKEELMWEGSSVVMLSPDEQRLLEASMAYVAGNPIMTDAEFDELKLRLRNQGSEIVQEGPRCSLRSRKVYSDRAALCVPPALRPAPAAVXARTPAFSLDDLTGFAXIHIVSELPEPFSFIFTWFAALPLIFWVAQAITSAIVKDFLILKGPCPNCGNENLSFFGTILSVPSGGARNSVKCANCSSSLVYDSASRLITLPETAEA

SEQ ID NO: 169079 - protein, 61 aa, Oryza sativa
  Clone ID: PAT_MRT4530_67531C.1.pep
TPSTYFSIAFSVFFKPHRNGNPLTYTGKRGPRVQNRGYTKELKYFFMTPQTMECWWETHAF

SEQ ID NO: 169080 - protein, 68 aa, Oryza sativa
  Clone ID: PAT_MRT4530_67532C.1.pep
LGPEAEGFRWGEEGGAMHPGAVVHEAAPAEARRQKGFGRGRRAAPATLHDSPSATVARARRQYGWRRH

SEQ ID NO: 169081 - protein, 52 aa, Oryza sativa
  Clone ID: PAT_MRT4530_67533C.1.pep
ETLIKCFTCTCQTLTCAPAPAARYMTPNVHSAECIQDSRALIVQDTIEVHDY

SEQ ID NO: 169082 - protein, 77 aa, Oryza sativa
  unsure (1)..(77): unsure at all Xaa locations
  Clone ID: PAT_MRT4530_67534C.1.pep
PAHSRGHVSYAKFEIFVRVKCYMYRIGXINCFHRLXKIXKXKTSSVFFFLFSFGVVLPXLTWGGRSGGPRLPSPCLR

SEQ ID NO: 169083 - protein, 117 aa, Oryza sativa
  Clone ID: PAT_MRT4530_67535C.1.pep
ALKFFLIVPPKIFLADHFGSTLVAGLVALGQMHNVACASTKLRCLKPSRSPAILRLGSQDDAFFSFFFSFFSFFSVFSFFSFFTGWLSPPLFKSTPPGDDGLCPEVTVARDVPGIPA

SEQ ID NO: 169084 - protein, 137 aa, Oryza sativa
  unsure (1)..(137): unsure at all Xaa locations
  Clone ID: PAT_MRT4530_67536C.1.pep
PGGKILFSHPGGVCFFPGLVFNFPGVPQRMFPSLVPFGAFFCFLGGLFYHRVSLAGTFSXNLSPFXHPGGGVLPPFFFPPLFNVLDAFVFFSQAFLKPKGYSFEKFSPKKSCPLSFVFAPCIWISSPVFCFFFLNLL

SEQ ID NO: 169085 - protein, 92 aa, Oryza sativa
  unsure (1)..(92): unsure at all Xaa locations
  Clone ID: PAT_MRT4530_67537C.1.pep
ATAPGGPSGDRSGCGSSLPLPSSSGHRAPPHPPASVEWSSPMWIXWWATSTSSPVVRIWWLAGGYKGKSTLAPPSLPSPPLPSPLPLPAGTS

SEQ ID NO: 169086 - protein, 70 aa, Oryza sativa
  unsure (1)..(70): unsure at all Xaa locations
  Clone ID: PAT_MRT4530_67538C.1.pep
FVEERAPDIVAVVAXSTWTAATVCLVPMAVMQQRSQAVTRLRQRWCRRRGVARRWTSRHWLRPPRDRFRG

SEQ ID NO: 169087 - protein, 86 aa, Oryza sativa
  Clone ID: PAT_MRT4530_67539C.1.pep
IENYFIFIQSILLFRLISVEQRYVATLDTFPYTCTYTHTDTVHVRSIKRKITSPIRCNGCDDLAGGTWGRRGLVESSGAPGRRSWR

SEQ ID NO: 169088 - protein, 84 aa, Oryza sativa
  Clone ID: PAT_MRT4530_6753C.1.pep
GPPLAAFRAPRPHPTSSPAASPGRGSTAAKAAGRGRRRRRRRRRVGGARGARGARRGVAGGTGHPWLLAWWGRGARAARNELVA

SEQ ID NO: 169089 - protein, 58 aa, Oryza sativa
  unsure (1)..(58): unsure at all Xaa locations
  Clone ID: PAT_MRT4530_67540C.1.pep
NLILYIAPPLFFCVFFKHRAYKPTQVQYNNVYYLTHYHILSALINKXQTSHVTSRNIP
